United States Patent Application Publication US 2014/0230087 A1 - sequence listing, part 16

SEQ ID NO: 11637 - DNA, 4514 bp, Vitis vinifera
  Intron number 25 from transcript GSVIVT01021873001 (locus GSVIVG01021873001) derived from phytozome v7.0 (chr-ID chr 14; pos 6176035 to 6180548 reverse strand)
atatccatccttgtcaataatctccacagtatgtaatcttttataccatgactttctacatttttaagcttaatttatgaattatgaatctcatctgtggtgcattgtttattctttaagatatgtgatatttatgatctatcaacgagacatgtgtttcttgctatgggaaatgcattttggaatttgttattcttagattttctttctaatacttgcatgcaccttagagtaacctatacatcttttcacatggatttgccatgttatcccttcaaacttatgtcaactcaacatggatactgctgtcacaccctaagtctatactagtagaaaaggttattgggaaggtggtttcagggtccgagagtgcctttgtggacagtcttaattgctaataaggctacaaatttgataaaaaggagttcaagagtggggatggtgtgtaaattggacatagaaaaagcttatgattatgtcaattggaaatggagttcagattgagatagatttggtgggtttattattacatatctacggcacaattctggtgaatgctattcctgcaaccttctctaaagttatagaggcttgaggcaaggtgaccctctttctccttatctttttgttttgcttatgaaggtcctcaattgttgcatttcaaaagtaaggcagggagggtcaaaagtaaggtgaccctctcatttgtggttgggtctttactgaagaagggagtattttttgtttccccctcttttttgtttagccttttggtgcttattgtttcatctcaattgttttggtttcatgaatgttttaaaagcgcaactagtgcacaagagtatataggtcatatacaataagccagaaggctaaacaaaaaagaggggaaacaaaaaatactccctccttcagtaaagacccaaccaatcaataaaatcaaccaaatatatagagcctccacctatatacaccgtaatccatagagatagattgttaaagaaattgcatttgagtctttggtctgacattttctcactttcaaaacatcttcgatttctttccttcccaatagtccaaaataaacataaaggagtggctctccaagccctaatgcaccttctacctatgaaagggccatgccaccttagtaaagcgtctgtaaccattgtagagataagccaccaaaaatcaaaaatagaaaacaccaactgccataatatccttgccttattgcaatgaagaagaatgtgatcaatggattttgcttcctctttgcacaaggcacacctgttgaccatgtccaccctcttctttgcagctgatctaaagtcaacacctcacctccacatgcctcccaagtgaaaaagctcaccttagaagggatctaagagttccagataacctctaatgggaaggggatgacacaatctgattctagaagagggtagggaaggtgcaaggggtagatggattaggctctttgtttggttctagggtgggtagtttcccttctacatacctaggtttgccttttagagagtcttgtagtgtgggatttggtttaggaaagattcaaaatgagactatcctcttggaagaaggagggacttttggtgaattggaagatcgtttgctgagatgaaaagtatgaggggttaggaattagaaaattggaaactctagtggtgctttgcttggtaaatggctttagagatttgaaaatgagaggaatagtcaacgaaagagggtaatttgaggcaagtttggagtagtggatgggggtggtgcatgtgcgaggttagggaggcttttggagtgggtttgcggaaagacattagaaaagggtgggctgatttcaatctttgaacatcaatccaagtcaaaaatggtttgagggccatgtttggacaagtaggaagggagggtgctctttgaaagaggctcttcctatgcattttagaattgcccttgtcaaagatgcgagaggacctgatttgtgggaggctagagctggagtcagttattggtctcctcatttttgaggtagttctagtattggaagctagaggtagtgatttactacttgaattcataaggtaagattgtatggcaaagggagaggacaacttttggtggtaggtaaggaaggaggtgtgggaaggtccaagtgaagtcttgctttaactccttgtgcatggtaaacttgtatcattttcttgtggaaggggtttggggcatatttggttctttgaaagtgattttcattgcttgggaaatggtatgggttaagattttaacccttgacaacttgaggaggggtttgttttaagtgaatagatgtattccttacaagcctagtgatgaattagtaaatcacattctcattctttgtgataaacctgaacactttgggactttttactggcaattttcataatgcaatggatattttgagagtcagttaaggagctgcttatcagttggaaaacgataggcatggataagcagcaaataaggaatgacatatagctcctctttgtttgttctggtatatttgaagagagcataatggtaaaatgttcaaggaggaggagcatgcaagtcaaaaattgaaggaggtcttttcgaagtctctcattgagcggtcaagggagtcttcgaggattttgaacaacacattactggacttcattaatagtttaaatcagggcttgatggctttatgtgttactttttgcattcttttccttttgttcttttgtgggtgcatctttgattacatagggtctacccctgtctaccccttttgtttggtgttcttaattacatcattgcttacctatcgaaaaatattttacaccaatacaacttaggctcatgaatcttataaatcatgtcaagctatgttggtttgtaaactaattcttaaagagtgggacagttaataggagcattgatgccactttcattggtgactagcctaaaggtaataaacttggtgactagcctctaaatgatacaacaaaactgatgtctaagtgcttaagaggagtttgacatgagactattcatctttcttatggaacatttgtcgagggtaataaatttctaatgtagttttagtcaccaatgaagtagcagatgagaaaagatgctcaagagaagaagggattgtctttaagattgattttgaaaaaacattttactatgtaggtgagatcttttgaatcaggccttagaaagaaaatgttcaggagcaagatggagatcttgggtttgtggatgcttattattgacaattaatttttccacgctaatcaataggtgtgctagaggacaagtaaagacatctagggacttaagagaagttaacccactatctccctttcttctcaccatagtggttgatgttttgagtagattgatgttgaaaacaaagtagtgtggcttagagggctttttggttggtagtctagtacgagtgtaacttatttatagtttacaaatgacactatctttttttttttttcatgagttaggtcacttgacttgcaaatccttatgctacttttgatggtatttgtgcctatctttgatctcaagatagatttagatgaaaggaccttgttggttaaatgtaaataaggcccaagttcgggctttagcttccttcttagtttatggggttttttattggcccttatcctatttgggtctcccccttaagggggtaatccaaatggtgtttccttttaggatccaatcttagaaaggtttctgaatgattagatggtttaaagagagcttgtttatcttttggtgaccaaataattcttgtgtaactcatgtttttcacttattgtcacttatttcttatcagtttccctagttccaattaagtgacttagatgattggatgtatacaaagaaatcttctttggtttggagtggggtaagggaagagagatgaacttgttggatggaccaggtgtgtaagcctacgagagaaaggagtatagtagataagattttcgggaaggtttcctcatcgttcacatgtactttcaaatcattatcaatgaattattgtttcaggtaataacaataagtaaagaaaaaaaaaaactatatcaccattcagggggttctgtgtccttcatttccattgtccacagtggctttctatagaatgttgatggatgtgctttattcagagttcctttggtcatgtctttgtcaagattctctctactgtatgttttcattttattctttggtatgatctttctgatagtgcttcatctttttaatgcaaataatttgtgatggtgacttatgaatttcattccttttttcttttttttttttcttttttcttttttaattcatgcttttgcatagggcatcctttaaatgaggagttatatgaagttaggattcttgagttcagatactttgtactagtttctttattctgaaattttctactgtatcacaggagtagaaccatt

SEQ ID NO: 11638 - DNA, 3387 bp, Vitis vinifera
  Intron number 1 from transcript GSVIVT01035045001 (locus G SVIVG01035045001) derived from phytozome v7.0 (chr-ID chr5 ; pos 1135208 to 1138594)
gatttaccgttattggcggttgatataagctccaggtatgcagatttcttttaaccttttttttctccactttcctttggggatctttttattatgacactgttgactgaatttgtttacaaatttaggccattttcacatgattgagattttcttctaatttattttttttttaagtgaattttgagatgtgattgtggtgtggatgaaaaatctaatgggtttgactgatcttggagattgaaattacattgagaaacttaggtctcaaatgtgttcgttttgatccaattcagctattcatgatcagttcttgaaagggggttcaattggcagtgtagagagaacaaaattttgtgagaatatctggaaatgttttggaaacataacatgttacttatttagatgggaattcaaggttatgggatcccatagtgctactgacactagaacttgtgggatatttataagaactttaaatgataagtagaaatatgaatcttttccgtaaatactcatggtatgagtaatttgtgtgctagttattgtaacagaagtttatatgcataatgggaagatgtttttggtttagagatgatggcgctctggtggtaaactaattggttttgtagttacaacttagtgttcatttgcaagaaacagattggggaaaatttgggaaggaggaaggaggtgggatcataaaggaaagtaaggaaaagcatggaataggcctttgggaagccattagagaaggttgggaacattacagttggagatcgctgtcagactaaattctggtctaattcctactgtggggattgtcccttaaaaacttctttccctgttttgtttgtattgctatttcttatgcaaagtggcgaactttgggatgggttgggcacttagggccattggtctgagcttggttcattcttttcttcagttgacagatcacagcgataagttgacttggaggttagccaaaaatggtaaattctcagtcaaatccttctataacttcctaaggctgagagagcaaggtagtttcccccctaaacagatatggataccaatggtgccttaaaaagtttactcttttgctttagtgatagcttgggagaaaattctcacttggatcggctcaagaaaatggattggcctttagctcgcctgtgcttcatctgtaaaacagaagtagagtcaactaactatatccttattcgttgaggtttggcttgtagtttgaagacattgatgtttgctttgatgcaggaaattttgggggagaggtagtcagaggttgtggagagttgttcctctgtgtgtgatgtggcccatttggagagaccatactagaagttgcttttagggactggagtggttggaggtgttcgcaaaggctttgtaaatactttgtattcttggacaacttttgatttggattgtaatttgagcttcttgtttgatttcttagatactctaggaaggggctatggcaccaggttttgctgcctttggtgcattccatatacttctgatgagttactgaaattaaattactgattatgtttctggattatgctcacttgttgagaaagttggatgttgatctcgaccttcaaaagtgtgtaatatctgtcacaatgatgaccaattggtaagttccatataggagactctgagatatctgtagatgggtccacaagccatgcttgtgtacacattttcctaactcaaagtgttgtggggtgagaattaagtaaccagatccttgagttacctgctattcccttgtagagaggttatttggaaatcaataatccaggattggagtccagcggcaagctcttctttatttttggttactaatatagacatccattagtcagagttgaagatatgataactattttgtctttcgtctttctatattcagttgttgtgtaccattgagttgagggtgtatcctatttcttcctgctgtatttccttaacccgcttctttgtaactaccagaaacctctataataatcaaaacttactttgctatttttcaccatggcagcatgaaaattccttgttatttacattctctcgatgataaacatgtgtatgtcatttacacaatgcattgaactaccttttttatattggaagcagctaattataataatgatgcctgcctcaacttcctgtaattaaatggtatttacctatcttaggcttctaagttggctaagttctcacttttacatggttccatgtcaatcacactttccagaaactggtgtctggctcttgtcctttcaaattttctttattcaaatggttgttactaactctttattcttattaattattttgcttttcttaaattaattttaacattcaaatgatgagtacattctgtccttcttacagtgcacaaaagaaatgtttgctgcagtttatgaaattaatattacaacttagtaatgtagcaggagaaaattgtgtggcaatcatccaataacaaggaaagatacatcttaatcatctttgcagatgtcatttactccacttacacattaaaggtgtgcagtccgttgatgttctagccatataactaagaaaggaggagacagaaatatgaagttgagtgctgcctaacattcatgcatgcacaaccttcatctggtaggtagaaatggaatttctgattgaaaaaattgtcatggctcagaagctgtgatttggaagaataaagctaatgaaaaacggagaaaattatgtagaggagagaaatagaagtgaaaaaatgaaatttcaaataaatgtgagtatcattatcaaaagtccaaagtgtttaacatcattaggtctatatatggatggacaattctaattttagttagaaactacttttaatcataatacaaaagtttctaactgagataaaatttaatcactagataataataataatcctaaaataataacaaaatgaaacattttcacttcctatatttacaccttatataagtgcataatttaacatttttatctccattaaaagcacttttgatcagtgtctgatgatttctgataagccagcacaataatactcaggctttgccttaatagtatttctttaatcagtatctgatggtttctgatgagccggtgaaatgatattggtttgagaaagctacctgcttaccttcataatattattttcttttccatatttccaacatttgtggcagtactggaaaaataagcagcatgccgctttgatctcacttgcatagtatattttcatctggaaatttgttttttttgtttagaatactaaatattcattgcagttattctatatgcagcttcaccaatctgatacaaaga

SEQ ID NO: 11639 - DNA, 1869 bp, Vitis vinifera
  Intron number 1 from transcript GSVIVT01027066001 (locus G SVIVG01027066001) derived from phytozome v7.0 (chr-ID chr1 5; pos 18207433 to 18209301 reverse strand)
taccactctataacgacccgctcctaaccagtattgtttgctcatagcctaagaaggtcatcaaggctttaaaacacatttacataatatatgatattccacatcggataagggagaaggttcctgaaattatataaatatgagtctctcttaaccctataaacacgttttaaagttgtgagagtctctttaaacccaaaatagacaatatttatacaattgggttcgagttgttacaaaaatatttacttatgatttgaaaatcaagagaccatatcatattaagtaaaattaatcaaaatatagttaattattcataaaatattattaacaacacttatttgtttttataatgattatcaaaatagtaaaatttttaaaaatattacaaagaattaagaaatctcatactacaaaacttaaaaaatctaatactactcttcttaggcgataacgtttaacattgtttcattatcttaatcatggtcggcaacttgttgctcaatcaattcctaatataatattctaatttgagtcttaacatgggtttttgggatttggatttatggaggggacaaatcgaattttttgataattatttctttgatttgttattaaatattctctatgtttgaacctttcttttgtctatatggctcacaatcatttataggttatgacaaatattagtaatttatcccttggttaactcaccccaacctcccacatattttaatgatctcttttctctgtccttttctcttcacactccttaaattatcctacaatgtttttgacttgttcatgagaaggacaaccataagcacaacattgtcgcccgtcccttaaattttaaattttcattgccatagttttatcaggtagttagggatatcttgatcatatcttactaaattacttaatattttcgtggatatcaagctcataggatgtttgaatatgtgagagtaaagtagctttaatgggtttttgtcttctacttgttggttcattttgcaaatgaaaaatctaacgcggtgtataacaatatgtcctccataattgtcttgttgaacttcttagcttagctacatttaatttttgaaaaatttaagagaaaatataagggaaagtataatatcttgtacataataatatatactctgggcctaaataagtgtatgtctatttgatttcacaacctcatagaatataacgaagaagttatgtttgcaagatgagcgattatgatgtttcacatcacatgaaggaaaaggttcataacactatataagtataaatttttcttaatcatgtaaacatggttgtgtacaggttttattcgaaatgaaataatagaaaaaatagaagaaaaaaagatttaaaattaataaattatttaaaatgttatttcaaacttattttacttagaataaaagaaaataatttttcttgacatttttttatttctttaatattaaaacctctgaatttatagggctttaatttactaccttgattttcttatataggctgaatgaaaaaatctatgtaaataccgccaaatttaggtttacaaactcctatgattcaaaaaaggagtaggcataccaaatgagttacccagccagaaacttctccaatttaagtatatgtcatgacacatgatactgttaatctttggtgagttactcaaagttcatgacagtatacagaatggcatttagtggggaagtagtcttagggaacattacatatatatatataacttacttttttggccacttaattgtataataagagatacaggaaatcagaggagactgaatcatgattagtgctgcaaaacaaagacttgtaatggagaaa

SEQ ID NO: 11640 - DNA, 1988 bp, Vitis vinifera
  Intron number 2 from transcript GSVIVT01018573001 (locus G SVIVG01018573001) derived from phytozome v7.0 (chr-ID chr1 6; pos 13200523 to 13202510)
gagggagcaattcctccattgatcagttgaatcaggtgattttcctatgattttctttattgaattacttacagttgatttagatgatgttattctgcttaattgaatctattatgcttgaaacccaaatccacctctccaccaaccaaaaaccttgcccatctttctctccatctccatctctgcgagcagacttttaattttagttttcaattaaatggaacttatttgtttggatatttttaaaataatttcgtggatcagttcttcatacattgaataaatcaacaatcaacccaatacttttgagggcagctgtgaatttgaagttttgattgattgggatttgatttggcattgttgggaaataactacgaattgaagatgtaaaaacgactatggttttgaagcattgattaattggaatttgatcacttttgctaatctttatgatattgaaaggaccaaataggcaaatacacatgaaattttattttgaagttacagaatggttttagttattgtggaaatgtatttgcagttttctaggtttggtaatttattttcaatctcagttctagacaatttgggaagggaaaatgatgagaacaactatcatttctgaaataagatcagaaaatgcttttctgagtttaaactaatgtattggatggtgggtcaagtgttcttaattcttatgaaagggaaaaagtaaagatggttggcccttactaggttttgggtgctggcatggttaggagattgaagtattgctactacagatggtattctgctagagacaggccaaaacccataattgtcagcttgaatgattaccatgagtattccttaattctgttttagaaagaaaaaaaaaattaattccttcagtcagaagaactaataagttatttctttttttttttcatcaactgaaatatgccattattagcacaaattgtacataaatcttgtgttttatatgttgaagaaaaggttgttatatatatgttgaagaaaaggttcctttcttgggggattaactggacaaatggtacataaggggttctttgggaaagctaagatggcatcttttgggattgcatcaatatggcatgttgtctttatctttttaaggaatcttgggctggtgatagttgaaaaatactctattacaagccaatcaacatgttgtataagaatgctccccctaaatatcaaaaaataaaaacatggaattgcaattgacaagctaaaatgtaatgcaagagagtttgtattttttactttaatggatttgttttgtgaatcaactgcaagtttgggttcctactgtgatttgtgtctttgataccttcttaatgcagctttgatgtatgtggtttgcctttcaaagcttgctttgaagtctagttatgtcagctatcacataatggagtgtgtagatggtatctttctagtgatggtatcttcctattaagaaaacattaaagaaaatagcttacgagtgatcatttaggcttgagttgagcttaatttgatggccaaaacctcatccttgaaataaaactttgatcctaaggacatgcttttttgcgtaataatttttagttttttctctcacattcctttgcaccaattttggaaaattttgtttagtagttaccccatgcaactaagtatcaatacgcatgagtagaggctttctcttttcttttttcttttttttaagtttaaatttttataatagatgatcttgaaattggatatttatataaaataaattggttcaggtatctaattgatgttcttctttttgttgtctgaactctctccctatcatctaattgatattttctttttgctgttcaataatttttgtgattcagattggattagtgtgtatggggggattgtattttaaatgcctttggtggcttggttgtggtgcaggttgatatcattcaggcaacgttagttctcattat

SEQ ID NO: 11641 - DNA, 8833 bp, Vitis vinifera
  Intron number 1 from transcript GSVIVT01022843001 (locus G SVIVG01022843001) derived from phytozome v7.0 (chr-ID chr1 2; pos 18846068 to 18854900 reverse strand)
gctcaaattagcggacttgttgcggctaaggtgtgaattttgctgccttttgtttatgattgaaaattttgtatctgcatggttcatgacttgctttgctggaactatgttgtatataattttgttttggttggtcttgttagctatgtggtctggtttctcatttggtcatgactgatgaaatctatttgagtttgggatttgaaggtttatcctgaattagagatatcttgctcttgtactttcttaactaagattaaaagccatagatgaaatagttaaaaatttggattgcagaaggcctttgttttgggagaatcgaatttctttatcatggtcccttgttgagggataagtctccttcattttcttctctttttgagatgaggtccttaggttctagaagtgggttggtgagtaagttgttagaagttgttcttggttagggacatttgaatctgtcgaaggtggggacttccgcaaggctcatgggagttgaaatttggccgtcgatgatggtgcgccaagatggcacatctatggtgtttctagaaatgtggggagattaatgagagtatggaggttaggggagatggatggattaaaagagacccttagcgctgttcagcgggataggagccccctttcgaatgtctcttttgcaagttggcaacttttagtagctttgtcaagatgccaatgggggctttggaattgaggtaatttcccttttgaggaagatggaggctaagagtggctatttttttttgataagtaaacacataaaatatttattagaaaaaagggcacttaaggctgacccaaaagcatgcatggggtatacaagaggcgcctaaaagcaagaacaaaaagaagaggggatacaaaaaatcaccaaccctcaactataacccaaccaatcaaaaaaactgaataaaagaagagttccttcatttacaactaacttagtccaaaaccaaaggttacatacaaaagaatttttcaacctatgaattgaaagctcctcattttcaaatgcaatcctatttctctccttccaaactacccaaaaaagacacaaaggggttgtcttccccacctttctacacttcttgcccatgttaataccatgccaactaagaagggtatctctaaccgaataaggaaggacccaaattacgccaaaaagagcaaacaataactcctataaaactcctgccttggtgcaatgaattagaatatgatcaatatactattcttccgcacaataaaggaagcatctattagctaaagtccaccccctctttttaagttgatccccaagaggcttcccaagcaaaaaaaacccactttagtaggaacacagggactccaaatgatgttattatgaaactgaacaacacttcttgagactagagcattataaatagaattaattgagaaaatcccatccttagtctctttccacaacactctatcttccaaattaggattaagcctccttcctcagattgtcaaaagtaatctctccacctcctccacctcccagtcattgaaaggcctagagaacgtagggctcccaaaccccttcctctcccgaagagtcccacaactccactaaccaagtctctttaaaagtctcaaaagcaaacaaagaggggaaaggattacaaagagcgaagttcccacaccatttatctttccaaaatttcccttttctaccatcccccatagtaactacaactttattttgcagaagagacccttccttccttattttcttccaaaaacctactccaaaaccctcccttacttccctagtataccaacccccttcttcttccccaaacttcctattaatgacatgcctccaaagagtctcccttttatttgcaaagcgccagttccacttacataatagggccctattgagagtataaaaacgtctaactcccaaaccacccttccttttgtccaaacaaacagtatcccattttactagatgaggcttcctctctaaagctccccctccccacaaaaaatccctttgaatttttttcaatcttaaactaaccactattggaatacgtagtaaggacatcaaatatatgggcatacttgacaatgtgcttcgaattagagtgattctccctcctttagagataaattgccttttccacatggcaagccttttctgaaatctctcttccaccccatcccaaacagccatggacttgtgatgtgcagccaaaggaagccccaagtaagaagttggaagccttcccactttacaaccaaactcaagaaccaaaacctccagattctctactctccctactggcaaaatttcaaaggctaagagtggctatcgaggaagttaatatcaatatcttggtttaagagagagctctagaggttagactgcttggtcaattgcaaaggcttttccaaaaatgaaaggggttgtgggaggtgcatttgggagccgacctaggttgcatgacaaaattaaaaatcctttcttggaaggttagataggccaatgacgaggagaagctgtagataataaagtcattgttaaggtctcaagatgcaaatctaggttgcgtcaagaaattgagatgtaatagatgtctatgtagctaatggggagcttgggagtgggatgattttggagtggggacctatggatgtcaaaggtttgttaggggccataatacttttttgggactacaaagtgctggaatttattgttatggatgctatgttgttctctatttcttgtcaattcaaaagttgtgaaaatgattttgactaggtattctttagagtctattgactggtccaaattgaggagaatggggtggggggaagggggaagggggaagaagagagagaatttttgggtagagttaggggccgaaaggggtttttgtgacaacccctagtgattaggagggaattttaatatggtcagaattctcgaggaaaggagaattgcctaagaatgccttttgatatgaggcgctttttgaaagtcatagaggacttgaacttaagggatcttcctctaagtgaatggccactccgttggtgtggtggtcaaaattttctgtcttctttaaggcttgattgcttcttagtttcagatgatcaagaggaatttgtttccaacctaattcaatgtgttctatctaaactgatttctaatcattcctctatagttctaaatggtggtgagatgaggagggataactttgcctttagatttgaaaatatgaggcttaaattggaaggtgtttcacatatccaacaaggaactagtggatggttataacgtgagtgcgtttgtttagtcacattttggtagcaaaactgaagggcccttaaataagatttaaaaacgtggaaaagagttctttgggaatatcgctcctaaatcaaatcgccttttgggattctaaggagagaaaagcagtcctcattgttgaagagtttgaggctagaaggttagtagttgagtttagcaagtgggccttgttggaagaagtgatgtgacacttcgtaaaaaccaaggtgatgcgtttcttcaaggagttctttaataacaactcttttgagagaaggttaaatgctactttcttggtcttgattcataagatatgtgaagtcaaggacttgaaatattttagacccattagcttagtaggtgggttatataagctcctagctaaagttttggttaattgactcaagatgaggtggttttaatttaccaacaagctttcatgtagggtaaacaaattttagatgcaacccacattgccaataaggccttagattcaaggctaaagaacaccaatagtggttcatttacaagctagaaattgaaaatgcatttgatcatgtgaattcatatttcttattaatggttttagagaaaatgagctttggccaaaaatgggtgagatggataaaatgctgcatttttatagtgaaattctcagttttagtcaatggggtcccatcccattttttctagagtttcaagagggttttggtagggagatcctctttcccttgcctcttttggcaatggaggcacttagtcgtaccttgagaatggccaatgaaggaggtttcatctcaagatttggagtgggaaggaaaggtggggagggaatggaagtgtcctattttttattcagtgatgacaccctaaatttttgcgatgctaaccaagagcaattgatgtatttaagctagaccttcatgcaatttgaggcaatatttggtttgagaataaatatggagaaaagtgaggtaattctgatagggaagtcacaaatgtggagggtttagcctcaatgttggtttgcaaggtaggtagcctgccttctacatacttgtgtctacatttaggtactcctcacaaatcaatgagggtaggagatttggtgtatgagagattttagagaaagctagccttgtagaagaggtagtacctattaaaaggagggagacttactttgatcaataacatgatgtcaagtccaccaataatacaatactcgttttactgataaaaaaaaaaatgatgtcaagtcctccaatttatttcatgtccctattcccatccaaaaggatttcctatggggcagggcttatggaaaagcctcgtttggttaattgatctactgtttacatggtaaaaaaggatagagggtttgacgttagaaatttccatactcttttaataaggctcttcttggtaaatagagctagagattttcctttgagagagtctccctttggaaatgggtcatagcaaggaagtatgtgacaaaagaagggagatggttctcaaaagtggtaaggaatgactatgggatggggttttggaggactactataatcggatgggaagtctttagaaatagggcatgcttcattgtagttaatggcacatgggtaaaattctggaaagatgaatggtgtggagaaagttctttggaagagtcctaccctgagttattttctataatccttgatagagactcttggatagtagatatgtgagaataggttggggagggggccactggagttcctattttcatgaatagttacatattgggaattgtaaggagtgaaggtcttttttcagtgaccgcaatcaacctcaattagaaggaatgaggaggatagattggtttggaagaaaacaaagagtagcaagctctttgtcaaccctttctatgtatccttggcgaaaggaggaagtgaacttttccccttaagcaaagtagaaagtgggtttatttgtttgggaaggtatttggggaagggttttaatgtttgattagctcagaatgagggcatggagtattctaaatagatgttacatgtgtaaaagggatcaggaggctgctaatcgctttcttctccactaccttagagtgaaaatcttgtggtagttgtttagttttaaaagggacgctaggcctaaggcacaaccactccctagtcatagtgccttgcttgccaagacatgcgcattgttgaagaggcgtgcctcgtctaccttactttccctatatatatatatatatatatatattttgataggtaagtgcaaattgtataaaaacgccaaaaggggtgcaccaaagtacacagagtgtatacaccagttgcctaatagcactaaaaaggatagggaaaacaaaagtactctcccctcaatccgtcctcaaccaatcagtaaaatcagttaaggacatagaagtatgttttataaacaagcttgtctaagataataagctgcataaaaacacgaacttcagcctttggacagaaagttccatattctcaaaaaatcttctattgctcttcttccaaattgtccaaaaaaggcacaaaagcgctgctctccacactttcatcctctttcttccaatgaacgaaccataccaccctagaagggtctctctaacggaagcatgaatcacctatcacaccttgaacaaagagaacaagagctcccacaacagtcttgccttttccaatgcaatagtatatggtcaattgactccccatgagcataacaaagggaacatctattggctaaagaccactatatcctttgcaattggtctaaagtcaaaacttttccccatgttgtctcccaagcaaaaaaaactaaccttaggagcaacccaagcattccacacaatactagatgggaaagggcctacccttacttcctcaaggatagaatagagggacttaacagaaaaggatctactatttgtaacctcccaaaacatctcatcctccctctcctcaaccaccaccttatcttgaattcctgataagaagaattccacccttacttttcctttttaaacatttatatttttgaaatttctaattatatattgaaatttatataatttcattacttcttggttgaatgcttcttttaaatatttggaatcttaaattttttattgattggattagattatggatcatattttataaaattgttgtacttatataaaaaaaaattataaaattgatatgtatcctaggccaagtttcacttaattgatatatatatatatattttattgttgtgcctaagttgtaggagacttctacgccttaggtgcgccttgcgccttttaaaactatgggctgctggtttttcctttgtttggagtgacctaggcgatgcacccctttgtaaggggtaatttcctgagttggcatggttcttttgtggggaagaagagaaagaaagcttgaaagattgctttgttgtgcctattttggaagttatggatggcaagacataagagatttttcaaatgtagaacagttggatcaaacaatcaaatcttcctttgtgcatctttttggattgggttagagtgttaataaacgaccattttataataatagtaggttttgtagtttagttgagtttgaagtaatagggatgttgttttttgttttcttccttcctttccgtttgtctattggacgctaattgtatgcatcatatgtaccttggtgggctcttcttaggcactttctctattcagtatatcttctcatttgcatatcaccaaaaaaaaaaaaaaaattgaagtaacaaactaaacactattaatactaactactaagttgtttacctaccaaattaactagaaaacagcattataataatttcaatgatataaataattccaatatacccttctcggatctaattaatgaataacttaaacataaaaaatatccctacaaaacccaatttattctttccttattacaacgacctgcatgtgcatagaatattgattggtttttagatttgttcatgtttatgtgccttgaacactctcattgttattattaccaaagaaaccaagcaatattaggtagagaaaaaaacaaacgaagttcccacttatctaaggttcttcaatggattatgcttattcctctctgctgtgagataaaaggaataaaaaaaaaaaaaacaagagaaaaacagaataaaatactagatccttgtggctaacaatttttatgtaccctcctagtagttagggttaatattcaaacaaagcccaccaggttgtaatggcattgtaccgcatccacgggttccgacttttgaactcccataatccaatccaccaactggcatcctcaagctctacataagataaatcccctcagggtccgtcctctcctcttccaccttctctctttctttaccccttttcttctccttcttcattgatccacatttttagcccctctcaacaatgtgttgtcatcaatgtgaattaaattgctgcttctggtggacttgaacaacttattttgctggggcaagagttgcattgagatggctggcatctcatgaagccgtcatgtatcttgttgattttcttaattaatgtctttatctttcacataactaatcctgagaccagatggtgatattcatactatagctattcactataaacctgagcctggaaaatacctctcttcactttgacagttcagaacaatcgctcaaatccttttccatgcacaatttcttggaatgtatttggcgttgtatagaagaggcatctatgatgtttttttatttttatttttattttatttttatttttttatttattggttaggtttgaagtaggtgtggaaggttctgttcctttctttttttgatcttttgcttggaaccctttgtattctacttgtgtaatctgatgtgtccttgttgcagttctttctgcagtccgtggcggagccagctagggcctagagggggcaggtgccccccctgaaaatgttgaaacaaaaaactccacttcttacaataggactcaaacccaggactgttattggccccccaacaatgacaagcctggaccattaggctaaggcctgtatatgtgttcaaagttgcccccccaacccccccaaactaaactgctggctctgtcactgtctgcagttcccttttttatatgtaaatataaatatattgcattggcatcacggtttatcagcatttacagaaggttcctgtctttgtgcaagctttgatttgtatgacctaagatatcaaattaagtgtacatgctgaagtatgattatgtaattttcatttttgatgttgcacaaatataatgtgtcaggctaatgaagaaatgaatcttttacatgcttataagctacttgtcatctattcacaatttatttttctaatgttgtgtttactgatgtttctctagga

SEQ ID NO: 11642 - DNA, 12969 bp, Vitis vinifera
  Intron number 13 from transcript GSVIVT01027314001 (locus GSVIVG01027314001) derived from phytozome v7.0 (chr-ID chr 13; pos 16773917 to 16786885)
atagggtaagtattttcttggtcataagttgttcctataaatatataaaatctagaatggagacaaaattaagatgccgcatgttgattacatttagattcatgaacctaagcaagtctgttttacttagtagcttgcactctgtaaatagaagtcagttttcttgttcacttgcatgaggtttaagttcacccaagtatttttattcctttttgttttgataagaaataagtgatattgattcatgaatcataagtacaatgagttatgagggaaataataacaaatgaaaattagagccaagaccaaccagcccaaccacaaaaataaaagtaaactgcctacctacaacagacagtaaaaagcttgtgagggcatgttctcccccaagaacacctccaatagtgaggcaactctctcagctaatctatccactaattggctagctcatgtcttatagaggttgaagtcccattaccaaggtcctgcttctttttagagacctaagttatttaagccaaagaagtagcttgagttgatccttccaacaaagctataatctctactatggttcaaagtcatgctatctattgttaactcagaagttatcgagatggatgacttatagaatcttggatctatactggacattctagttcaatatggtgtcagcgccttctttggcgggaagtcatgtgttcaagccttattgcatatttatttcccttatttattaagtccaaaagaggccaattatagttgtttgcttatgggattgtgtatttctccacatgcaggtatgagtctgcatgtgagggagagtgttaaagagcatgatctacattgtaaacttaaatcctataaggttaaactgtttagaataattggtagtttactaggacatatgcacaaatctgtgagtaaaacactaaaaatattctataaattagtgaaaatttgtaaaacgataaatacaattggataaattcaacaaattaatatttatcacatttgacattgtttaagtaatcataaaagctcaagtttggattgtttatattaatattaagaattcaaaattctgtcatttcaatttgttgctaaaaaaaaaatgaaattcattttttttttcttgtaatcactttaagctaaatttaattaatcatactctttttctttttataatcatgatttttgctgtaaaacatttttcttcaactttcaagtgattgttaaattggtcactttagtttgatgttaaaaacaactcagttaacatatttttcatataatcactttattctaaattcaattaattataattattattttaattttgtttgaaccttttaagtaatgatctgtgttacttttctaactttaatttatgctaaaaacaatggaattacattcatgctctaggaaactaaattgatttttatataatttaaatatcaagatgtaaggagactaaaagatggtagcctagaagctaaatgtttataatcaaaccaagtatgacttgactacctattctgtattaaaacttatccatatctatgatagtatgatccatgttatattaaatattatccatgcccatcacccattttctattaaaatattactcattatccatacccataaccatatgcattactaattttgtattaaaatatctttcatatccattattcatacccattgcctataaacaaattattatcattttcttcgattatattcatcacaatgcagttgtagacattattttattgattgttgaatggtgtctcaattctttcattgtatttttagtttttgtcataatgtggtgctgtcattgtgttgcaattcaccatatcaatgagactcaactttgatttggttgtcttggcttattcatgggagaatttggaatgtgttttgaacacatattggtcactgctgttctggatacaactaggtcatgtcgttatggaaatgaccaatacttaaaatcatgatccctgcctcgatgacaagcccttcctagtcagtcttggagtacaggcccttcccagtcaatctgggacttaatcttcgaatgatccatagtctttgattttccaaattgcatgcttaaaaattgaacttcttctcgtctttgattgttattgggcatggggaatgtgatccgatgtggtcatcattggtacagccacaagaaaattattaattgatgaaaatttggatgaaatattaaacttaaatcatgtttaatcaataattttcttatgggtggaccaatgtttaatcaataattttcatcatagttggatgaaaattaacccaagcaccaaaatccaacccattgttgactcttttttattcatctcattcttgtacttctgaaaaatatcaaaagaaaattttactctaggaaatctgatgggttggggagtctcacctgattcataatcaagttgacctgattcacttaccttgtagctaaactaacattgatatttaaaaagggattatgaatttaaaagaactagtatggatgtttcaatgaagattttttaggtggaacggatgatttttgagaagttgaggtgttgtcttctctttagatttcgaaagagaagagagattgattggctattaaaggagttgaaaaaggcattagagttggagaggtcattggttttcatatagaagtttggaggaaaatcaagaacacatattttggtggtataatttagtagtagaggaaggttgatcaagttgttggaatttgcttcaaatcgaagaaccatagtaatggtgattctgaaaagctagaatcatgagaagtgaggtggttgagaggaagacggtaaaggtcctgattgagaggaagaccttcttgattaggctggaaggagatcaaggaggtgaatggtgttcgatgacagagataagtagaggctctgtttttgcattaggttttgaaaaggaagcagttgggtggttggttgaatacttgaagaaaggcatagcattgaagagtcatatggggttcaacaaaaaattcaggggaaaatgcagggctcatctgttggaagttggcttcaacaatcatggaaggttcataaggatctcggagtttgctaccaacagaaaaccttccgttctgatcattcctgagggcgacaagggcagaggttgggagagtctcaaaaatgcgttagctacaatgctggtggtccccaatccgtatgcagaagaaaaaggaaggaatttaagaggggaaagctggcctcactacaaagtaggctcgatgcacagatcctacgcgaacacagttagtgacgaaggaccaagaggaggtggtctagttccagtggggaggtgggcgcgtgctgtgatatgtgaaagcaagtttgacagggagaattgggctgaggttggaagattggtggcgagaagcttagggaagaatggagttgtaacgattgtacccttttcagctggaaaaggtgtatttttcgttgaaacaaccaaggaagccttattcctccatgatttgaggaagttaagggttggggaaaggaacattattcagctgcgaagatggtcgccgaaggaaaatgcggaattagaccggaaatttagagaaggatggatcgaattaagggggttgccatttcacctatggtcggaggttcacctgaagaagattgtggatcaatgggggtctgtaaaagaaattgattggcggacgctgaagttatttgatctcagcagtgcgagattaaagattgtaatgagggatagggcaatccttccagccatgttagaggtgacggatggggattgggcgttcacagtcgtcgtcgtcgtggtcggagatgaagaaagacggagaggtagcgagaagggtgagtcgactcgggtggctatcgcttctcacatggagacaggtggaggaaggcgaggggagtgcggcagatcaacggaggagggaaggtaccgtgtcggggaggataacagacataggaaggagggaaataggggtaagggctgccagctcccgtcacagtctcgtttgaaatcaacagatgggatggacgggattggagaaggaggagtttgggccggagaagatgaggctattgctgatgtgggctgtcgggcccgagagaggaaggcccagttgctggcaaagactgatccaagtggagctgtaatgggctgcaagattaaaggcctgctgggcttgggcctaagcccagatggggttaccccagttgtgatagtggcgtcgtcacgcgaggaagaagaagacgcttcttctgcaaacgaaaaggtgaaatcagctcctggactcctcgagtttcagtcgagcaggttagcggagaagaaggtgttgcacggttcaaggaagcggtggtcaactttctttcccccaagctcagagcaccgacaaggtatccggagcaatagcgagcccatttcgcgcggaaaaatcaaggtggacagcgaagaggacccaaagacagatgatttaggcgccaaatctcaggcaaacagaggattaaatgcaagccctctcttttctccgtgtttatcaaggcctcgcaaggaaaatttaggggaaagggactcgtcgccgagaaaggaagcagatctgaaaattttttcatccaacgaagatatggaaggttttttgggccgagtggggtctgattctcgtggctcagcagccatggttaagccttcttcgccagaaaccagaggtaaagggcctagcttgatggggaactgtgttccgagggttgcggaaaatctggaggtaacgccttcactttttaattccatccatccatttataccctcttctaattccctcttgaatcctcccgtacacattcagtgtccctctacccccatgtcctccgactcatcttctcaatctctggcacccatggaaaaccgagtaatctctaaatttttttccaaaaaaggcaacgatgaaggtcaatttccggttgatattcctagtttagaaatggaaacggaggtgatccagcctgcttgtccttaccagatgtctgagagtgtcaattctctctcagctaatttaagatcaccttgcaaggagtccagtaaggctacagttcacttgggaggtattgcgggctctccttcgggcgagttccaaatagaaggactgtcccctacgaaaatggcaaaagtacgcgaggttttaaaaaatctggatatcaaggtatattccaggaggaagagcagatgctccacaggattgtgagactatctggttttggttcggagattagggtcacaatagtttcacatgaagataatcagttggaataccaggggtttgggctcaaagaaaaagagaagggtggttaaggattttctgagatcagaaaagccggatgtagtgatgtttcaggaaacaaaaaaggaagagtgtgatagaagatttgtgggtagtgtttggacagccagaaataaggattgggcagcccttccggcatgtggggcttcgggtggaattttgatcatatgggatgctaaaaaattgagcagggaggaggtagtgttaggttctttttcggtctcaatcaagtttgcattgaacggttgcgaatctctgtggctatctgcagtttatggcccaaacatctcagctctcaggaaggatttttgggtggagcttccagacattgctgggctggcttctccgcgttggtgtgtgggaggtgactttaatgtcataaggagaagttcagaaaaattgggcggttctagattaaccccaaacatgaaggattttgatgttttcataagtgattgcgaattgatagatttacctttaaggagtgcatcatttacttggtcaaacatgcaagtgaatccagtttgcaagcgattagatcgtttcctgtactcaaatgagtgggaacaagcatttcctcaaagtattcaaggagtactaccaagatggacatcggatcattggccgattgtcttggaaactaatccgttcaagtggggtccaacgccgttcaggtttgaaaatatgtggttgcaacatcctagttttaaggagaattttggaagatggtggagggagtttcaaggaaatgggtgggaagggcacaagttcatgaggaaattacagttcgttaaaaccaaattgaaagtgtggaataaggcttcttttggagagctaagtaaaaggaaagaagatatattatctgatttagttaactttgattcattggagcaagaagggggcctatcccatgaacttttagcccaaagagctttaaaaaaaggggagttagaggagttgattttgagggaagaaatacactggagacaaaaagctagggtgaaatgggtaaaagaaggggattgcaattcaagattttttcataaggtggccaatggcaggagaaataggaaattcattaaggagttggagaatgaaaatggcctaatgatgaataattcagagagcataaaagaggagattttaaggtatttcgaaaagctctacacgagtccttctggagaatcttgaagagtggaaggcttagattggtcccctatatctggtgagagcgcgtttaggttggaatccccctttactgaagaagagatttttaaggctatatttcagatggacagagataaggctccggggccggatggctttaccattgcagtgtttcaagattgttgggaagtgataaaggaggatctagtgaaagtgtttacagaatttcataggagcggaattattaatcaaagcaccaatgcttcctttatagttctgttacataaaaaaagcatgtcaaggagaatctcagactttagacctattagcttgatcactagtctttacaagataatagccaaagtgttagcagggcgtataagaggggtacttcatgagaccatccactctactcaaggagccttcgtacaagggagacaaattttggatgcagttctcatagccaatgagatagtggatgagaaaagaagatcagggaaggaaggagttgtattcaaaattgactttgaaaaggcctatgatcatgtgagttgggattttttggatcatgtgttggagatgaaagggtttggtattagatggaggaaatggatgagaggttgcttgtcctcggtttcttttgcagtcctggtgaacggtaatgcgaaagggtgggttaaggcatctagaggtttaagacaaggagaccctttatcaccgttcttgttcactatagtggcagatgtgttgagtaggatgttattgaaagctgaggagagaaacgtcttggagggtttcaaggtgggtaggaataaaacaagggtttcccacttacaatttgcagataataccattttcttttccagctctcgggaggaggatatgatgacccttaagaatgtcctgctagtgtttgggcatatttccggtttgaaagttaatcttgacaaaagcaatatctatggtattaatcttgagcagaatcacctttctaggttggccgagatgcttgactgcaaggcttctgggtggcctatactttacctgggtcttcctctgggagggaatcctaagacgagtggcctttgggatcctgtgattgagaggatatcaaggagattagatgggtggcagaaggcatatttatcttttggaggcagaattactctcattcaatcttgtctcacccatatgccttgttattttctctccttgtttaagattcccgcctctgtggcagcaaaaattgagagaatgcaaagagattttttatggtcaggcgtaggggaaggcaaaagagaccatttggttaattgggacgtggtgtgtaagccgaaatcgagagggggattgggttttggaaagatatctataaggaatgtcgctcttttagggaagtggttgtggagatatcctagagagggttctgctctatggcatcaggtgattttaagcatttatggatcacactccaatggttgggatgtcaacaacatagttagatggtctcatcgttgtccttggaaggccattgcactagtctaccaagagttttccaagtttactcggtttgtggtaggtaatggggatagaattcggttctgggatgacttgtggtggggggaacaacctttgggtgtccaatatccaagattacttagagtagtcatggataaaaatgctcctatttcatcaattcttggttatacccgccctttctcttggaatttcacttttcgccgaaatctttctgattctgagatagaagatctagagggcctcatgcagtcttttgatcgtctacacatttcatcttcggttccagataagagatcttggtccttatttccttcaggtcttttcacagtcaaatctttctttctggccttgtcccaatattctgagtcgcctacaattttccctaccaagtttgtttggaatgcccaagtcccttttaaagtcaagtcctttgtctggttggtggctcacaagaaggttaatactaatgacttgctacaattgagaagaccctacaaagcacttagccctgacatatgtaagttgtgcatgaagcatggagaaacagtagatcacctcttccttcattgctctttgacgatagggttgtggcacagattatttcaatcaacaaagatggattgggtttccccaaggagcatctctgacatgttatctagtaattttaatggttttggattttccaagagagggattgttttatggcaaaacgcgtgcatcgctttaatgtgggtggtgtggcgggaaagaaatgcaaggattttcgaggacaaagcaaggaattctgagtatctttgggattctatttgttttcttacctctttttgggctttttgttctaaggtttttaaggggattcctcttaacatgctacaacttgattggttagcggcgtgtaactagagtgtcttttctctttatgtactttcttatatttgatttcttgtagtcttgtttttctttgctgggaggattcctcatccttcttttgtaccttctttttatcaatatattcctttgtcgtttcctatcaaataaaaaaatagtaatggtggttcttgagggtgctaaaggaagaggatgagaaatcttaaggatggagatctcttcagttgaagaaatcccttccagtgattccttggttaggtcgacagaggcagtgatatttgagaagttagtgggttgtggcctatgcagagtgaagcgttcctatgcaagtgttatcaaagaggatgggctaagaaaggagctaatcctaaagggttagtgggctagggtagtgatttgtgaaagtgaggggcctctgtagataatcttcaaaatatgtaagaggaaataatatgatttcttagaaatttgtattctaaaggttgggagactcgtgcaggatagaagggtttgattagtttcccattttggaagagagtggtaccaatgctacctttatagctctaatgttgaggaatcagacaatcaaattttcaaatttgagaccaataagcttggttacaagtttgtacaagattatagccaaagtcttattaggttgtatctgaggagtccttcatggaactattcatttatctcaaggagcctttgttgatgagagacaaatttggatacaggaatgataactaatgaaatgatggatgagaagtgacgattaggagaggagggagtagtgtttatattttgaaaagacctatgatcatgtggagtgagacttttaggattaagcactagaaaggaagggttttagcaccagatggaggttgtggatgaggaggtattttttttcaaaaaatttcatggtcttagtgaatggtagtgccataggatggattaaagaaactagaggtattaggcaaggagattatttttatactttcctcttcaccatagtagccgatgtctcaagtaggatgatgtttcaggatagaggagagtagtctcttgtcttagtagggaggagtagaacttgtgtgaccctcttgtagtttgtgcttgataccatctttttctcaagatctagcatggaggacttgcaaaaccttaacctaatcttattggtacttgggcatatttcacgatttaagatcaatctagacaagagcactttgtttggtatcaacatgagtcaagattagattgctagattggcttcaattcttgaatgtgaagtttccgagtgacccttaaaatatttgggtctccctttagggggaaccaaaaggctaatgtttttggggatccaatgctagatgaaatttcatggagattggatggatggaagaaaacatatttgtctttaggtggacggataaccctaattcagtcttgtttgtctcatattcttggttacttcctttgtttgtatgggatctcattagtagtggtgataaagattgagaaaatgaatagggtttctttgttaagaggcttaggaggtaaagagagacctttttcattagttgagaataggtattaagcccaagttggaagcgggtttgggaatagggaagattcctttaataaatagagctctcctagaaaaatggcattagagttatcctaaggagagtgatgctctttggcatgacgtaatattgcgtatctatgagactcatcccaactgttgggatgccaacattatagtcaaatggtcacatcgatgcacttacaaggccatggcacaagttgtctaggatttctaatgtcattcctgttttgtgatgggggatgaggcaatgatttgcttttgagaagacttgtagtgggagaattaacctatttgctctcaatttccattgtgacaattataatttccccagtggcatctattcttggctcttttccttttaaatggaacttcactttcgtcatagcctcatcgatgttgagatagaggacttggaaagactcatgtcctctctctctctctctcgtgtacttttgatatcatttgttcctaatatgaaagcttcgtttttatattctttaggcatatgcactgtaaaaattagtgaacaagtgcgaaatactccctaggaaaagggagataagctgcacagctgaaagatagaaaggaaaatgtatgatgcctacaagcgatctatgaaactcaggaagataaaaaatctcctacatgagaagttacctgcttggctactctcttagccagaagattcacttcatggttcattcagttgagaatccaagagagagagcatctcaggtctcgagcaatataaaaaatttattgaagtcatggatcatacttctagagacttgtttccttattagttacccatgaaataagaatagcagcatcttcactggccaaagattggaaagactcaagccttggcttgtagtagatgttctaaaagtgctagtatctctacctcaatggccaaatgataataattggagattatcattagtatccatagctgagaaacttttctctattgtttaataacatgatcacttttggattaaaacattcccttataaacatcatatacgaggacttatttactgtctcttatcacattatcaatggtcctttggtacaatgatataagtagatttgccgttataaagcgtatgatggctaaggtaactgatcaaatatctggccaatgccaacaggaaacaatgctgaatgccatgaagctcttaatacaggttataaagctcactgtgaattgggtgtgactcagattttcttgagctccgtcaacattatgctttcaacaacagttcttctaattggtggttttgatactaaaatgaagacaaggcatacactcatataaactaagaacaagaacaaaagacattccaaagataagtgttgacatagtaaagtgagctgtgctactctggtgtcatgaactgttatgttttgtgtttcatttgtttacttttaagtatgcctgcagtcaaatttagatgaagatggatatgggtgaggaaggagaagttgtgagtaagcagagttgtgctggttagaaatagagatggccctgttttgtgctataatgccaattgtttcttatgatccccatctagaggtcacagtaagattatgatagcgtgtttgactgatgttttttcttggttttctgtatacatctcatatgcttgcattatattcatgtacattgtgccttttttgggtggcatggtgtgtttgtgggcaagaagcgagtaaaggtttggagagcagcccctttgtgccttttttggacggtttggaaggaaagaaatagggttgttttttgaaaatgaggatttttcgatccaaaggttgaaatattgttttgtttgtaatttgtggtcttggtctaagttgtgtatagctgaagggcctatttctttgattaacttttttgagcggtttgggctagagatgagggtaggtgagttttttgtatccctctttttttttgttttcgcctataggcacctgttgtatacttcctgtatgctttgggtttgccggtggcctcccggtttttattaatatactttttctgtgcctttgcctatcaaaaaaaaatcatgaacactgttctttgttcataaaatgggtaaacagttcttgtatcacaaataaacaaggtaaacaatacttgtacaactgcatttgaggcttagtatgtctgttaataggactgacactttttggtgcaacttggtgaaatggtaattatttgtgatatgacaccctttatatctctctactagtataatatttccattttaattatttcacctttttcaactaaggatgtaccaaaatgaatttgttaagacttgctttgatgtttccttatatctctaacttattcacagtattctcg

SEQ ID NO: 11643 - DNA, 5947 bp, Vitis vinifera
  Intron number 4 from transcript GSVIVT01011100001 (locus G SVIVG01011100001) derived from phytozome v7.0 (chr-ID chr7 ; pos 1592438 to 1598384)
ctagacaatgtctataaacctaatctcattctttcgtttctggggcagatttccaagcccaagatcaaccttaatggggcactattctatacaggttttggaggagtgattagccttttatttccccattgcctagtgggtataatattctggcatagactattttagcgattgttaaggttcttcctaggggtgtagatgatttgatgattactaccttttttattttggtggtgatgatgggagtggggtcccttcacggcttacaactcaagcaattatttagttaatattaatagagagcaatgtcaaaccttggggatttgtgacctttgagaataaacatagatatttggaatcattgtgggattcaatattttttctctcatttctttaggttttatgttttgatttgagatttgcatgtttctctagggaattattccaagtggaaactctattcaacgtgtatctcaagcttaattttgatgatttttgtaagtaatctagggcattgtgataaaaggtgtgtttagagatcacaagaacttgatacctatcaaaaaaagagaccacaagaacttgatggttgagggcttacttgcacatgttagaaaggggttatcattgagattgagacccttgctttattggaaggcttgatccttacagccacattgacttacataatgttctagcaatgttacctagttagggtctcttatgaaaattaaggtccatgaaaattaggctcttttggtgtttaaagttgactttaagaaagcttatgagcatgttgaaaaggatttatagatcattctttggagggttaaggctttagctatggatgatgtaggtttatgagggtttgcctcctcacagctatcttcttggttttaattaatgtgaagggagggttagatcaagatttttataggttagagagagatcctttatctcagtttctctttaccattgacataatgactaaaaggctgaaggattaggtttggtggtgggcattaagatttagagagtgttggtcacaactcatgactatcatcttcaattcatagttgccattatttttttcttcatctaattccacatttaaagttgccaatatgagtcgatttttgagaacatttagcttggcctttgacctcaaaattaatatgaggacaagtacttgatttgatcccaaccttatttaagagcaagtaaagagtttatcctccacattatggtgctaccttaggggttggcttgttaatttcatgggcttaggaattagcacatcagagcacctagtttttgaaacccaactgttgaaagcatgcctaggcctagttggttttttttttggttggttggggtggggtgggggagtaaaaggtggaatttctttgatctagttatatcttactccttgtttcctactttctatctattttcaggatcctacttcgtgtgacagctagattgagagaatccaaaacaagctcctctgttaattttaactcttttcttataaccatagttttttttcccctctcaaactgtaaaaccttttaaatataatccatctttaataatttcaattcttggaatttgatttctaaggcaaccccgttgattgagaaatgaagacttaggctctctcttatattaagtctttatatgtagcctctcttgaagactttatatgtggaaaaaactgttgtcttgaataaactagattataatgaagactttatatgttgtcttgaataagctgattaagaaacaattcttggaatgaagacaacatatattcttagaaaaagtatatttctgggacgagtagtagaaattaagagagttaaatctggaagaagtggaggctagaaaggaggcaaaggaggattataagaaataggttctcatggaggaagtctcttggagacaaaagtcaagagaagtttggttgagggaaggagatagaaacacatgctacttccataggatggcaaatgcccacaaaaggagaaattgcttggctaagattaaaattaacgactcttgttttttagaggcaaatgagattaggtggggggttagggcctttcagaatctgttgacgaatctaggagattggcgcctccattgctttctagcagtttagtcgggagtttgtgaaggaagaaattatgggcttttttagagatttccatgagcgagggagatttgttagaagcctgaatgctatgtttttggttttaatcccaaaaaaaggtggtgcagatgaccttagagactttagacccattagcttggtgggtggtatttacaagctgttggctgaagtgttagctaacaggctgaaaaaggtgatcaatagggtggtgtctccagcccaaaacgcgtttgttgaaggaaggcaaatttttgatgttgcgttgatagctaatgagactattgattctatgttaaaaaggaatgagaggggggtgttatgtaaactggatttagaaaaggcttatgaccacctaaattggaattttttgctgactgtgatgcaaaaaatgggctttgggggagcagtgggcaggttgaataagttgatgtatctcctttgcattgttttcgatcttggttaatgacactcctttaggtttctttcaaagcactaggggtttgaggcagggggatcccttattgctttacctctttgtgattgggatggaggccctaagctgcctcattaatagagctgtgagtgggggtttcttatcaggctgcagggttaggggaaggggaggaaatggggttcaagttacccacttgttgttcactgatgatactatggtgttttgtgaagcttccttagagcagatgacctttttgagttggattttaatgtggtttgaaaccatttcagggccgaaaatcaacttggacaagagtgaaatccttctggtaggaagggttgagaatgtggaggatttggtccttgaacttggttgcaaggtggggccgcaaccttcctcttacttggggctccccttgggggctgctcataaatcagtggcggtttgggatggggtggaggagagattccgaaagaggcttgccatgtgaaaaagacaatttatttccaaaggagggaggatcaccctcatttggagcactttgtcaagtatgcccatatacctcatgtcccttgtgcatatgccacgagtggttagattgagattagagaaaattcaaagggacttcctttggggtgggggagggttggagaagaagcctcatcttgtaaagtgggaggttgtttgttctgatagaaggaagggcggtttgggtgttagaagcatatcgaatcttaatagagccctattgggtaaatggagttggcgtttcatggaagaacaggggacactatggaaacaagtgataagtaggaagtatggggtagaagaaggggggtggtgtactcgagaagtgagggaggggtatggtgtggggttttggaaggaaataaggaaggaatgacctttaatgaggagcaattttgttttctccatgggggatggaagaagagtgagattttggaaggataggtggtgtggtgatgacactttaagcatttccttcctttcgttgttcttgctggcggtttttaaagaggagtgggtggtaaaggtgtgggttgctttgggggaggagggggggctggaatccacgtttttctaggccgttaatgattgggagatggagatccagtgggtctttccagatactgtaaaggaggcggttatcagcttgaagggttcttttgtgggtaaaaagagggagaaaatttggaaatccataccgttatttattttctggacggtttggaaggagaggaatatattagcattcaaggggggagggggagttagctatacagaaagttaagaattcttttgtttctaatttgtgggggtgggcaaaattgtataatggtgcggagcctcgttcccttataggtttcctggagtggatagcctccagttaagggttggtgggtttttttgtttcttttggttgttgttgtgaggtcttcgttgcctcgtatacttcctgtatgctatgcggcgttttgccttttgctaatatatgtgttaacttatcgaaaaaaaaaataaaaatgattgggagatggagacggtggagagattccttgtcaccttacaagggaagaaggtggtcaccaacatggaggatagggttcagtgggaagaggccaaggatggtttgttttcagttaaatccttttatagcactttagagggcagccgtgtagtcccgtttccgtacagcattatttggagctcttgtgctcccccctaaggttggcttttttgcttgggaagcttcttggggtaaagttttaaccttggatcaactaaagaagaggagatggtcactcccgaatagatgcctcctttgttgtgctgctgatgagaccattgatcaccttctaattcattgcaccaagtctaaggttttgtgggacttgttgtttaccctttttagtgtgcagtgggttcttcctttgtcagttaaagaggtccttcttgggtggcatgactcgtttgttggcaagaagagaagaaaggtttggagagcagcccctttatgtctcttttggatggtttggaaggaaagaaatagaattacttttgataatgacgatttctcgattcaaagattgaaatattcttttgttagtaacttttggtcttgggctaagccgtgtatagatgaagggcaattctttaatcaatttttttgattggttgggctctagatgagagcgggttttttttttattttccctctcttttgtttgttgctttaaggcacatattgtataacttcctatatgctttgggttggccttttaggtgccctcttccttttaatatattatttttctgtgcttttgcctataaaaaaaaatgttgtctttatatgtccagcttaatagaaaagtggtttgcagattttttgcttcatccctcttttacataccttgaatctattaagtctttatatgttgtcttggaatggggaaaagtggtgatcttagatcaactttaaaggagcccgtgttaattggtaatagatgctttccttgtgaaaaaaaaaaaaaaaatcaatttatcacatcattcttcattataccaagacaagggtcatttggtagttgctttttgcattgtttggtgtttcttaggtgcaattcgtcattgttggagaggctcttttagggtgatagggattctttatggtaaaaaaaaaatgcaaggtttggaaagtagctcccttgtgtattttttggacaacatggaaagaaaatggaattgaaggtcgtttgataacaaagagcaactggatcaagatctgaaaaattctttcttagtaatcttttctcatgggtgaagttgtacatagaagtaggttatatgtctttaatggattttgtagattggttgggctctcactaagggagagagttgttcattgtgtttctttctctatctctctctttttttggttgtgccctttggcactcattgtatgtattctgtgtactttggtgtgctatttctttggcgcttatttataaaatcttgtgatttgctaaaaaaaatagattttgactctagtgggttcatttaagttatattttggtggatattctttgaatgatctagattagttggggattggaggtgtaattcaagaccatcatggtagagtgctgagagcttcttcaaaactggttgaagagggtgttgtcattaaggttgagattttagcctttttggagggtgtgctgcaagtcaagactcttttgtccctttaattatggatggaaggggattttattattgtgatatcttgggtgtttaaa

SEQ ID NO: 11644 - DNA, 11925 bp, Vitis vinifera
  Intron number 9 from transcript GSVIVT01011862001 (locus G SVIVG01011862001) derived from phytozome v7.0 (chr-ID chr1 ; pos 3498509 to 3510433)
actgtaagtgtacttcacagttctaatgacttcgtaacttttccaagttctaattatagaatgttagtatgaactggaattgttgctttgtcacaaaattccatatatgctctctcttgatatttcagcattctacatcagtattatattactatttttttttttgataagtaaagataatttcataaataaagagatgccaaaaaagtgactcaaggtatacaaacctatacacccaccactagaaaggctaaaaaaagaaagagacccaaaaccaactggcctaaaaaattatattactattttattactttaaccacactctggccaaatttgcagttgcagctagatgcttccttggtggtattcctatgaacattagattttgaatgcctataagtaaattttaactcaaataagccttaatctacttgagattggttacatgagtcctttcaataagaaaaatattttgttctcgactcttgtgttttgttagttaaaagaagagtatttccatttgctattgattaataatccagggtctttttctagggctggaactcacatttataatctgacaaatgaaaattaggattgttttttcttttttggttctttattaagttcatatttggttcgtagaatgcaagaatgagaatgagattgtaatgattcctattcctagcattcccatgtttagtatgtacaaacccacaaagcatgggttatggagtcctagcattctcatgatctgggaattggagtcataataatttataattacctatgcattttgaaactatcatccatacttttcattcctgcttttgtttatcatggttgcataattatctgaaaaattattttttggattaagattaatcttacttctttttcctttttttgaaggaaaacattagaacttaggctttctaaacatttttttttgtgacttgaacaaaacatagttaaatattttcattcattttgtgaaattaatgccttttttttttattaagaatatgaatattaaaatcctcatcccaaattaacaattctaacaagaaaaatatgaagataacaagaaacaaaaagaactactataacttttttttttttgagacctatatatttatttattgtgttttaagtgttgaagtccatagtgttactcttatctaatccaagatattatctcttcttaaatggctttgataccattctcacacagatattagatattcaacatagaaattcaagatatggatgtataaacaaaatatataaaaacaaagagaaaataaaagatagaagaaatatcttacattcaagctgaaaaaaaggttgatacaagctcacactaagaacattaagacactcaaacattccaaacactcagacacttatgctgaacttttgaagcactcaaatgaaaactaagaaatgtgatgttccttcaacaaccaacctccctttatatagagagaatacaataattatgggggtctaccaagatgataagataaaggaagaatcaacatgaattttgtcctattttatatgagctgtaatactttggtagagttgtccaacttcacgtgaataaagttgaactgcaccaaaggcaatccttatcttatttgtctaaggaagagggggtggggtggtcctgtgaaattagggatgggtatggagttgggctttggaaatctataaggaaggagtggaacattttcgtttgtagttcttcctttgtggtaggtaatgggaggagggtgaagttttgaaaggataaatggtgtggggatgagccattgtgtgtttcctttctttctttatatgccctaactgtttcaaaagagacatgggagagaggtcattggaatccttgtttctcaagacctttgaatgattgggaagtggttgaagttgaggatttattttcaaggttgcaaggaaaggtgtgcggaggaagacaggatggtgtggatgaacttgagcaacaataagttctctgttaagcatttatatgctacattggaactaggagttttgatttcattttcaaaaagtgtagtttggaatttgtgggtgccgtctaaagttaacttttttgcatgggaggctactatgggaaaggttttgactatagatcaacttcaaaaaagaggatggtctttggtcaatagatgttttctttgcaaagaagaggaagaatccatagatcacactctcctccattgtttgaaggttaggatcctttggtagttgttgtttgatctgttcggtatccattgggtacaaactactattgttaaggaggctctttttgggtgacaccattcttttatgggaaagaaatgtaacatgatttggagaacaactcctttatgtattttttggagggtttgaaaggaaaggaatcatgacccataatgaggagcattcaactcaatttttgaagacttcctttcttagaaatttgtttatttgggtaaagatgtacatagagacagattctctgtctgtatttgattttgtagagtggtaaggattttgttaagataggatgttgtttctagtgttcttttcttgtttttcatgcttctaggtgctatttgtatatgtcccatgtactttggtgagtccttttggcgctttatatattttatccactctttgcttataaaaaaagaccatgtgaattctaacaaagcaaattttgctttaaaggttctttcggataacaagaacttgagaaaaatctccaccatagatgtcatctaaatttactgtggatccagatgtggactgattgtcagatagggcaaataacatcttttctttatactcttgattacttaaacctttacctttttctttcattaaataaagaaggttcttgtccatttgcagatgagtcaattagcctcatcttaggttcaatgatggctgcattaaaaactgaagggcagtttggcataaatcattgtttgattttatgtagtgttttacttttgaagtttagatattgctgattccttttactatgacaaacttattttgctcattttctacatgaagactctcctctaaaaacaaacaaattgtttctatagcaggtatagaggatcatctccaatacacaagaaaattatttctttaagaaattctgcattaagaccctccactaaaatgaaaattatctttaatcaatacataaaatgtacaaaatgaaggagcattatggcttcttctggttcttagaaaagctatttcagactagcaataaagtttatccaaatgttcaaagagctactagcttaaacgttacagaaactgaaaataataggtttaaagtgatttcttcagtctgtttgcctcccactaccattgaaatcacaagttgttgtagagcagtgccccacaaattggtatccaatgaggtttgccaatgcagcaacggtagactcaataatcatgttattgagtaaaataattatacaaatctatatattggtattattagaatattttctgtgaagttgaagtgacgtaattgaagaaaaactagtcattcggtttcacatgctgcaaatacatgtttgggtggacgctgaaggaacaatgccggtaacttcccctggggttaagtgttggtttggtgttgagttgaagacgtttgagattagcatagaggagtacaaaggaaaagtgcgtgggaagatctgtgaaagaggtcccaagttctcttcatggattagattcggagggaaaggtttgtctctgctgctagaagaggttgggtcatgttgtgagctaaaagaaagatttcatttcagaaagttttggtcagaaggagatagaaactacagtctggaactctgtagtaatagagcagggagattcttgttttgtgttgtaagagatgcggagaacaaaagattctttttagctttccctgaaggaagagggcttgtcggaggctggaaaattctcgttagcaaattgagaagtttgggagtctctccccttcagtggaaaggagctttgttggaaaaccccaatccatctcaagcttcgcctagcagaagtgtggaaaaaaaaaaaccaattggacagagacacatcatttcttcgggattgctctgcgcttcgtgatgccgtctggctagaaattgagaaagaaatactcgatagaaatgaggagctactgggcaggtgtctggtgggcatttggcagggagactctggccacctccttgacctcgtttccttcggatcgtgggcgaaaaactcttggttcttggaagggaatctttggctgtctaacgtgagagaaaatcttttgcttttggagtttgaatttgcggatgaagcagagagggtgtctaaatcaggggcgagacgcttcagaggaagaagtttctgcctagaaaaatggaagccatagatttggatgtttgaagggagacggagggggagcgcgccttgtgttagtcaaaattttgggcctccctctgcatctttggggaagaagactcttcaagaggtttggagactcttgtgggagatttgtggttgtggatgaaaacacagccgagcgccgaaacctcaagtgggccagagtcctcatcgaaaccagagattggcagcacccaagttcgctgcaggtagttgctggcccctcttgtttcgctctgcaactctggtgggaaaaagagccttgcatctccactatgctcccctcccgcgggttcggtgcaaggaagcttagggaagacgaggtggccccttcacgctttgaggggagcatgggcactctaccttcttcttgagcctcttcgcagcctgaaaagctgcccccgccagtcttggggagtggtgcccctgcctcggacaagagcgttgcagttgcttccctttcctatgcttgcgaagtggagatgggctagcgtctagatgccaaggcctaatcgggctcgttttgtgtcaatacctttgggcctgggcctggggaaggcccacgtctttgtctttctggggaacccttttaagcccattgtccctgtcccttccaacgacttagggcaagaaagccctagttgcttgccgtgtctgaggaaaggaacccctgcatcgactcctgccaccgttgggacccctcagatggaagcatcaccgcctgtagctgagttcccccccgtcgaagcacacaatcctcaaggtaagctttctttaccttcgatctccttgagaggggagtcatcatcttcttctactccattatgggataggggtttgagagggaaatgggatccttctctggtcttgtggaatcgatgctaagggaggcggaagcatcgctaaatcctctgtccatgatgctcagagatgggtcgatagtgcttctgactgaaaccccaagtcctgatatggaaaaaaatgtggcgacgcagagagatctgtcggttgttccctcttgtgaagaaggatggtcggaagaggagctttccaaactatttcactttagtaaagtcttgggaatgcttgtcgaaggacatgaagtcgaaattctggccttgcttaagaaattgaagctgagaactggaagtagcaccctttgcaagagacggaagaagaaaaaatcttgcaccacccgtttcgaaagagagttaaaaagattggaatgctcagttagttgtggggggacatcagggataactaaaaaatctggtcagagctcatgagaattgattccagttgattaatgagaattaaaattctctgttggaatgtttgaggacttaatgattttgagaaaagaaagttgatcaagggtgtggtgaggaattagaaatcagatttggtttgccttttggagacaaaggtgaaagaaatgtctctgcaaatggtaaaaaatgtgggagtaggaagatttcttaattgggctttagtggatgctaggggtgcggcaggagacctccttctcttttgggacaatagagtcttggagaatttggaggttgaaagtgggggtgggggggtggggtactccatctttgtccgttttagaaattgtgctgatgatttctcttggattttctatggagtgtacgggccagtgattggtagcgagaaggaagatttttgagaggagttaggagccatttgtggcctttgggaggacccttggtgcataggaggggactttaatgctataagattcccagaagaaagaaggaatgcccctagactcacagctgaaatgaggagattttcagagatgataggggagttggggttgagggattttcccctggctggaggtcctttcacttggatagggggtttgaattctcaagttgtttctagattggaccgcttcctgatttcggaccaatgggaggaccacttttctgccatcacacaatttgcccttcctcgtctggtttctaatcacagtcccatagtcctagaagttggagacttctcttcaggcaaaaccccctttcgttttgaaaatatgtggctgaaaattgatggtttcaaagacctagtaagaagctggtggaatggttattctgttgaaggctataacagccactgcattgctgagaaactcaaagtgctaaacaaggaggtggtaggcaacgtctcattcaatagagtagaggccttctcctgcctgcagcgttgggagaccaaggagaatgagaactctctttctcctggagaagcggaggctaaaaatctggctcttgaggactataagaaatgggctcttttggaataaacttcttggagacagaagtcaagagaaatctggttaagagaaggtgataaaaataccaagtatttccacaaaatggccaatgctagagcaaggaggaattttctgtctaaaattagagtgaatgaggtgtctgtctcttctattgatgaaattaaagtgaatgggagacagattctagacgttgttctaattgctagcgagacccttgattttagattgaaagacaacacgtcgggcctccttcttaagatggatattgagaaggctttcgaccatgtcaattgggacttttttgtggatgtgatgaccaagatgggatttgggcatagatggattaattggatgaaatggtgctgctctacggctaccttctcgattctcatcaatgggagccctgcgggcttctttcgtagctctaggggattgagacagggcgaccctctttcctcctatcttttcctttttgccatggaagctcttagccaactattgtcaagtgtaagaaatgagggttttatttccagtttcaaagtgggaggaagagaaagagaggggctgattgtgtcccatcttttgtttgccaatgacaccttgattttctgtgatgccgatgcagatcagttacattatcttagttggacattcatgtggtttgaggcgatttcaagattaaaagttaatttgagcaaaactgaggccatcccagtgggggaagacattcttatggagactcttgcctcggtcttgggatgtaagattgggagtttacctacctcctacctgggtttcccccttggagccccttacaaatccactagggtgtgggatgtagtggaagaaagattcaggaaaaggttgtctctttggaaaatgcaatacctctccaaaggtggccgacttaccttgttaaaaagcaccctctctagcctcctaacctactttctttctctcttttttattcccaagagagtgtgtacaaggcttgaaaagatccaaagggatttcttatggggcggaggcgccttagagaatagacctcacttggtgagttggaaggttatttgtgccgctaaaaaggatggaggcttgggcattcgcagtttagctatttttaacaaggcccttcttgggaagtggttgtggagatttgctaatgagaacgagtccctatggaagcaaattatctctagaaagtacgaccttcaagatgggggatggtgctccaaaggtgtaagagactgttatggggtgggggtttggaagaccataaaaaatggttgggagaacttttgaactcactcccgcttcatcgtagggaaggacactagagtgaagttttggaaggacttgtggtatgaaaatcaatctctggaagatgctttccccattttgtttaatttatccatcaacaaagaaggctgggttgctgaggcttgggaggaagatggagttgggagtagctgggggcttcgttttaatagacacctaaatgattgggaggtgggggaagtactaaagtgaagttttggaaggacttgtggtatgaaaatcaatctctggaagatgctttccctattttgtttaatctatccatcaacaaagaaggctgggttactgaggcttgggaggaagatggagttgggagtagctgggggcttcgttttaatagacacctaaatgattgggaggtgggggaagtaaaaaacttgttaaacaaacttcatcctttgactattagaagaggtgtggatgatttgttccaatggaaagagaacaagaatggaatcttttcagttaagtctttttgtagctgactctcaaggggcattagacttcccttcccagctagaactatttggacaccttgggttctaattagggctagcttctttggttgggaggcggcttggagtaggctgctcaccatcgaccaaatgaagagatttggatggagcatccccaacaggtgctatttgtgtaaaaatgaggaggaaaccatagatcatcttcttttgttttgtgagaaggccaaaatgttatggcttatgatcttcttcctttttggggtgcaatgggtgatgcactactctgtgagaaggaacctcctaggatggcatggttcctttgtgggcaagaaaagggagaaagcttggagagctgccctcctttacttgatgtggaccatttggaaagaaaggaataggaagaccttcgatgaggttgagaggaatgaccaagaaattaaatccatttttttgtacacttttgtggattgggttagggtgtatatagaggaacacactttctctttgatagattttgtagattggttagctatcaagtaagggtcagacttgtttgtccttatgccttttgcacctttgtatcttggtatactctgtgtataccctttctttagcctctttggcttttaataaatttcttttacctatcacacaaaaaaaaaaaaaaaaaaaaaattctatccttaggcagacaattatcaaggattgaaagtctcttaaaggctagtaagccgctgatagcctaagaatccaacacaatatgtccatgtccgaagtaggttcttttttttttctagacaaaagcttgtattaagaagtgccaaaaaaagggggcgcacccaacgtatacaggaagtatacacaaaaaaacaacccaggcaccaaaaaggaaagaagaaacctagaaaagagcaaggctagccacaataaagagactccagaaaattcagatgagaggggatctccaaatctagcaactgtttggaccactccacaagggatctgaaaaagagaatccttagcctttggtccgacaattcttcgtcttcaaagatcctttggttgcactctccccaaatacaccaaaataagcaaatcggagctagccgccaaactgctctttttcttcacacatagaagtgaaacttgcttttctaaaacctttgcctgaaatcaaaagaagaaagtataagctgaaaaaggagaatggcgagcttctggtatagttaataaaaagaatagaaaaataagacattgctgataaaggaaaaacaacacaggtcaatgtcctccaagaagctgaggcaatcaatttagatgaacagctctaacaaatggttggtgaatcttatcttcagccatcgtctatcagtaagattcagtaggaaagcaaaaaagggcttatcgtccttgtctctctcttgtaaatctgcggttaaaaagagatcccctataaatggtctaatagagtatcaaattatcatagtcttaaaacaaacactcatttatgctcaggcatcaaagcttaatgggaattcaaatagaagcacggtgggaacaatagtattagggtttgtaggtaatcttcaaggatggtggaatcatatcctcacggagcaatattgaatggaaatttttttttatagtaaaaaccacattcatatctgtcatagatatgactgggcaaatagagcaaaagctttggattgagaaagatgcagtaaataagctgatttattatattataaaacattttattggagatgctaatgtgcatctaggtataagctatgatcagctaaataatttaaaatgtccaaccatgtctcattttaaatggtacaaagatggtttcttcaccaaggttttcgcaagagccaactgtaaccctgattattggaaatagagattcattgacgggattcccatgttagttgtagaaagagtcaaaattaagctctgagaaaggcatggaggaagaattccatgtgaaagtatacatattcgaagaatttttccttgaatatggaggaacgattccatagcctcagaaaatattaaagttagtcttgatatttgcaattggaaaaaaatctaaaagcaattaagaaaagaaaagccagacaagtctaaagctatgggagacttttgccaacaatatggctatagtgccctaacagttgaaaatcaatccaaaagtaataggtctactccttataaaaaggaattttcattattttttttttctcaaaaacccaataagcctctacaaaaggttaaaagaatttagagacccaaacaagtgctaatttgttacaaatgtggcaaaagggggcataatagtaataaatgcacttcaaaagccaagattaatgaaatcaatgatgaagggcttaagcaggaattaatggccaccttcatcaatgaaactaaaagtgaatgagaagacaaatattttgaagaaattacttcagactcagaaaatccttaagatgaaatagcacatcaatcaataaataagtgacattaacaggaacaaataaaactaaattagtgaggctaaataatagtcaacatggaaatgctgatgaaggtgcgcatgattggttagaactgtcttctaaattttggttatgaatgaaaaaaaacccaaattagtgaggctaaataataaacaaggaggagccactatgaggagcagattttgtcattgggatgcacttttctaccctgcacaatattatttctttccacacaactagatgactccaaaaactgatgctgacattgtaaaaatatggaaagtaatgatcaaatagatgggtaaagacatggaaataaaatgatcaaatagattggttcagtgctactttgtggtgctcaccgcctcttcctccctttcaagaatgttgagaggagatcagggtaaaaagttccaaaatcactctttacataagtaggtagtcagatggctgggtggagggaagtggtgtgttttctggacttttaaatcatcaagtggaataattctagcaattgtcatatctaacatagtttaggaaataatttcttaacatttgtcttagaaatttgtataatccctgtttataaaaatggcagaaggcaaaattactttgcataacaataaagcatataattaatcatatggtgaagaatacaatggagtattttcttctgtgatatcatttgagcctatgcatgcttttagacgtagtttatattttcaacaatctcagattttgcaaaaattcaattgttaatgcaggaatacttccaaacaacttacaagtttttggagct

SEQ ID NO: 11645 - DNA, 6316 bp, Vitis vinifera
  Intron number 2 from transcript GSVIVT01036707001 (locus G SVIVG01036707001) derived from phytozome v7.0 (chr-ID chr1 9; pos 23514117 to 23520432 reverse strand)
ggaaattattttctgggttgatagatatcaagtgggtcctcccagaaactgtaaaggagactcttatctcctggaggggctcatttgtagggaagaaaaggaaaaagatttggaaatccattccgttgtgtattttttggacggtttggaaggagaggaataggttagcgtttagggggggtgtggtgaatattcagagattaaagagttcttttgtttgtaatttatggaattgggccaaagtgcatttaggtgaggagtctttctcccttataggttttttggagtggatagcttccacttgaggggaggtagttctttatggtcctttttctctttttgaggctatagccgtcttgtatactccctgtatgctttgtggcgattagccttttctaatgcaattcttgtttacttataaaaaataatcaaatttaacaatcatttatttgtcctaaacacataaatcaccaaatatcatccaaaacttcaaattaatcaacaaaaaacataaaaataaagaactccaagcataaaaacaaatccaaatccatattgctaatagcctaatacatatccaaatccaaagtttccaaaccaaaagtccaaaacgtgaaatttgtccacaattcaaaaacatcattaaaaaccacttaaatatcaaatttgtccacaacaagcaatcatcactcctctaaatcaacaaaatcatcatcatcatcatttccatcaccacatttgtagccttccccatcttcttcatctgctaaatcaaccatgtctccatcgtcatcttcatctattagtgaatgagaaggcaaagttctaaaacttgaagctatcccctttgttggtggtattatgcttgagtttgctctagctctagctctagtatcaaacttggcctcctcagctccaatagctctagcaacatcaccccatgtcaaattatcatcatcaaatacaaaatcatcttgtgcatctccatgagaatcctcatcttccattcttcctatcaaccattcattgctatcatctatatctttcaaagaaattcggtcaatggtgttacgttcattgtatcttttcttcaaggctcgattatacttaatgtatatcaaatcattcaagcgttgatgatttaacctatttctcctcttgctatgaatctgcaaaaattcataagctcataaatatattttaaagttttaacttttaagttacattcaaaactctattagactattacttgtaattattttggtcacttacattttcaaagatgctccaattccgttcacaacctgatgcactgcatgttaagttgaggacttttattgcaaacctttgcaaatttggagctgaagctccatatgcagcccaccattcagctgtagtatagatattaacaatttagtgaaacaattcacccattttagcaaaaatacaatctaatcatttaaataaacaaaactaaataattaacctggtgctctagtcttccttgtcttaacagctaactcattctcgaatagtccttgggcatttgtgtacaaactcacttcggccacaactttttcttgtttagcagggtctcttgttagccttaagatgcatttatacaaatcactcatagtctctgcatcatgctctatttctggtttattatggaagaattccgggttcaaaaagtaccctgctacatgcaaaggccgatgaagctgaatctcccacctcttatcaatgatgttgaagatttctttgtacttctcttcatttccattaaaacttctcacaattatatccttagttctattcatggcctcatagctgtatcccataggagctttttttccaccatcatccaaacgaagcacacgaactaggggactcgaaacctttaagtaaaacacaatagtgttccaaaatgaaggcattagaactatgttgactatagttttccccttctgctcttttgcccatttactatctgatcaatctaagtttgtaaacatcttcctcaagttgtttttttgttcatgcaatcacgataatgtgatgaaagcagttgcaaaccaagtcttagcaggcttaagcaattccctttgtctagtaaaccgccttatcatgttgagtagccctgagcgattataaatatacctatttagtgatataaccctctccaatgtcctcttgatgtttggtagctttccaatatcttccgacatcaagtcaaggcaatgtgcaacacatagtgtccaatacaaatgtggacgctttaattctaacaaccttcctttgtgacattgtagatattaaatttacataagttctcaagataaataattcaaattttaaaagtaaataaaaattcaacaaatagtatttattacctgtcatcacataacttgagtgattatctgttataacttgaataacattctcctcaccaacaaacatcttttctcctgttttaatcattgaagaagcatcaatggattgcatgaacatggttccctttgaacaattaaccaaaaagttcaccaaagttctctctttcctatcggtccatccatccaacataattgaacatccattttttttcccattccgccatatgatctttcatcaaatcttttgtgagagccaattctttcttaaggttactaactcttacatcatgaaaagttggtcctttcatacccacaccatagtggccaatagcctcaatcattggttggaaactcggatatgtgactacattaaatgaaatagcagcctcatacatccaccttgtgataagcatacaaacgctttctcttgcttcctttttgtaggcgtcattgatggtagtttgattcatcttcccacttcttcgactttgaacaaccatctctgcattaggagtgaaaaaatgatctataggacctttttgtcttggttttttttgaagaaaacatcctaccaccacttcctcctcggttactacctccactagaaatgttggtgacattcattctactattaatctcctcaccaaaatcttcatcttctaaaccaaacaaatcttcattgacatcttcgctccccatattcatttgctctttttgatttttcttggaactcatatactcttccattttttctctaacatattccggacattttctacactttttagcatttctatatccatcaacaagatgttgtttgtgtctatatatgcctcatttggttactttatcacaaaaaatgcatatgatggtgttcaaatctttttcattaatcaaacgagcatatttccatctgagatctcttcttccacttgcactagagtccacttgagtttcactctcattattcatcttgcaaacaaattatctatactacaataaaataattattattaaattaagaaaaaaaaaattgaaaaaaaaatgcatatcacatttacaaaaaatatgcatgagtgttttttgtttatttatttttatttagtaaaattttcatgtcaaaatacaatatttttatttaaaaaaaaaattgccaatgagagttatgagataagaatggaaaaaaatgcagaaaaatgaagaaaagagaaaaataccaaggtcttggaaggtacgtgactattttccctttatgtttcctcttcttcttcttcttcttcacttctccactgcacggctaaggctagggcacgattgggagtagtgtcgggttgaaaaataccagaaaagggggctggaaaggaaaacagggccaaaacggtgtcgttttggcctgtttttttaaaattaaaaaggccaaaacgacgttgttttggacccacaaagtaaaaaaaaaaaattagggcttagccttagccctctacaacccgacggactgaagaagacaaagaagaagaagaaggggtcagagggcgtacctggcttgaagcgagtcaagcgaccgcgtcgcgccttgcgcgcctaagcggtgccttcgtgaagcgaggcgccagagggtggcgttgtgccgccccgagcctaggcgcgcctttcacaactatggataaggtgcttttaataagggtaagcctcccaccttaagatagatattgtcttatccacatagccaacctcttgtagactctttcctccactgaatggcaacaggacattgatttataggaagctcataaggggaggcctaaatacatagtaggaagcttccctttcctacacaacaactcaaccaccaaatccttttgattaggaatattgcccattgaaattaactcaattttttttttttttttttacctatcaaataaaaaaagagcgtcatctagaaataataggtgggacacctccttgcctttgcctcccctacgacttaacttaaaccccataatgtaaccttcctccttagctctcttcagtaaacaattgagcccctccatggtaaacaaagagataaggggtaagagggttcccttgcctcatacctttagagctttgaaataatctattgggggttccattcaccaacactaaaatctcgtagtagaaatacactgtttgatccaaccaatccatttttgaccaaaccccattttgatgaggatttctagcaaataggcccaattcacatggtcatctactttttctatatccatcttgcatattatgcctttcaactgattcttaagtcttgagtctattgtttcattggctattatcatcacatccaaaatttgtcttccttcaacaaaagcattttgagagatttgcaccttaaaatcctttcttttcctcaaaatcaaaccatctatgtgaaattgaaaagggtaattataattcaaaatctctcaatcagtctcttttgtaatgtttcctttcattccaagtaagggaaaggagttgttttcttattctttttaaatccaaatactttccttcctctccaatttggccttaccaaatgggtttgtaaggagatcaacacttaagggagtgaagtgagggtaaactgctaatttgactggccatagacttatggtaatgtaagtgcaagactatttgaatacttttccaaacagaaatgcaaataaatgattaggtgttaaaattttatgcttaaagtttgtttcttaattctggattttcttgagataatggcccatattttttccataaaagtttgccctcaactccatttgaataccccggccatcttcaagtttgaccaaatagcctgcaactttatggagaaaacatgaataggacacaatctgaaccatgagctttgaagttggcaagctagtcagtggttactcttactgcacattctatgtcagtatgtgtgtgccaaaggtaaataagttatcccacaagtctcttaacacttggtaaataaattatcctgcaagtctcataacacttgctagggtcattggaggacacttaccttgcctttaatcatacatgataaataaactgtaatgtattgcttgcaattgctatctaagtagtaaatattgccttagtatatttttcaagccatgctcttgaagtgtgttccaatcctcaaatttcttcttcggctttcacaccttcctcagggggccttggaggcatatccctatattcttccttttcaagttcgctatgtaagaaaacattcttaaaacaaactaataaagggattgatcgagatttagtgccagatatacaaagactccaaggagatgatctcttttctactagggaaatatatcacctggtgccagtaatcaattccttaggtttgagtaaaactctttcatttacatgaccttgtacctctccatgttgtcagatttgttgtacataatggtgttggatccatttacaaccaactggtctctttcttgaaggccaaccaatttccctggttcaattgtgctataatgcttcagctcctcgtgtttgaccttcttccactttggttcagaaaagaagtgcaattgggttgcaaaagcatgataattaggtgagggcgatctgcaataaatgcgagtacaaataggttagcaaatggtcacaaaaacattttcatttaaataaggtaggagtaaatatttcttggttggtttggctgactcaatgacatgcactaactaaagattaaaatagctaacaattggagtaagagacatttctctttctatcataatatagatagcatggatgaagatgtgcaaatgccattattttttttgctttcacttggaatggatatctataagttttgaaatatttttatttttattttatattacaggttacaa

SEQ ID NO: 11646 - DNA, 3710 bp, Vitis vinifera
  Intron number 5 from transcript GSVIVT01001278001 (locus G SVIVG01001278001) derived from phytozome v7.0 (chr-ID chr2 ; pos 4925218 to 4928927 reverse strand)
ctgctggtgctgtactggttcaggtagtgttctttagcattaaaatatttataggaaatattttgtgtattgataataaatatatgttggaatctactattctagttaagggtggtgtgcttctttttttgtgtgtatgcatatgtgcatatgattgtctgttctactgggaattttccaggttgtctacatcttgatagctttcgtcataaatattgtcactaagggcgttagagtttattaataccttccatcaacttctaggatcctttactatgaactctaccataaggcttcctcatagaaatttagtagctgaacagaaggttttggtacatgtttgtttcttcttagtggggagtattttactattttaaacttctttacatttacatactaatggaagtttatcttgatggacaaaaccaaatagttattgtcctcatttataatagaaggaagctcattccacgtatgagaaacatcagtacaagattaggcaataccgaggctaaaattggtctccttcctaaggaaatggccctcaaacttcaaaagttcatatttgaatagccttactgtatgaaatgttagagactatagtatgtgtacatctatgatgccaatttcacattgacttgtaatgaagctgagagttactaaagtttttaactttttattactttttcgtgattaatctagtgtgtgttatggtgatgatgatatagttcttaataatgtttgtggcatctttcatgttcttgtggtgtttatcatgctttgttaagtatccttttttctttccagtaattctcatgtttcttctcaggcttcccattgcctgatatttctttccttttttgcgtttattttcttctttgttaccccttcttatcctgtttatttgttttctttctgcttgtttccttggtcattgaaggaactgcattaattctgtttaatttggtgtcaattgttatgaagtttttgtataccgtgctatcaaagtgtttgtatgatatgggatgaatcatcttgtgtggccgatttatttccaaaatggaagccccagccacacacccaaatgcccaggaattaataaataaatagagcatgagatttctttcattttgaagtacaaaagcctaatagcccatagaaatggccatagccagatagacaaatctcccccacacaatttgattaagcatgatatcatggttgtgtctagtgtccacatcacaaatgagaccatcatatatcaaaattagtgggtgaaaagaaaaaaaacttggatggctctcatctgtgatgccagggtgataaatagtctgaaagttatctggacctacttttctttgataccaaacttggtcccaaagaattattagagcaatctaaaacactgtttcttgaaaaaatgccaacaatatatatatagattaatcttgttttttaaaaaccctcaaaatggaaaacataatttgtgaaatccataggtttcacctggagtgaaatagtttgcctctcaggacctgatggagctttcagtgattttttgaggaattgggaaagaggaaattttagtgacatttgataggtaagaactgggatagggttttattcctcttagccttgtgaagttctatcactaaagaatttaagggagtccccttaacatcttgttatgggcgattagatattaataatgcccttcccatcaaccatgggattctttgaacttgttgtgaaggcccgatccagaagggagagagaagcttaaatttgatggatcttctcttgcaaacccaggttcattgaggaattagtggttcattcaggatgcacatgtccattttctccctttttaagccttccatagttggatttggttattaaagcaaaaatcttgatgatattggaaggcctgaaggaagtgtcctacttggggtttaagagattccattatggaaggggatgctttggacttgttgaatggaccagtctaagtagttttggctccttggaatctcagccaattgttgtgaaagcctagagatctcatagcagccttgagtgtcaatacaagtttgggtatatggaaagctaatcaggagggggagcatcttggctgaaagggaagccacctcatttgaagagttggagatggaaacattaccttccttgatttgagttgataactagagtggggctttctttgttgttttttcctcttccattaggagttgccattgaggaggcctttggttggaaggactatttgtccttcctttctgattttattgttaatagtaaaattctgtttctggtttttcataaaacaagagggaaaactccaggaaaggcctttaaatgtaggatacatctagttcaatggaaaaaaaaggatcaggaaatctctgtccaaaagaaagaaaaagaaaaaaagtaaaggaaatgagctgaagctgttgaacttgattgtctaatcatatgttttgatgacatcttaatgaataaattgcataacagctaaataaggtctatttttttttagcctattgactgatgaaagacaccccaaatataaaaggagtagctacttctcagcttgcctaagaagcttaaattgttaagtcatacgactctgctctggcaacaatgaggagccagatttctgatacccctctgtggatctatcctcctgaaatgccaaatggatccataattccaaattctccttatttcttgttccaacattatggtaataacttcagttactagatgttattataatgtggtttagttctgcaagatgaaatgtaatggatgcttctttagggtcaatacgtgggtattccatacatcaaacctgctttctttgtatctgcaggcaaccaagaggtttaaaagaggataagcactggaaactcaaacaaaaatcatgaaaggatgtgagtcaaagctatggaattaggattatatgatgatgattgcaaatgcttgaagccatgtccatcatatattcatcctatttttggggcagtggcatcccatatggattagccactttccagcctttctaaaatgtctggaattgtgtttatccaagtgctgatgatattgtctggctgcaataatgatagtggggattttccattatggagccatagactccctacatttcctgctacaaaaatataaattgtacaatttaacaaatatgtgtgttgtgatcttgttcccttcctcaaggtgaagtgccatctatttatgacctcagcagcaatcaacccacataggacctatccattccttctatttgggggcaaacaaagggtcagaaagaggataagcaccccaaactttgagttcttttttgggaattgtctcttagccctatctatatttttatggaacaaaaactcgacaacagatttcctagatcttttccattgtgacacctataatttgtcatctttgttgctctttttttttttttttcatcaatcaaaatatcaagtaccagttcatgcttagcaccaaatctgatctgcattctttgtaagggaatatgacttggttgtttcttaaatgcaatccttatctgtttctcttccaaaataagagatttataccaatcgaaaatgaattcttgctgctatgcacttacattaccatcattctgcaggcctgtgatagtgaacaag

SEQ ID NO: 11647 - DNA, 5809 bp, Vitis vinifera
  Intron number 3 from transcript GSVIVT01020424001 (locus G SVIVG01020424001) derived from phytozome v7.0 (chr-ID chr1 9; pos 19629954 to 19635762)
aaggccatctaaaagagatatttagtatgtttttttccctttttttttttttttttttactttttcctattccttgaggctgcacattagtgtagcttgataatggttttatgttacttcatgccaatcataccagcttttccccatttccttttctttttcctttggacatagaccattgattatttatttcatcgaaaagaaaaatattttagttgaaggaaaggggaaatatgcttcgagagaagcaaaagtaatgataaacagatactaacccaaatagcccaaagatcattgacacgacacctacaacataatggcttttcaccttgttattgatttttcaacagttgattttaaccatcagcctttttcctacatttgttttgagaattgtcctcaatgtattttagaagttatgacaaaacttggcgattttgccctaatgctaaaattttatctctttaaagatattaatactttcatttttgttagcatttattaagaagtatacgtagagtgtaactaaatgcattgtagaattaggccacttaaatggagtttagataggttagtcctttttatccatcttgaaatacctcccgtattgaattattttttaaaagagttgaaaggatatatctctttatgtacaaaaagtgtaagtttttcacctagtaggtttggaacatcgatcaaacttaaatgaggggcaatattttgaggaattttatttatataaggcaatgctcgattattcagtaaggcctctagctcgctataattaaaaattgaatggggattttatggagggaggatggagttatggtttttggacaagacctttgtgtgttactttccctttatttgccattgctgatttgaaggaggtgtgggtggtagatgcatggaatcagttagatgaaagggtttgttaactcctttcctccctaggctcttcaacgtttgggaggtggaaaatgtggagtagttacttttgagactgcaagggaagggggtgtatagagaagcagaagatagagtgagttggatagagttagagtagtaagttttctgttgaagccctctacactgtcttggagctgaggagtttgatatctttcatggtgggcatcatatggaattcttgggtgcaattgaagaagggtttctttgcttgggaggcggtgtggggaaaggggttaactttagattaatgtgaagggagagggtggcctttggcaaatatatgttttctttgtcataatgaggaagaaaccattgtttacaatcttaattcaccatgtcaagatgagggttttatgacaatcattgttttccctttttggtgtgtcatggatgctatccttgttggttagagagaccttcttacaatggtatgaacctttgtggctaaaaaaacaaaaaaaggcatggctagtagttctagatgtgctaaaacttttagggattcttgggttgccactaaattcactccatagattcaaaacttcctttaaaaggtctcaaaaaatggcttaaaaattaatgccaaggccatgtagcgattagatcgttaaggagtgcaagaacaaccatgcaaaaaagggagcatacatgtgtagcatgtaagggcacaaaatgagggacactaaatatgcgattagaacatgtgctgcatagacaaaatggagggtctacactttggttaaaacatgtagctttttacttgtatattttgggatgccttcctttatataatactctgttgttttacctataaaaaaaagggattacaatggttatgattttgggtgcattatgttttgaaattatagggaaagacttggttgtttattgaggaggaaaatgaggatttagtgttaaaattgtgaggtaaaaaagaactaggtttcacgatggctagtcctacgtttaatatgggagttaagcaaggactcattgtcctaaagagggcaaaggaagggggcttcatcatggggttcttagttagtaaaaaggagtagagggaatggaggtccatttgttattttctaatgatactcatattctttgtgatgccacagaggagcatatagattacttgaattgggcatttatgtggttttaggcaatctaagtcctaaagatcaatttagtgagttcctataaaaggaaaagatcgatttagtgagttggttctagttaaggaggttgcaaatgcggaagatctagctagggttttgagttgtagagtaggtactctccccaccaattaactgggtcttttgttgagacctcatttcaaaccaatcagggtttgggatgtggtagaggaaaagttttagaaatgactcactatgtggaagagataggatctatcaaaaggagaaaaattgactttgataaaaaaaaaaaaaaaaaaaaaacattctatctagcttgctaatttactttatgtttctacttttcatactgaagaaggttagttaaggctaggaaagatctaaagggattttcttttggcgcgggggggagctcttgagagaaagccacatttggttaattggccaacaatttgtattgataagaggagttgggtattagaaatttgtccatctctaacaaggctcttctcaccaatggtgttggagatttgcttgtgagagcaactccctttggaagtgggtttttgcaagaagtatagggaggaagagggggatgatgctttaaggagtgagggaaggatattgagtgggtaagggtataaagaggtgtggtttggttggttgtcggagaaaaacttagtcaaattaactttttagtgatggaaaaaccaaacctaaccaagcttatttaagattggtttggttcagttcagtttagctggttggttggatgcgagttaatttaagccttaagtctaatttgtttttaaaaataattaaaatcaatttggatttgaagataatttctaactcaaattcactagatatggaagtcttggaatgatggtttggtttgggttttatttgttaggagacaaaaaaaaaaaaaaacccaaaaaccaaacctatcgaggggaaaaaaaaaaaaaaaaccaaaagccaaattgataaaattggttttcaaaattctcaaaccaaattgatcttatggatgttgaaaactaaactgatttgatccgtttagcttggattggtttttcggttttgacttacacccctaggggttggtgtgtggaaagctattggaaggagatgagggttccttaattgtagaactagttttaggggggaaacaagtagagtgaaattttgaacaactacaaccaaagatgggggggttgttagaacccaaagtttgcaagatagcttcataactaggagatggggtggagaccttttttaggagattgtttgtagtgattagaggataaggtggtttggttgaactcgaaatgtggcaaattcttagttaaatctttccactcctccttatctagtgaaagaatggggatgtatcctgcaatcgcatgttggaatctataaggctcgatgatggttaactttttttctagggaaggtacataggaaagggatattgacgttaggtcaactcaagaggaggggtaagagaattctgaatatatgctattagtgcaaagtagaggaagaaatgattgatcacaacctcccacatggctcaaaagtagtcatgctagggtagctcatttacacatgatttggttgggtagttaatgcactccacaatgagagatgaccttttgagttgacatggatcttttttcaggaagaagaggaagaagcttagaaaactgctcatatgtgcttatttttggaccatttagaaggtgagaaatgagagagcttttgataacgccgaaaaagctgatcaaacaatcaagtaatcctttatgtttaatatttttagagtgggttagagtgtatatgagagattgctctttgtccatgatgaactttgctaattggttgagttctaagtaggcaagggaattgttttttgtgtatgctctcatgcacttttttgttaggccttgttaatacatatttttttttataagagtattgtattacgaaaaggtgctaaattagtggcttaagatttacaagaaagagacactcacccccttacaactaaaacaaaaaacctgtcttacaagatgtacaaaaaaacccttccctcaaagggaacccacccaatcagtgcaattaattaacattgaaggaccacattttataaacaatttagactccaaccaaagtaaataaacaaaaaaaactttcagcttttgcatccgcctttgcatggacaacacaccaccttcaaaggcaattatgttccttgcctttcaaactgaccaaaacaggcataaagggcttgcatttcaaactgccctacgcttcttgcccacaaaagactctttccaccccaagagggtctcccttaccgagtgaaacaaagtaaagaacagctttcaaacatcccttgtctcttcgcaatggagaagaagatggtcaatggtctcctcatgtgtttggcacaaataacatctatttgctaaagcccaacccctcttctgaacttggtctaaagttagaacttttcctcatgacgcttcccaaggaaagaagttcacttttggctgcacactagagttccatattatcttcattgggaaacaccttgttgagctcgaccctaaggctttgtaaaaagactatcgaaaagttgttatccttcgattccacccacctcacccgatcctcctcatccacaatcactctcttccgaatcaaacacaacaagaagttttccacctcatccatctcccaatcattaaaggcctagagaaataagggctccaactcccctctatttcctcaatttctaaaatagtccaaatatgtttcacccaagcctctttggaagtagctaaggcaaataaggaaggaaaagatttgcataaaggtgtagttccacaccatttgtccttccaaaaactcaccctctgcccattgcccaccacaaaagaaattctagagctaacaaggtgcccaagcttcctaattgctttccccaggcctacaccatacccctccctaacttcccaagaacaccacccacaacgttcctccccatatttcccccttattacttgattcctaaaagcctctttttcatttgcatagatccaactccatttgccaaggagagccttattgagtgcaacaaggctcttcacccccaacccccttttcttttatctagataaactattgtccaccttactaaatgaggttttctctctagagccccacctccccacagttaatccctttgaatctgctccaatttcattctaaccactcttggaaaatgcagaatagacataaaattcgaacttaattttagtgtttgactgaggatggcattttcctcttgttgtattggtagggaggtaaaaattaccaagctcttacaccatttatttatttatttgttttgcaagtaggctagagttattagatgtctgaacagagaatgggaattgggaaatgttttaagatggaaatttaaatgaaaaactagctagtgtacttagcaaatgctgtaacaagtaagtcttatttgctttattactgcatatgaatggagattttatgtcagaaacttctccaagaattttttataagttaatttttcatgaaattatgtttaagtggtggtgattgttctttgctaggtaactttggtgaagttgtac

SEQ ID NO: 11648 - DNA, 5700 bp, Vitis vinifera
  Intron number 8 from transcript GSVIVT01010361001 (locus G SVIVG01010361001) derived from phytozome v7.0 (chr-ID chr1 ; pos 19802523 to 19808222 reverse strand)
caaggctggaggcttttcacaggcaaactgaaccagtaagcttttcttataatttggtcaggttgacatttttattttccttttattgggggttgaggggggtctgaggaagaaattgaaggtcgtcatgctgttctagattttgttctacgtgatggtgtatatagttcttgagagggttggaatgcaggtgttcctgatcctagctggttttatttatcttttagcttttggattcttttttttttcatctttttttttttccttctaggattaagaataatttctatttatgcattaatcatccattgaactgctacatcatgtggttgtttttatcaggagtctgctaaaggtccatcatgctgttctagatcttgctctaggtgctagtgtatatagttcttgagagagttgaagtgcagagttaagttgcgtgaaaatggtgttcctagtccgagctggctatcatttttaacttctgaactccttgtttgttttgtttgtgttgaatataatgtatttatagtatattatctttccttgttaatataggtcacatgtatggtagttaggactcctagccttgtatatatatatctctcaattgtaagtagagattacatgaatgagaattaaggtttttcttctctctctctctctctcaacatggtatcagagccaaggaagaaaacctaattctttcctgtttcccgtgtcatcaactccgggaaaccttccggtgaccgtgtttctttccggtcaccttccccatctcccaatattttccggtcagtcagatcatcgttagaaaccactcaccgccggtgaactttccggcgaacttttccggtgacctatttttccgacaccgaccataccagaaggagcgactggaggagatctccaacttttgtgaaggcactggcaccaaaagagcatccacgcgccggccacgcgccattttccggcaggcggctgcatctcacgcgctggcacgtgagggcgcgtgaggcattttccggcgacgtgcctcctccagctttgcctgacgccgaccagcctccctacctccctggttctcccatccgtgccctgcacgtacctcttttggggatttttgtctccgtcggccctccaaacagtctttccggcgaagctccgactactttttctccactccaatccctgcacatgccttgggaagtgttcttatacctttctggtggtaccacgtcgcgatctgaggccgtctccctttttcggtggtaccacgccgcaatctgaagccgtattagggctctcttcgatccaaatatacttcattctccagataggtggatatggctactaaagcttccattttttcctctgtcatatctggatctcctatgattacttcggagaaattagttggcagtgaaaattatctttcctggtctgcctctgttgaactttggtttatgggtcaaggatatgaggatcacttgattacataggaggcagatatccctgaggttgaccgcgtacagtggaggaagatagacgcacagttatgtagtgtattatggcaatcggttgatcccaagattcttcttcatcttcgggcctacaaaacttgttttaaattttggactcaggccaaaggattatacacgaatgatatccagcgtctttataaggtggcttctgctattgtccatatcagccaacaggacttggatctatctacttatattggccaaattgcctctcttaaggaggagttcttgactgtgatgcctcttactcctgatgttggggttcaacaaacacagcttgacaagttcttcatggttcttactcttattggcctctgtccggatcttgagcctgtccgcgatcagattcttggtagttcatcagttccgtccttggatgatgtgtttactcgcttcctccgtatcgcctccactcagactttgccatttgatagcacttcagattcttctgtattagtttctcaaactagctctcgaggaagccgcagtggtacccgaggtagaggtcaacgtcctcattgcacctattgcaataaacttggccacactcgcgatcgttgctatcagttacatggacggcctcctcgcactgcccatgtggcccagtcctctgattctccgctgcctcagcctccgagctcttccgcatctcaggcttctgttgcctctgttgcccagcctggtaatgcctctgcctgccttacccacacatcttctcttggaccctggattctagattctggagcttctaatcacctatctggtaataaggatcttttctcctctattactactacctctgctttacctactgttaccttagctaatggttctcaaacagtggctaaaggtattggtttagcccttcctctgccttctctacctctcacttctgtcctttatactcctgaatgtccttttaatcttatttccatcagcaaaatcactcgtactcttaattgctctattaccttttctgataaatttgtgaccttgcaggactggagtacggggaagacgattggcataggacgtgagtctcaaggcctctatcacctcacctcggattcatctcctgcagtttgcatttccactgatgctcctctcctcattcacaatcgtttgggccaccctagtctctccaagttccagaagatggtccctcgtttttcgactttgtcgtcgcttccatgtgagtcatgtcatcttgggaaacatactcgtgtctcgttcccaaagcgtttgaataatcggacaaagtctccttttgagcttgtccacactgatgtttggggtccttgtcggattgcgtctactttaagattttagtattttgtcactttcattgatgactattctcgatgtacttggttatttttaatgaaaaatcgagctgagttattctctattttccagaaattttatgttaaaatccaaacccagttcaatatttttattcgtgtgttacgcagtgacaatgccagggaatattttttagccccatttacttcgtttatgtctcatcatgggattcttcatcagtcttcttgtgctcatactcctcaacaaaatggggtagctgaacgtaagaatcgacatcttgttgagacaactcgtactctcttcctccatagtaatgttccttttcgtttttggggggacgctgttcttaccgcttgttatttgatcgatcgtatgccctcctctgtcttacacaatcagattcctcactcccgtctcttccctgaccaaccactttatttccttcctcctcgtgtctttggttgtacttgctttgttcatattctcactcctggacaggacaagctttccgccaaagccatgaagtgcctcttcttgggatattccagacttcagaagggttatcgttgttattcccttgagactcattgatactttatctccgctgatgtcaccttctttgaggactcaccattcttttccaccacttctgagtctcttcctgtttctgaagtcttgcccattctcattgtctccccacctgatgctatgccccctcgaccacttcaggtttatcatcgttgccctcgtgtcgttgctcctctcccttttgctgaggcacctgctgactcacttcctatcccttcggcttcacctgcttcggctctgccttcttctaatgacttacccattgctgttcggaaaggtactcgctctactcgtaatcctcatcctatttacaattttttgagttatcatcgattatcttcaccctattctgcttttgtttctgctatatcctctgtttctcttccaaagagcacccatgaagctctttcccatccagactggcgacaggcaatgatggatgaaatggttgctctgcactctaatggcacttgggatcttgttgttttaccctctggtaaatctacagttggttgtcgttgggtctatgcagttaaggttggtcctgatggtcaggttgatcgccttaaggcccgcttagttgctaaaggctatactcaggtttatggttctgattatggtgacacattctcccctgttgccaagattgcttctgtccgtttgcttctctccatggctgctatgtgttcttagcctctttatcagttggatattaaaaatgccttccttcatggtgatcttgccgaggaagtttatatggagcaacctcctggttttgttgctcagggggagtctggtttagtgtgcaggttacgtcgttttctatatggcttgaaacaatctcctcgagcatggtttagccgttttagttctgttgttcaagagtttggcatgcttcgcagtacagcagaccattcagttttctatcatcataactccttggggcagtgtatttatctggttgtttatgtggacgacatcgtcattataggcagtgatcaggatggtattcagaaactaaagcaacatctttttacccactttcagaccaaagacttggggaaactcaagtatttcttgggaattgagatagctcaatccagttctggtgtggtcctttcccaaagctttagacatcctggaagaaaccggtatgttagactataaaccggtagacacacctatggatccgaatgtcaaacttgtaccaagacagggggagcctttaggagacctcgggagatatcgacggctcgtaggtaaattgaactatctcaccattactcgtccagacatttcttttcctgtgagtgttgttagtcaattcctacagtcaccatgttatagccattgggatgccgtaatccgcattcttcgatatatcaaaagtacaccaggtcaaggtgtattgtacgagaacagaggtcatactcaggttgttggttacacagatgcagattgggctggctcacccacagatagacgttccacttcagggtactgtgtttttattggaggtaatctaatatcttggaagagtaagaaacaagatgtagtggccagatctagcgctgaagccgagtatcgagctatggctttggcaacatgtgaactcatatggttgagacattttcttcgggagttgagatttggaaaggatgaatagatgaaactcatctgtaataaccaggccgcattacatattgcatccaatccagtctttcatgaaaggaccaagcatattgaagttgactgtcatttcattagagagaagatcgcatcaggatgtgttgctacaagttttgttaattcaaatgatcaactagcagacatcttcactaaatctctcaaaggtcctaggattaaatatatttgtaacaagcttggtgcatatgacgtatatttacatttaataattgaagcatgtctagacatcctaatattcaaggtccatacatttcttcttcttatgcttcgtcaggtaggactctagaaaaagcttgaaagttttcagaatagttcccaaaagccgtaactaaagtacagcttggctctgagcactcccatgaaattagaattcttagtttaagttggttctcatcatctagttctatgtcaccattgtaaacagtcattgcagcactactcattcttagttcttgtggtctggaaagcattgagccttcttgcttttggttgtcaaatattctaagttggcttatgtttgacctgcaggttattgattatt

SEQ ID NO: 11649 - DNA, 8261 bp, Vitis vinifera
  Intron number 3 from transcript GSVIVT01036033001 (locus G SVIVG01036033001) derived from phytozome v7.0 (chr-ID chr4 ; pos 7600283 to 7608543)
tctgtctccgagacataaaaaaacgttccattaaggtattctccccctcctcccaccttccctttttatttatttatatataattcatgttgctagcacaacctatttagagctatattttcttttgatggttattcatcctcccctttttttataattcatgttactagcacaacctatttagagctacatttccttttgatggtttttcatcctccccttttttataattcatgttactagcacacctatttagagctatgtttccttttgatggttatccatgggggatgctaggtggagattatgattattttttataaatttatattttgctcaaattatgatgtatgaatcaaggaagtgtgatctaatggaacatttctcagttcttggaaatttacttgacattttatttacaatctagtcccaatctagcatcaagatatttcatcactcaagaactcaaaacgttggctcctttttgtggggcactcattaatttaattctgtatcatttacctttaaagagggagcccaaaatgttatgaaaccaatgacatgaattagataaggctcttttagggtttttttgcttgcagatttatgttagagattaatatgctgacatacgtgcattggtttagtgtcaaaagctgagtcataaactgaacattgtactggcacttgttctcatcacaatgaacaatatgatcatcagtggattttaaactgtacaacactggttgcatgtttttttaagctgcctacatcattactatccatgggcgtatctgtatccattctctcatgtccaaagcactataaaatgttgcacatattgctaaattattcttgtaggagtcaaatgttttcccttgaaactgtgatggttgagccaattatctcaacctaggtgcataaccatgtatctgtgtgatattataacattcatgttcatgactgatgttcaatgaaaaattcacacaatagctggttgtggcacaatagttggttagttttcctttttaattgcctaaatcttactcttgttttatatattcatggttgccacttagcagtgttatggtgatactaatatttagcatgatgcactggtcactgattatcaatttcaagagattttgttacgggatcatgacacaatagctacatctttgttcaggcaaattagagctcccggttagtttattgactgctgaaaccttaattggaaatagttccctaaagtattctctctgttcagctgttcttacataataagaatgttaaggacagagttaccaaattaccttccaaccaagttacacagttgcccctttattctagtcatcctcttcaacagccttgcttgcctaaattgtcataattagcttataatttcagggcattctgcctatgaagtgtgattagctttttgatgtttttaggattatctaatgaattttatttggtcatggcgattaaatagttcctagaaggaaatctcaggttcaggcatccagttttacttccacaggaactcttacatcattttttgtttatttctgttccaaatatgaaattattacatgcgctccaaaaatgatggctcggggtgatgctcatttttcgtatggaattgggggaatccagtaatcctctctctttaagtcagccatgaacccaaatgcttatcgaaaacaagaaaaaaaaagggcatctatgagccaaagcgaacttcgattatagatttaagcttgttggaaggggtggaggcttgctgcaggggtgttattgtgcagggtcttgttaaaagttgggaagatggaggaaggaggtttaagttggaaagtcgtgcaaatgaggcaggtaggttcttattgtgctctgtggttgacccggaatcaaagagatattgtttagtgttcccagaaggaaaaggtattttgggaggatgggtcttgttggctgaaaagcttcgcttccttggagttttgactcgggatgagcccaggggaactgttgttttctatgggacagggagtacaaatgaggaatatgaggggaaagccaaaaaatcctatgttgatatggtgaaaacaagagtgaaaaagttaggggaagcagtgtggttacaactgggggagaaagatatcctaagcgaaagggagttaatggaccggtgcctggttgggagatggggacagtctccaatgtcggatccagatatgcccgctcttgaaagttgggggagatccctgtggaatattaaaggaggggtgaagtttgcgaggctggggggccctctcttgttgattgaatttgagaataaagaagaggcagataaggtgcttttaagaggacaccgatggttcaaggaatcgatcttgcacttggataggtgggacctaaaggtggggtgttctcaaaatggcgagagagccaagagtgtttgggtgagagttgtgggtttgccattacatttttggagtcaagaagtttttaaaaaaatcgaggactgttgcggggggtttgtcacagtggatgaagacattgttaattttaaggaactacaatgggccagattattagtgagatatgaaggtttagagtggccgagctccttgcaagtagtagttgggtctttttgttatgctttacagctatggtgggaggtgaaaccagggttatcggaagtggttccggtgatcagaaacaagaagggtaaggagcgggaggttagggatgacggagaaggagattcacacgctggattcaaaatggcgaaggtatagatgcatggggaacctgcaaaagtagctgagccgtgcaaagttggtgaagggggctgcataaaggaggctgagtcctctggtactgtgttggaaacagtaacagaggctgatgggacgaaaggaggccaacatccagtttgggggaaaagttcttgtatcgggcctgggaaaaaatttcagttgggccggcaaagggatttggggtgggggagagggcccgctgaggagggccaagtgattgaagtctttaaagacttagaggagatgggccggcccatgatggagtcttttaaaggcccggtggaggtgggacgacccatattggagaatttaagaggtgttagggcttccgatgggagtctctacgtcggtggagagtaagagggggaattgtttggttcccagctggggtcgcttcatccggccgttaattgctcagaaatcaccgacaaagcgttgatggaggaggcttccaggtattctgatcaattctcttgttctttgttttctttggggaaacgggaaatctctctttcttctactccttctgggcgggacggggaaggtgttgccattgccaaggtttctgattagggcaaaggtccagaagccgtagagagagctattatgggtccgttaaggatgatattggcggatgagagggaggccgaggtctcgaatttggcgggtagggagtctaggtcttccgaggaggcgtcaaagggggtttcaggaatgttttcccaagagaatgaggaggagagggtcgaagagggggaattgtgttggcactctagtagtttggttaagtttagccgctatcttggaatgccaacggagggcttcgaaggggaaattttgcttttgcttaaaagaatgaaagagaggaaacttcaaaaaggaaagttgaatggtagaaaaaggaaaaaattggagtcgtcaaaattcgaaagagaattgagaaagctggaatggacagtgaactatcttgaaggaggaggagaaggggagaggggggggggggggggtgtctaaatgaagctccgactgcttacttggaatgtaagaggggccaataattgcgacaagaggaaggtgatcaaagctttgataaagaagaatagggtggatctagtttgcctacaggaaatatcaatgggcattattcgtagtttaggagtgggtggattccttgaatggggagttgtagattcaaggggcgcagctggaggtatagtggtgttttgggataacaaggtgttcgagttagttgacattcaaaaaggattattctctatttcttgcacttttaagagctgtgaggatggtttcttatggatgtttataggggtttatggcccaacattgaggaggattagggagagtttttgggaggagttgggggccattaaggggctttggaatgggccgtggtgtgttgcaggggattttaatgccattataagtccggaagagagcagcagaggagggagcttgaattcaaaaatgaaaaggttctcagaagttatagaagatctagagttaaaggatctgccaatggttgggggcccttttacttggattggaggggtgaataatcagtctttttcaaggctggatcgttttttggttaatgaggggtgggacagtcattttggtgatgcgaggcagtttgttctaccaagaccggtgtctgatcactttccacttcttttggacggagggggcctgagaagaggcccttcctcgtttagatttgagaatatgtggctgaaagtggaaggtgttaaggacctattgaagtattggtgggaagaaggtagcttcagtagatccccaagttttatcttggccgaaagactaaaatctctgaaggctaagttgaaggagtggaacagaaacacctttggtcgggttgaatatagaaagaatttggctttggagcagatggagttttgggatgccaaggagaaaattagcagattgtcgctggaagagctggaagttagaaatgaagcgagggaagattataaaaaatgggtcttacttgaagaaatcacttgcaggcaaaattctagggaagtgtggctgaaagagggggatagaaataccggttttttccacaagatggttaatgctcacaggaggaggaataatgtggaaagaattaagattaatggagcttggcttacgaaggagaatgaaattagggaagggattgccaatgcttttaggctgttgctgtccagtttgggggaatgacgcccttctgtttccaggctgtagtttgagacattggagcctttggacgctagtgccttggagattccttttacggaagaggaggtcttcgatgcactattgggctgtaatggggataaagcctcgggaccggatggattctctatggccttttggcaatttgcttgggatttcgtgaaggcagatgtgatgtgctttttcaaggaattctacgaaaatggtaaatttgttaaaagcctaaatgtaacttttatggtcccaattccaaaaaaagtaggggctaaagctttaggggattttaggcctataaacttggtaggaagcttgtacaagtggctggccaaggtcttagccaataggctaaaaaaggtggttggaaaggtggtctccaaggctcaaggggcgtttgtggaaggtagacaaatcctagatgcaatgttgatagctaatgaagccattgattcggtcctcaagaatgatgagagtggcattttgtgcaaactggatatagagaagacatatgataaggtggactggacttttattctcttagttatgcagaaaatgggttttggggaaaaatggattaggtggattaagtggtgcatatccactgcaagtttctccgtgttggtcaatggaacccctgcgggcttcttccaaagctccaggggtttgagacagggcgatcccctttccccttatctctttgtgatagctatgaaggtttttagtgcttttctcaaaagggctgtagagggaggtttcttatcgggttgtagggtgaagagtaggagtgaagaaggggtcctaatttcccacttattgtttgacgatgatacactggtgttctgtaaacctacacaagatcaattgacttatctcagttggttacttatgtggtttgaggccgtttcgggattgagaataaatttggataaaagcaaactcattctagtaggaagggtagagaatatggatgatctggcttgggaatttggttgtagactgggtagtctcccaaccacatatttggggatgcccttgggtgctccttttaagtcagttatagtttgggatggtgtggaagagtgcttccgaagaaggttagccatgtggaagagacaatatttatctaagggagggagggcgacccttattcgaagcacgttatcaaatctacctatctatctaatgtcattgttgtgcttaccaagctcagtcagacggagattagagaaaatccaaagggactttctttggggtgggggcaatttggagcgaaagcctcatttagtaagatgggagttggtgtgtttaagtaagacgaaaggaggtttgggggtcaaatgcctttcctttctcaacaaggcacttcttgctaaatggaattggggtttcgcaaatgagaaagaggctttgtggaataaagtgattagagggaagtatggagaagatagagggggttggtgctctcgggaagtgagagaggctcatggtatggggttatggaaaggaataaggatggattggaagatggtgagcgataggatggttttcattgttggtaatgggaggagggtgagattttggagggatagatggtgcggggattctcctttgtgtatgccctttccttctctttttgctttgattgttgagaaggaagtgtgggtgacagatatttgggaccccttggctgaggggggttggaacctctgttttttaagagcatttaatgattgggaggtagaggaggcggaaagatttttggagaggctacatggtaagagagtttttgaggatgtggaggatatggtgtcctggactgaaactaagagtggtaaattctcggtcaagtctctctatgtagcccttgaagcgggtggttcatctctgtttccttcaagctatatttggaatgtgaatgtgtagcccaagattagtttctttgcatgagaggttacgtggggcaaagccttcaccttggatatggtccagaaaagaggtcgagcattggcaaatagatgctttatgtgtcttgagaaagaggagaacataaaccatcttctacttcattgttcaagaacaagggtgttatgggatctactttttactttatttggagtttcttgggttttgccttcgtcagttagagagacacttctaagctgcaatggttttttcgtgggcaaaaaatgcaagaaggcgtggagagctgctcctcttcacattttctggacggtttggaaggcgaggaatagattgactttcaaggatgatatgttgtcaattcagagactgaaatactcttttatcctttctttttggtccgagactaagttgttcatagatgattgccctctaactatagctaattttattgattgattggactctaagtaggattgtggtgttgggatttctttgttttttggccttgttgaaggcgggtgtataggtattgtatactttgagccgcttttttagcatctcttttttatatgaaatctcttttacttatcaaaaaaaaaaaaaagaaaaaaaaagaaattattacatgcctatctacaactatgaattagcaaccttgtatctagcttcttggttattcataatatgagaatttaattagataagaaatcaatgtggatgatgcttaagattgacaatggcaatcaccctgggtgatttgaaacaatcatgactttcaatctttgcattgcccaacttgagtttcccaatgatgagttgatattttgaagattaggttttgatttcaagtgataagagttttggaacttgaccttgaaatattatttagagcactcttaatttccagttttctcatctatgctacttccataacgagggtaattgactgtggtattgcaatatttatgtataatatattatggaaatattaccaaaatactggaattttcaaatgattttggaaaacattcatgaacttcatgtagagttcttgaccatgcaagagtgcatgtggttcaattccaggttgtcaggcaattgaatattcttgaagtatcatatatgaagttcttttgttttttcctcttgaaatctagtaatttgatttttttgaaggaataagcatgtaactttctgaaattctgtggtaactatatgcaacttattgcagtttcgtgaaactctgatccgcttggggcctttcta

SEQ ID NO: 11650 - DNA, 9522 bp, Vitis vinifera
  Intron number 3 from transcript GSVIVT01015101001 (locus G SVIVG01015101001) derived from phytozome v7.0 (chr-ID chr1 1; pos 1046372 to 1055893 reverse strand)
ggacaggtttttggatcagatggcttcagctctttcttccacccaagtgaagggatgactgaagataataacgtggtgggcggagacttaccatcaagttggccggagttgtctttttcaaccaaatgaagatgtggagggagatattgacaccttttctaaattttcgctaactagtgagaatattaacaagcttctttcaaattttgtagcacatccttcttactagttttccattccttcgtgataagaattggtgagataaaaaataaattttcttttatcatttaagtaattaatattccattatatgatcatttttatccataagactactaaaattgtaacgagtcatccgcacccttttatactttcttcgtaaatattgggtctgtcacagtccagtcactcccaagctcttaaaaccttaaaacttgtctacatctaatggactcttatatctttaaaaatagtctatgcacttaaagtcttattattggactatcacaaaagtcttatttatatcttatataacctatatataaagaaaggttcaaactataaattaaaatttttgaacttaacaatttctgagaaaaatagaaagagagaattgcatggaatgatgtaaacacataatgtatgcaaattgtagtcagtattaaatagaagtttgactggtagatgaagacagattttgactggtaaattgtagaatattcaaacgtgggattggaagcatcaaattttcactagtactgaacccaccaacattgggtaccattccacactgatttttctcagtggcctgatctccagaacattgggtaccattctacactgatttttctcagtgaccttatctccagggttctcggatttggggtccattgaccctgacagttcatgcattcgatgctctattgtaccagtcagatttatttatttagagtgtgacctgtaataattataggaagggatgtacccttttaacattttatttttcttttttattttttttaaatatgagaaagaataaaaacatttttgagaattattagcaagcacatgcactcttatttatttatttatttttaattttttttatagggctgaactattgaacatgtatgtttgggtttattaattatcatactaaaattttaactatcatttatagtataaaattgagattaggattaaaagaattctaaggtatcaaatggataacatatccaactcaaaatttgaggccttaaaatgcatagctaaatcccaacggttaaatgaagttataaaaaaatgaaactccaacactaaaatgcaaataaataagtaaataatattaagatttaaaaagataaatacaaataaatcaaatcatttacaacttataaaaaaataattttaattttttattatactttatttatttatattgtagagaagtcctgataattgaatacagttaaatctggcaactgttttttaaaataattttataatattttgtaaaataaaaatctgtttaaaaatctaaaatgtttttaacctatttttaatatttttaaatatgttttaaaaataaattttatgtcttaaactttgtttttaattattatatatctttgtataattatttttttaaatgattctcaaattaaaagtgaaaacaattaaaaaatattctttgaaaatatcatatttcttattatcaaatgtgttttctagtttttttgttctgtaaaataaaaaaactgttctaaaaaatagttttcaaataggtccttagagtcggttttagtaatgattttaggaaatattttaaaaaaaataggtgtttagtaaaatttaggaaatacttttaaaaaattttaaaaatcacttatagtgttagaaaatttacttgcagtgttttaaaaaaaaaacatttgataagtaatgcttctaaaaatacttagagaaaaaacattttcattaaaaatgcttcaaataaaaccatggtgaaacgaactcttagagtgtttgccgtaattttaagaaacatttttagtttttttttttttacatttaaaagataaaaatttcatagtgttaaaaaatttaaaaacgttgtctaaaattactatcaaataaatttttagttatatgttttacgaaaattttaaaaaatgtttttaatctttttaatatttgaaattttttatattaaagatgttaaaaacatattttaaaatgattgtcaaagacactctaacgcttgatcggctaaaaattaattatttccggggcaaggtagttaggtggagcagctgacaatgtgcattgaaaaaggtccaattgttcattgaatttaaattatactaatttgttaggttcactgactgtgacaaaggctttgcggaaaggatagaatttatgtggttgctaatagaccaaatgtaccaaatagagtatttttataaattatattatatggataaagagaactaagattatgtgacggattcgtgatccaatgtgggccaaaatggatccattgaaagatgacaacacttatatcaataacattttgatagagaattctttagtgtatgaatataaatataaaaagtaatttaataaatgttgtatttttaaaaataatttaattaaattatgagtagtttagtaatagttgcaataaaaacaattgatagcacttagcgtgtggatatataaataaaaataataatattatataataaaaattaatttaaaaattttaataatatgttataaatattagaaagtgattttagctctcttagaatcaactttgatggatttcaaaataatttttaaattatattatatagtataaaaatttaaaatttgatttataagttttaaaaattattaaagtatttaaaaaattatactttatcatttcattcaatccactcatttcaatggattttcccatccacaaatccagagccacaccggcccacgacaggcacttgcccctccctaaaagtttgaaaagaaaatcgatattaaggccttaccagaaaattttaaaaacttctttttcattcactttttcgaatgttaactttatcaatgtttgctccctggaatctattctcatagtacgattgcccattggttgtggtttcgtcgaggcttcaccccatcttccacgaatttttgtcattattggtgctgataaattttatcagtttttggtttaaatacatttgttttgttgtggtgatcaccgttccttggtttggggtggggtttttgttaatgtaaaaaaagaataaaaaaaaatagttcaccgtaaatacctacgaaacatctttgtagcttgaagtacagtgtttaagaaaaaattattgaattcatcaacaaatctactatttataaacaactttattactttattaacgaaagatagggatacgattatcttctttctatttttaactaatttaattcaaaaacaaattttgaatttcataaaattttatctagttatttatacaattgaaaatatatttaaattctaatagtttttaataaagggaggggacatttagagtttttgtttaaagatgtgagaccatcataggattatagtgggtttttattaagaatacgaaggaaaaaggtaaccataaggagtttctattaaaaattttaaaaatagagggactacaatgagttgttaaaaatcccaaatatagaagagcctatattagaattttgctaaggattggtggatagagggaccatgatgggtttctgctacaagaagtcaaagaacaaaacaaaaaaactcaaatatgccatgaggcctactttactttttcttttattcaaatttataattatttatgttttttttctcaaaatatatatagaaatgaaaacattctatacaatcatggttgtgtatttgtgaaagttttattttggtattggggtgtataggcttcagaagggactctacttaaaagtgagatatttttgtaggtctaatttatttttagaatctatcaaaaaaataattaatagttggtgtataacattatggttgcgatctacaaataaatctaatttgtagctgtaagaccatttttagtgtagtttttcaaagggaaaaaaataatttataagttcttaaaattattaaaatatttaaaatcgatcaaaattcgtaattaccaactataacttaaattctactttatcatttatttcaattgattttcttctcgtttggggcttcactccatccgcccatcttttatctttcagttctctcttatttccacaagtcctgttaaaccagggacgcagccacacacaggcccacgactgctgctcgccctcccaaaaaattttggaaacatctttttcattcacttagtaaaatgttaactttatcaatgtttgctccctcaaatatattctcattgtaccaggtgattgcccatttatgttggttgtcgtttcgtctactccttcatcttccacgaatttttatcattattggtgctcacaaatgttatcagcttccaaactagatcgataattatctcccttttatttttaactaatttaatttaaaaataaattttgaatttcataaaatcttatttacttatttatgttttatttaatcgaaatagtgaaaatacatttaaatttcaaccgttaaaataaagggacggaccatttatgggtgcaagaacatcataggattatgatgggtttgtttatttattttttttaagaaaacaaaaaaaaggtggccacaataaatttttgctacaaattccaaaaataaaggggaccataatgaattgttaaaaatcccaaatatagaaggtgattttattagatttttgttaaggataccatgatgggtttttggtagaagaagttagaaaaaaaaataaaaacaaaaaaaagccaaatatgcaaggaggcctatatatatatatatttttttcttttgttcgaaattataatttttttttttttggtatgtgttttttctcaaaatatataaagaaatgaaaacatttgatgtcttttttagtgtagtttttcaaatgagttaagagtgtcttagtcattaaaataattttataacatattatgtgggagttttaaaattttaaatttatttttacacttggcagaaatgtttgcatcactaaattatttatttattctttgtaaaacaactttaatatttctttaacccatgtttaaaagggaaaaaaaaaaaaacaaattgcttgagttcataatgatttatttatcatttgatactatatttaattccttaacccatataaaagaggaaaataaaaaaatgtatatataaaaaaaaaaacaaaatgcttcaagctttagtatagttttatattgtggctataaaacacgttagatcgagaattatttttgagctttttactttagtttaaggattgttttttttaatggggattattttttgtcgaaaatctttagtaaacttttaataataaaatatttttgtgggaccaaaaggcatggtggccttgtcactaaaaaaatggaaaactttagcaactcgggggtggatgcatggcactatgattagtgaactaattatttaaagtaaagtgaaactttatggctcatgcccctaaaaaaagtggtacataattccagtagtgttcaacaaattattgaagtcctcatccaaattttaattttaaaaatgtataacttatttgtaaaaatatttggatgtgacaccaacatgaaaagaatgaaaaagatatattttaaaaaataattccaagaaaattaaattattttaataccttatgatttctcccatctcacgtgtttggttcaaacaaaataaataaataaagtaaaaaaaaattagcactaatttcaagcgtggctttgaatgtcaattgaatcattcttgaaaccctaatacatttaataaattagtttattgtcttgttagttttaaatgttgggtgaaaattgaagtaaactaatcttacaagaaagtccaaatccctaagttaggatcgatctttcatactctcttgaaattccattgtgtcaagattcttttttttttttttttaagaaatataaaataaattgaaaacattccaattttttttttaaaaaaacaaattttcaaaccccaaccttcaattttctatccttttccagggaaacaaacaccacttcccatcacaacgataaccggagtcattaatgggtcaaacgagtgtcaattatgagcattacctactcacctacaaatatgaaatatcattaaactaaagtttctcccttcaactgttgaataccatttggggccaatttccagatgtccgagaagcaagaaaagccaaaactccggctgctggaaggacagacctgaatacaatgtctccggacgaatatcaagttggcgttcatttttcgagtgttaggtgtaccgtgtattttagctacttgcaccattaactggttaggtgatgatgattatggatttaaacccaactattaaacctatctgtttttttttttttttttaatgtcaatgcatgcaaattggaatataaaatgtatccaattcttttttcttgtctttttaaaattttttctggttcgagttattggcaatccaagtatatataaaaaaaaatatttgaaaatgattagattttattactattatttataatcaatgaagtccaattcatgatcataatgaactcatggaaatgaatcccatgaatcgaacacaacaaaatttaagtagttttcattaaaagatatttgacatttcataagaaaatttaggacatgtttgattgttgtttttaaaaactattatgaaaaataattttttagaatagtatttttgcgtttttagaagaaaaaaaaattgtgtttagaactgaattttggaaaatagtttttgtttttatttatttattaaaaaacatgtttgatttagttaataaagaagatttttagaataagtaaaacaaaaaatatatttgaaagttattttttttaattaataaagtgttttattctattatcttgatattataaatatataaataattttcatatgcacaatttatttaaattttaaaaaaattattttattttgaaatttttacagaaatgataactttgtcaccatgtgtaagtataataatttcaataatttaaagaagaagaaaagattttgcgggtgggggtgtggtggttgggtggagctcacctttatgaagatgaaaacagaaaaaacagttaagaaaacacaaaaaaaataagaaaagaaaatacgaaaaataatatattatttgaatactgaaaaaacaatgaaaacatatttttattgttctcaaaaaaatagtttttaagaacacaaaaaacacaaaacaaaaacacaccccctttccccaaacaagtttttttttgtgttttttgttttcaagaacagaaaatagttattgaaaatagaaccaaacaggtcattagagtttattttaattcaaaggtttgaaataaacaaaagaaattttcaaacaaggcttaaattcaataaaaaaaaatgcatattttctttctttttttttatatatttattcaataaaaataaaaatagactctaaaattatttggttttttccatccacatttaaaaaataaaaaaaataaaaattgatttttgcaataaatatattcaataaatatagactccaaaatttttttatataataataaaaaaattagatgataaaatttccaaagaaatttcttgttgataaatttataatttttcttttttccttggaggtatattattacatggttaaaaccctacctagtatacatgcatgatgtgaaacaagaaaaggcatttctatgcatgggtaagtataaaattattaatagtatatgcccatttaagtcaacttaggtcataatcaagtaaatatttctctttaactactaattttaagtcttgacacatcaaagctgaattgtcacaattcaaatcatacatcaaagtcatgttctttcaaagtattaattaattcatattatatttcaaataaatcccttggtatttaatgatcaccttatcggaaatcttttagtcaatttttttcttcttctatgtattgacatgtttatatttaatgggttttagtcctttttctctcatattgacatgtttgtggtggacatgaatagtatcaaaacaagtaaattctttaatttatgtaattattattttatatcaacatacattccgttaatgtcattgaaaataaccaattaattaacctatttacgaattgtaccactcctctttcctaaggtaataatagtcgaaaaatgttatgataggtatcaaagttttcttgatgcgatattaatattgtgataatggtggtactatcgaagtttaaatctagacggttaaatatatatatataaatgagattaaaatataaaaatataaataaatcaaattatggtacaaataataagattttaaaatatatacttgattatttattggctttgtaccaccttttgatacaataattgaaccttgatatgagtaatgtgaaataagataggaacaatgattgagcatggttgaaagggcctagctagggtttaaggcccctaaaggtgaagctaagaaaggtaaaaggctgaaaggatacagtgaatgagtgagggccatggctgctggctttaatgggtgaggctgatgttggaagggtttgaattatggtagagatggccacggctgtgccttggtttgaattttgacattcttgagcctgggtggcacaatttatgatagcaacctcgctagttgaggtttttaataaatatgggtgtgatgtggttggattgacaggaccttggcctatgtgaacatcataattgtgacttgtgacacccccacaaataaatgaaactttggtaactatcataaatattcatgcatagcacaagctgattcgagaatgataataagacttaattgaaaattagcaacattaagaataaataaagaaaatgacaaatggataggtgatggcagggcaaattcatttttgttttgaattttctttcttcaaagaacagaaggatccagctgaaaacgtgtgatagagatgtgaacgatgcaaattgaaagtgggcgcccaaggacactgttcaatttgtccctaatagtagacttttaaaagtactggtaatgagtagctctcaatctcgtcacccacaaacaaatgaacaattatcaataaataaattaattaattatatatatgaaccgtgagaaggaatagggtttttattgctacgtgctttacaacaatggagcacacgaagaccagtgtctgcaccaaacgttcaagccccttctcagagaagggtagaaagatcttggaaaggtag

SEQ ID NO: 11651 - DNA, 14103 bp, Vitis vinifera
  Intron number 5 from transcript GSVIVT01010122001 (locus G SVIVG01010122001) derived from phytozome v7.0 (chr-ID chr1 ; pos 15833637 to 15847739)
ttggtgcctccactaaactggacagggtacgtattcttggtttctgctatcaattatttcagttctttctagtgttctgtttaattaaatggctagattcttttctatgataagcaataaatcaatgtgttaaatggggcctaaaggaggggggcatccacttatgcaagatgtgtacaagcaatggttgtgaaaacatgcttacagcacttctaatctagccaatccaacattgtctataaagtccagagagggcaacaaatgaaatcccatatccctgcaagaccaccattcatgccagacctttccaatccttcaaatgttctcctattgctctctttccatgtaagagatacacactggaatcattctctaaacagccttatggttggttccaacgaatgaaccatgcaactaaggaggacatctctaacacagtgagggaatacccaatccacactgaaaaagagagaagtaggttctaattggtagcattccattttctagaagaatgtggactagttgataatcacataagacctttttttccccctgtctttatgatttgaaagaaaaaagagagagaaagagtatgatgggtggtgtttgtgttttgggatgggggttgtgtgtggagggcgggggtgggtgggatttggggtgtggcttggtttgcagttgggggtttagaaatgaaattatccaataattgtgactactcttaagggttaatataactttaaatctcaattttttgggggtgggtaaagtctttgtcctctattcaaatttatctaggatcatgtcctttgttaaattaagaactatcatctattttctcattgctttaatgcaatttcctttgtctctctctgattgctttatcatccttagttgataatcacataagatcttcctttttccccctttctttttaatttgcaagaaaagagagggagaaagagtttggtgggtggtgttcatgttgtatgtgtgtatgtaggtaggtggggttttgggatgtgatttggcttgcagttggggatttgaaatggaattagccaatgactgcaaatgctcaccatggttaacaaagctaaatctcaacgattttgggggtggctaccttgtccttgtcttccattaagcttcatctagggtcatatcctttgttaaattaaaaactatcatgtactttctcattgctttaatgcagtttctcctttgtgctctctctctctctctctcatccttctagaacctttgacttgatttaaatcatttgattccctcctaagagccacatatatttgtctacaatcaagcaagtgagctaaggtttcaatcttttaaggtttaaggagaggaacgaggaataaaaaatcatggtaacagacaaaagtaaaataaaaaataaagaaagaaagataaaaaagaagagatagaattttagaatctcactaaggccttctaggaatctcacttagaaaaaaatcaatggaatctcaccattgagaattgtaaggtatacaaataaaatttaatgttattgataattgttgaaatttggcattcaaagttagggttttaatttaagaaagtattttaggaataaaaaaggagagatcatttaggatatttccttaggattcagtttcctaattttaggagagaatcaagttagattgatattttcttattcagtcattttgtgtatatatatatgtgtatggtgtgtaccgaatatgaatcaataaaaaaaggaattcagaaattcttcatggtatcagagccagttttctgaaaccctaatcccttctggccgtctcttattcaggccatcattcattccggccaagtctctctggccatctctcattccggccatcagtccctattctcagagccaagggagaaaacgcttttcggtcggtcaaatcatcgtcagaaaacattcaccgccggcgacttttccggtaaacttttccggcgacgtctttttcccacatcgcaaggagcgcctggaggagatctccaatttttcccaaagcaccggagccagaaaaccacccacgcgccggccacacacgtttttccggccggcaactgcatctcacgcgccggcgcgtgagggcgcatgagccactttccggcgacgcgcttcctcctccaacctcgcctgacaccgactagccacccttcatacctgttctgccatccgagctctgcacgtgcctcttttggggttcttttgcctccgcgggccctccgaacagttttccggcgtcctccgactatttttttctcaaccccaatccctgcacgtgccttgggaagtgttcttttacctttccggtggtgccacggttgtttttcttttccattaggccggtatctctgattttctctctccaaccatattcggctgtcttcctcatctccatgacaaaatacggaatgacatcatcacaagtatccagcgtcacggcaccagaatcagggggcagttatgaaattccaaaccttggtggcagtgattcctctcctattctcatcataggacacaaattaaatggccataactatttacagtggtcacaatctgtgttgttgttcatttgcggtaaaggaaaggatgagtacctcactggagaagcagccatgccagaaactacagagccgggtttcaggaagtggaagattgaaaacagcatgatcatgtcatggcttatcaattccatgaacaatgacataggtgaaaattttttgttgtttgggactgcaaaggacatctgggatgcaaccaaagaaacttactcaagttctgaaaatacttcaaaactttttcaggttgaatcagccctacatgacttccgccaaggagagtagtcagttactcagtattataacacactcacaaggtattgacaacaacttgacttattcgagactcactcatggaaatgttcggatgatgcagcaacatacaggaaaattgtggaataaaagagactgttcaagtttttcctaggactaaacagggaattggatgatgttagaggtcgaatcatgggcattaaacccctgccaagtctcagggaggctttttcagaggttaggcgtgaagaaagtagaaagaaagtgatgatgggatccaaagagcaacctgccccaacattggatgcctctgcccttgctgctcggtcatttaatagtagtggtggagattgtcagaaacgggataggccttggtgtgattattgtaagaaaccagaccattataaggaggcttgctggaagcttcatggcaaaccggctgattggaaaccaaagccacggtctgacagagatggcagagcacacgtggctgccaactctgagagcacatctgttcccgagccgagtccattcaacaaagagcagatggagatgctacataaactattaagccaagttggcagtggcagtactaccgggatagccttcactgctaattgaggaggaatgaagccgtggatagtggacacaggtgcttctgatcacatgacaggagatgttgccattcttcaaaattacaagccaagtaatggtcattcatccgtccatattgctgatggttcaaagtaaaaaattgccgggacaggttccataaaacttactaaagacttgtatcttgagtctgtccttcatgttccaaacttggattgtaatcttttgtccattagcaaattggcccgtgatctccaatgtgttactaaattttatccaaactcgtgtgtttttcaggacttgaaatcggggaagatgattggcagtgctgaactgtgttccgggctctacctcctcccatgtggccaattctcaaaccaaatctctcaagcaagttgcgtacagtctcagagtatgttagagtctttcaattctgtgtcaaattctaacgtcaataaagatagtgagattataatgttacactatcgccttggtcatcctagctttgtttaccttgcaaaattgtttcccaaattatttatcaataaaaatccagcatcttatcactgtgaaatttgtcagtttgcaaagcatactcgaacagtatatcctcaaatcccatacaaacctttgactgttttctctttagtacatagtgatgtgtggggtccctcacggataaaaaatatttctggcactcgatggtttgtgacattcgttgatgatcatacacgggtaacatgggttttccttatgaaagaaaagtcaaaggtggggcacatttttcaaaccttcaattttatggttcaaaatcaatttaattccaaaattcaagtcctcaagtcagataatgcaaaggaatattttgctagtagtctcggtacttatcttcaaaatcacggcattatccacataagttcttgcgttgacatcccacaacaaaatggggtggctgaacgcaagaatagacatctcttggaggttgcccggtgccttatgttttcctctaatgttccaaactatttctggggggaagccaatctcatagctacctatttgattaaccgtatgccatccagagtgcttacctttcaatccccacgtcaacttctcttaaaaaaattccctcacacctgtacagcctcttctgatttaccactcaaagtatttggttgcacgacattcgttcatgtgtatcctcaaaattgtagcaaatttgctcctcgagccaataagtgcattttcctagggtattctccaacccaaaaagggtacagatgttattctccaaccaacaaaagattttacaccaccatggacgtctctttctttgaacatgtcttcttctatcccaaatctcatgttcagggggagagcatgaatggacatcaagtttgggagtctcttcttaaggctgtaccttttactcacttagagtcaccaaatcctttccaatccgcgccccctgagttgtccacacccatgccgtcatcagtccagccagcccagcccacaaatgttccttctcccgtgaccatccagtttcccatgcctattcaacctatagccccacaacttgctaatgagaacttacaagtttacatcaagaggaggaaaagacaggaattagagcacggatcacagccaacatgtggccaatatattgactccatttcaagtctacctgaagagaacataggtgaggatagggctggagaggtgttaattcccagcattgatgattctactctgccgattgcattgaggaagggtgttagaagatgtacagatcatccaattgggaattatgttacgtatgaagggctatcaccatcttacagagcatttgctacttctcttgatgatacttaggttcccaacacaatacaagatgcattcaaaatttcagaatggaagaaggcagtacaagatgagattgatgcacttgagaagaatgggacatggactatcacagatttgccggttgggaagaggcccgtggggtgcaagtggattttcaccataaaatacaaagcagatggattagtcaagagattcaaggctcgtttggtagctaaagggtttacacaatcctatgggatagactatcaggagacttttgctcctgttgcaaaactgaacactatcaggattcttctctcattggctgtcaatcaagattggtgcttgcaacaactggacataaaaaatgcgtttctaaatggtgacctagaagaggaagtctacatggaaataccacctggtttcgaaggaagtatgacaaagaattaggtttgcaaactccaaaaatccttgtacggccttgaacaatctccccgagcctggtttgatagattcacaaaggcagtcttaaagctgggctacaaacaaggtcaggctgatcatactctatttgtcaagaagtctcatgccgggaaaatggccatattgatagtctatgtcgatgatattattctatctgggaatgatatggaggaatgacagaatttgaagaagtatttttcagaagagtttgaagttaaagaccttggaaatttgaaatatttccttggtatggaagtggctagatcaaggaagggaattgtagtctctcaaagaaaatacatactcgatcttcttaaggagaccggtatgcttggatgcaaaccaattaatactcctatggatagtcagaagaaacttggtatcgagaaagagagcacaccggtagacagggggagatatcagcgactcgtcgggcgcttgatttatctcacacactcggccagatattggctttgcagtgaatgctgtaagtcaattcatgcacagccccactgaggaacacatggaagcagtttataggattcttagatatttaaaaatgacaccagggaaaggtctattcttcagaaagacagagaatcgtgacactgaagtatactcagatgcggattaggcaggaaacatcattgataggcggtccacttctggatactgttcttttgtctggggaaatcttgttacctggaggagtaagaagcaatcagttgtagccagaaatagtgcagaagctgagtatagagcactagcacaaggaatctgtgaagggatttggataaaaagggttcttagtgaactgggacaaacgaattcatctccgattctgatgatgtgtgataatcaggcaactataagcatagcaaagaaccccgtgcatcatgacaggaccaagcacgttgagattgacagacacttcatcatagagaaggtgactagtgagacggttaaattgaactacgttcctaccaagcaccaaaccgcagacatcctcaccaaagctttacctacgcctaacttcgaagacttaacttgcaagctgggattatatgatatatattctccagcttgagggggagtgttgaaatttggcattcaaagttagggttttaatttaggaaagtattttaggaataaaaaaggagagatcatttaggatatttccttgggattcagtttcctaattttaggagagaatcaagctagattgatattttcttatttagtcattttgtgtatatatatgtgtatggtgtgtaccgaatatgaatcaatagaaaaaggaattcagaaattcttcaataattaatacttaaccttgttttacatcaattaaccttatttataggctttagaaaacataagaatttgaaaaaaactatgaaaagtaaacataacctatgtagtaactaattaggacttctattcatttcctagagctattaaatcttctaaaaaaattgaaaaaattagaaacttactctattgaaacttcttgttgtaataaagtttctaatgaagaagacttttagattgtaaggattcaaaataaaaaccttatgataaaaatattattttagaaaataaaaagtttagaactcctcccccatgaggaggaggagaccagtgaccatctatttttggtttgtattaaggctagaatgttgtggaatgttatctttgccctttttagtgtgcattgggttttgcattcctctgtgagggggaacttgcttgggtggcatggaagctttgtgggtaaaagaagggagaagacgtggagggctgtacctttatgcttagtgtggactttatggaaggaaatgaatgggagagcgttcaataatgtcgaatggttcaatcaagctatcaaatattttttttttggtataattttgtgaattgggttagggtgtatatagaagatcacactttgtctatgattgacttaaggggatggcttacttgttcctttgctgcctagttttttgggcatttctttgtatacatcgtgtgtattgtttttgccatttctaggcatttctaatgcaagctcttatttacccattaggaaaaaaaaaaaaattacaactcttaaagagaattaaaaaattcccaaattctaaataaaactcaaatatcaattactaactaatcatgacacctaaaaactataaaattatctaaatacccttagtaaagtaatttaggatttatttgtttattcttttcttgagtagatcttgaagattcgttgttattaattctccccaacttcgaaaaaactcaacctcgagttttcttgactttccatggtccatggaaatttcgcgcaatgcctttctttcttcatcaacctacacaaatgaattgataattcttaacaaataacttttcattcaagttttgttaacgtattactagatgcaaccaccaactgagatctttcaagtgtgcatgaagtttattatttgccatgatgaataggatctcaagatctctttatcttgtttaattttatgcaaacaaacaccaagctcccaaggattttcctatactgtgagacaagttagtagttcttgaaataattatgtgtactcaataatctaatagcaagtcccttcccatgctcttcttgtaaccaaggatgaaaatatcgataatcatggatatattggtatttcgattttacggatatatcggatatgtcggagatatatcggcggatattttggaaaaaaatatcggtaggcttaaaattgttaaaaactcgtgaaaatgtaaggaaaacctcataataatataattagaagtataatagacattttaaagttattttattgaaaaatttgatatatgtataacatgatttatcatatttaataataatattgtatgcatcgataaaaatatgaattttataagtgtacatttattattaaattacatctaatattatgatatttgattataatatgtctaattttaaaatatatattaatattaaaattatgatccatttaattcaattgtattaaacaatgtaaaataaattatgatatatatatatatatatataattttttaatatttaattaattagtaatgatattaaaaacattatgaagaaaattatataatttttatatttttggtaatcaattaaaagaaaattttgcatttaattataaaataattataattaatttgtcctttaaaatattcttttaatgttttctttatataatgagtttaagtatatataagtttagtgcacaatatataacaagggcaagtttgcccggatggcaagtggagtgaaaaaggtttggggttcaaatcctctcagaagcaaaaggagaaggcactgtagtggcactatagcacattgacttcattgtagcgcgtttgacttccgttgaccatgcgatatatcgggaaaaatcgtcgatttatcgccaaaatcgccgatatatcgcgagatattgccgatttctcgggatttatcccgaaatatcaccggactgatatttctctatgaaatatcgtgtcgataacctccgatacacaatatatcggtgatatattgccgacatatcgcgatattttcctccttgcttgtaacctatattccagaagaataaaattcttaagttctctaacttcaaaacaagtttcaacaatccttattattccttcttaagattcttcatttttgctaccaatcataaaactcctttgctttggaaagtcaagcacaaacttgactcgaacttttacaactcttgaaatgtaaacaattggcatatgagttatgaatgcacactcttcaatattggcaattaaaaaccatgttcagacttgtgtaaacttgcttggtgcattggttaattcaaagattatgactaattattcatataactcatctttcccaagggatagaactctataaaaacttgaccttgcttgaataaagtctttagtagactacttattagcttgtcctttagagtccatgttctccttgtggtgtgtatggtaggcatgtaaatttgggaaagaagaatttggaagtggatcaatagcacattgtaggtttcacatagctaatgactcctttgataccatgggaattgtgttactagaatcaaccaatatctattgcacttttttgatctcttttatagtttgttttgggatcgattccattatatcttgcattctcgattcatcattgacagcttcttcctcattacttacaacttcaaattgcttcttaacgggagtatttgctgattcttttggtcctaagcttggtgatttctccacttgttgcttagattgtggaatttcctgcattaaacaaagaatttttgtacacccattatgcacaagtgtataagtattctcatggctatcatattttatcagaaggccaagaccttccaagcataatatgagcaacttttatcggcaaaacatcacaccataccatttgtttaaaattattactaacaaggaatataaacaaataacaggaacttcccagatcagatacatcattcacttgtgctacttgatatggatttgaatccttttccgtttttagattaagcttttgaacaagttcttgtgaaactatatttgaatgacttcctccatcaataattaaggtgcatagtcttccttgagaagaaacacgagtacggaagatattagttcattgctaatctcttccacttttgctattggagcaaccgatagatggtgcacctacaaggttataactttcagttaaggcatcacaataaccaccttctcctccacgttactctttgctgtggctctcagcttcctttagatcggcttcagattcaagttctgatttttcaatacaaaagtataatctttcatttggacaaataatagcataatgatcatgttccccacacgtgaggcataatggaactgtaccaacccttttttctacaacacccattggagttttcccttgttaacctctcttttagctgcatttatagattgttgatggctgcctccattcacatgatgagtgttggtatttgttgtacttagaggtttgcttgttggctgattagaaaaagacctcccactttgtgacttcaatgtctagaagctcaaaaattgagtgattcttcaaattgaaggactggttgatgagcatcatctctggtgtaagtctgtgctatcatcatctcaagttgaatctccattcaaagtttagctttgtggcaagctataatttgagcctcattttcccttttcccttattgattttgaatactcaactcatgaaattcttctttgtattcttcaactgatttattaccttgtttgaggttaaacattttggtgtacaagagttgttcatgatcaattggaataaaacactctttcatccttaacttcatgtcattttatgtgtttataagtggttggttggttctattgacttgatctttagtactatgccatcataaacatgttgtatcttttaattttgcgttcacaaaatgaaccttgacattttaagacagcatactaattgaagttatcatccaattacttttaaaaaaactcaatgcatacctttttttgtcacatcatgatcttgctcaaagtttttgagtctttccatgtctatattatgatggatgtctcttattctgacccttgattgattacacatcataaaattacctcgctcaattgggtgattggtcatactaacgactcccatcgcctttgtcattggattgtttttctttacttctttccaacagtctcactatcttatctagccggttgagttttatgatgacttgtttttaggattattgtgtagcaaaaatttcttccaaatgtgttgaagtaacatcatgattaggactcttggaactcatgcttgaataaattttttttttgataagtaaaaagaaagtatattaatcaaaaagaggaaacaccaaaaagccagtgccctcgaagtatacaagggagtatacacaccactttccctaactaggagcctatccagtctaaaaaacttacaagagaaggactctctactaaggaaaccttgacccaagaccaaagattacatacaaaagaatatttcaacttttgaagcgagagttcttcattcccaaacgctattctattcctctccttctagattgaccaaaaaatacatagaggagccatttgccaagccctcttacgccttttccccacaaaccctccattccatccaagaagggttgccttcattgtacacgaaagagtctaagatacaccaaaacgggagaaaagaaggttccacaggacccgcgtcttgacacaatgaagtaagagatgatccaccgtttctgcttcggatagacaaagaaagcacctatttgccaaagagaaccccctcctttgaagttgctccaaagttaagactttaccccaggaagcctcctaagcaaagaaagctacctttggaggcactcttaccctccaaattctttcactagggaacatagaagaagagctccccctctccaacatagaataaagagacttaattgtgaaagcaccatcatttgaagctgtccaaatcactctatcttcctcttccctttgaaccctgaatgtatggatcttctgcaacaaacgctccaccaaatcgatctcccaatcattaaacgcccttgcaaaaagaggagtccaatcatccccatctccaatggggttccaaacctccgaaacccaagcattcttagactatggagaaaagagaggagaaggactcacaaagtggcccatctccgtaccacttgtctttccagaatctcactctttgcccattacccacatggtaagctaacctaccatctaacagccaccacttcttcctgattgctttccaaagcccaacaccatttctcccaattacatcccgagtacgccatccctcctcctcttcgccatacttgaggctaattacatggctccacaatgcctctctctcattagcatacctccaattccacttgcacaaaagagcactattcatcaaagctaaatttctcacacctagcccacctttctttttttccaagcaaaccaagttccatttgacaagtcaagactccttgcatgcacattcaagtcaagaactttcactcttatactaaaactgatataagacaaataaaatattgtctacaatcaaataggtgggctagagttttaaaagaggaacaaagaacaaaatattatggcaatagataaaagtaataaaatatcaagaaagaaagagaaaagaagaagaaatggagctatagaatctcattgaagccttctagaaatctctcctagaagaaaattaatagaatctcaccattgagaattgaaaggtatgctcagaaaaaattaatgttattaatcatcaatatttaaccttgttttatatcaattagccttatttataggctttaaaaaagcactagaatttgaataaaactatgaaacgtaaactatgtagtaactaattaggacttattcatttcttagaactattaaatctcctaaaagaattaaaagaaattggaaactccttttttcaatcaagaacttactttgttgaaacttcttgcaatgaagtttctaataaagaagaccctaagattcaaggactcaaaataaaaattttatgataaaagattattttagaaaataaaaagtttttaacttattttaaatagaattaaacaaatttccaaattctaaataaacctcaaatatcaattactaactaattacgacacctaaaaaaattgtaaaattacctaaatatctttgatgatgtaatttatgattgttttattcatttattcctttcttgagtacatgttgcagtttcatcctcatcaccattggcctccctgcacatgtctttactatcttgtatggttctcctcattttgtccagttggtgccaccaataggctatcagatacatcaatttcttgtttgtcaatgttttcttttcgaaaacccatgatattgtctcacgggggactaatcatatgctttttctaagtcaataaaattatgtgaagacctaaaccctaaattccaagccttaagccccaaacatgttcagtcaactacctaattaatcccactcttgatatcctgagtttattttgcacatttggtcaacttttctatatcttgacaggt

SEQ ID NO: 11652 - DNA, 3541 bp, Vitis vinifera
  Intron number 1 from transcript GSVIVT01027063001 (locus G SVIVG01027063001) derived from phytozome v7.0 (chr-ID chr1 5; pos 18224070 to 18227610 reverse strand)
gagccctagtcgtgtggctgcttctccattcttcagtgtccattctcaagatgaccctttctctttcttacctcaagggtttgtagatagaaccaaagggcggggcctcttggtgtcatcctgggcaccacaggctcaaattcttagccacgcatccaccggagggttcttgtcacattgcgggtggaactccactctcgagagcgttgcctgcggtgtccccatgatcgcttggccgctctacgccgagcaaaaaatgaacgcaataacattaaccaacggcttaaaagtggcattgaggccaaaagttaacgaaaatggtctaatcgatcgtaatgaaattgcccaaattgttaagggtctgatggaagaggaagaaggaaaggatgtacgcagtcgaatgaaggaccttaaggacgccgccgcaaaagttttgagccctgatgggtcttctacaaaggcactcgcaaccgtggctcaaaaatggaaggctcacaaaaattattagaaaattttttttttttccttgtgtaattctatttatatgtcctgattttttaggtacctatacattaggttttgtttgtatatcttcttgctgttttaaattatatgtatattttattgaattgtagcaggtgagttgagtggacccaactagtaattcaattaatgaagcagtcatcaaattctagaatttgggacgaaatagtatacttgctgttgaatcaccaacttaaattacagcctggatcagaacctaggcgggtattaattggaagtgttttgggccagggcctgggttagcagttcgagttgtgcccaaacctttactcctttcttcctggcctatatgcttaggcccagtacaggtttagcccagtttgagggcttaaatttacttaaaccctaatgtttgatgtaaatacatccaatcattcaaatttcgtggattaacactcatataaatttataaaattaattttagaaatattttaaatgaaaaaaatttaagtagatgtatttaataattaaaaaaaaaaattatgtacgaaacacatttataggagtaactaacaaaatttgaaattaatggtggcttttgattgacaaaaacacttttagaaagtatttttgaggtaaacttatacatttggtagaaattaggaaacatttttaaaaagttgaaaaacatttgtactattttttggagaaacatttgatagatgattcttttaaaaacattttaaaaaacactttcaagaaaaagaccaccaaacgtactcttattgtaaatgaaattaacctttattttaatagtctaaatgattttaactaaagtatttttagtttggagtgtttttcaaaagtacttttgaaataaatcacttgataagtgatttttaaagaatcatttcaagtgattcttcataattataaaaatgatattaaaaaatttattacatatttaagagtgcgtttgattgtgattttatgaagtatttttaatctttataacatttgaaaattttcatactttaagtattaaaaatattagaaacacttcatacgatcactgtcaaacgcactttaattttcacaagaaaaaacttcaaaacattagaaaaatatttctctctcaaaatcacttccaaaagggctataacttattagatttgagaaaacaactcttcttctagcttttcttctttcattcaaaatttaatttgatcgtaaataaaaataacaccgtcagtgactagagtgaactcacataaggcttatgggagtaaatgaacccctcgagattttggaaaacaaatcttcattaataaggatttgattctttgcctttaggtttacgactatcacaaaactatgtagttgatttttgctttttacctttttttattccaaaataaattattattcttgtcatttcaacttattttctaactcccacaccaatagtaattatgggcaaatttaattattaaaagtagttggtccaacaattaacttactcatattaattatctattcataatgtgacaaatttattaatctaaaaaattatagccattcgatttagtcaagatctgaaaaatacaaatattttccaaaataaaatatttaaaaaaaaattaaaaattttgacaccctaagacccctacaccccaaactcagtacaactcttctgaggacaacccaataatggggcccaacccaaaattattttccgcgtaggtctaaaacggaataaacgcggggaccatataacctagattaaacacctacattaatattattattacttttttggatttagttaagatatggcatgatacggagagatgtttttgaaaataaaataataaaaacaattaaaaatattttttttccaacattttttaagcactttattacaagttatgctcttatacgtggactccataaagggtcgtagactttatttgataaaagaaaaaaaaattattaattgtctaaaatattttgtagcatggtagcatccaatcaataagacaactcaatattatcttgtcttgtggaaattggcgctacgacttcacatgcttttgacattaataagacaaaaataaattattattaatttatttttcatcgaaaccacgttttttgtgataaataatatttatcgaactactatgtggactccccttttttttagatcattggattatttatttatttatttatttattatcattgttttattacattttaatagttttttattttaatttttcctgccacctttaaggagcacccgggaggaattggacatcatttcgttttggagtgggggacgatttctagaaaacgagttgcatgggacatatgcccaccttgccatagtggtggttgaaaatggggacttgttaaagggtcagtaatggagccgttagaagctcgcaaaggaagctaggagaggcggataaacaaaaaaaaaaaaaaaagagcaagcgagagaagaagaaggttgttcacaggtgggagatttttcgaaggttttgagagaaaaaaagagttgtaaggggaaggagctggagtaaggaaatttggaactgaagaagaagtagaggaggggctcaccggttttgtccaggtatgattacaacatgctccatatttctctacttcacattgttatgtcctacctcctattgattttgagttcattttgatgctcgattgtggacactatatgttgtgcctgtttgtggaatctgcgattttttttttttacttttactgtattttatgtctagttttggccctctttcttcggctctgttttggttctcctttgagatgcctaatcatgtttttatctccatttaaaatgcatttggtgctgaggaagtgaaccatacaatgcatcccaaggggaaggttgatcaagagctccctctcatcctcaatgttgaaacacgtcaagctcatgcccacatcctcaagactagactcttcaacgatacccatctcgccaccaaatttc

SEQ ID NO: 11653 - DNA, 7920 bp, Vitis vinifera
  Intron number 4 from transcript GSVIVT01025672001 (locus G SVIVG01025672001) derived from phytozome v7.0 (chr-ID chr8 ; pos 13045647 to 13053566 reverse strand)
gttgtgttaatagcaggcaaggcctgaacttgattatcaccttaacacttttttataaatggataattgttgattgtgctcttgtgagttggtaattttgaattgtctgtaatgtgctctgctgacaagtatatctattggatatgggccctatggcactttcaagtccttagtccttacagttgtattgatctgacaagtacttgagttttgttgagcttgcttaatcaattttgttaatttttttaatgttcaattcttcacttatacagctttttgacaaggaatcactagtattgagaaagcataattctccccatgttaagacacttttggggaattacttgcaaataaccagttattcacaaatatttaagtaaaaataatttttttaaaagattgaacgactatagttctcttttctatttcttaatgctcttttttaaacaaaatatccttttgtagcttaggtctctaatattataacaaaatactctctatatgtatgtcgtcatttttcaaaggcaatattatcttaaaatgttgaggatgaagaatgatcatcaaggatacattcggagcaagatataagtacatctatccttaaaatttggatagataaactgaaggtatattcattgtacaagagaggcaaaactcagggtatttttagatatatgaagagacttgaagtgtttatgtctaattaatgggctattcaagtaatttagctaattggatgtgaagaaagttgaattatattcatgcgaatatatgcagctttatgaaaccattctaggaaattatcaaatcagtttagccactcttctaggaatttacagcctacatatcagcctgtatatttacaataataatacaagtaggaaagaactataataagagataaaatcccctaaaataggaacgactttcaacacccctcttgaagctgactcgaaaatatttttcattctcagcttgcctggaacaaactgaaatgtaaaactcgacgacccttttttgagaaaatctgcaagttgatcctttgaagcaacatatggaatacgaatctctttgctctctaatttttccttgatgaaatgttgatctatttccactcatttagttcaattatgatggatttctatgggcaatgcatatggctaacttgtcacgatataacttcatagaaccttctagttccattcctagattagagagcatcatccctatccaaagtagctcacaaatacctttagccattgatttgaattcaacttcggcacttgatatgactaacacctattgttccttacatctccatgtgacaagattccatgtgaatctccttgtccaaatctgcatccaaaaaaaaaaaaaaaaacattttttttacatcaaattaatgcaaggtacaatttagattattagctagagaaattaaatgtgaagattcaattacaacttataggctttttccttctaggtaaatctactatctcccaagttttattcttctttaaggatctcatttcttccaacatatcttccttccaattcaaattgctaagggcctctttgacactttttggaatttctatggtggagaattgagggataaaagaattaagagcgggagataatttatgatttgacagaaaattggataaggtatttagtacgtgtttttttttgttttcccaagtgtaataggaagaaattgaaagcacttgagtcaattcaagtggaatcaacattacttggttctagttccaatggttgagcgtgcataggctccatgataagctttttcttccttgagtagaccttgagtgaaggtggcttatcttaggctttatatggcaagtccacctttggaataataggctcagatttggtttctgaactgggagatgaaatgggagattcttgtatgggtgatgacttggaggaaatcagaatatggatttggtagagactctattaatacaggcagaatatattgagtatccttaattttcaacgaaattggcatccatggtgacataaatcctttttgtaagaggatgatggcatttgtactctttctatttaggtgagtagccaaggaaagcacacttaagagctctaggatcaagttttgtttatgctggcaataaatatgaataaaagcgacacactcgaacacttgaggaggaagattctaaaagtttctaaatgaagggaataagtgactcaaaaattccaatggagtttaaaaatcaagaactctagagagtaacctatttattaaatgagtggttgtaaaaatagcttcccttgataaaaaattccaatgtggtttgaaaattgagaactctagagagtaacctatttattaaatgagtggttatcaaaatatcttccccccagtatgtttttgggactttcatttggaaaagtagagttctagcaacctcaagtatacatatttgtttttcctctcaatgaccccttttttttatggagtatcaatacatgaagattcttgaacaatccattctttttggcaataagaaatcaactaattattcaaatatttcattccattatctaaacgaagaatgtggacttttgttctaaactgattgcaaatcatcttatgaaaaataggcaagattttattagcctcaaatttgtgtttgagtggataaatccttgtcaccctcgtacaatcatcaataaatgacataaactatcttgcaccagagatattaggagttctatatttttcccatatatcagtatgaatgagactaaaaggcaccaacgatctttcatttattgattagaaagtagttccatgatgtttaatcattttacaaacctcatgatgaaagtgcattttattgaaatcaaaagagggaggaaaggggaaggggtgctcttttaaaccatgcttcctttgcagaggtattgaacagaggtaagaggaagatgggtgaggcaatgcagattgagagcaagatagaggaggtttgagcaacttggtgtctctcaagaagtgtttggtggggaggtgggatgttctttcaagtcgttttccagattcagactcgttgaaatcttaagctcaacattcttagggtttaaaaggtgaattacatttgtgtttgttgggagaccctctcattttatttgagtttgaagatgcttttgaagctgaaaaggttttgcttttggggcctattatgttcgagggaagaaaactgcagctggaatggtggaggctagatgttggttgcttcaaagaaggtgcttgcatcaatgaagtgtgggtaagggtgttgggtttactggtgcatttgcggggaaaagattacttcaagagactacgagatgcctatagaggttttgttaaagtggatgtggagatagaggagaggtgtcacctgaaatgggctagattactcataaaatcttctgggaggaagggctaagccaattgcttatggtggacagggaaggacgtttttgtcttccaattatggtgggaagtatcgccatggttgtcgagggtggtctctaaggagagttccaactttccaaaagtcagggatgaaagggagggaagtacaaacgcagtagggagtgtgaagtagaacaaagggaaatgagctgatgaagttttagaagtggtaggtgtagagcaaggcctctcaatgcaagcaacgaggaaggcaactttttcaaacaaagccaaaagctctatttgtgagaatcttgggtcctcttatgggctagtgggtccttggcctttagaaatcaaagttgcaggtgaagggagcccatgcaactccttgggccaacccattgtggatgcctttagcctatatggaggaagcctagctaggcaagccatgtttgggttgtgtcttttattcctttcagagggccaacccaaaggtttgtcctctagtctgtttaatgagagtttgagaccaccaattggtggagatcgagcattttgatgatccccttctaaagaagacgacttagggacaatcagagtgggtcttggtagttgatgaagcccttttcacaaaagcaacaggttttgaaggtaggcttccatccccctttctcctcctcactctctagttggtttgctcattctcaacagttggatcgctcattttcagccactgaggatgatgctccaagatgaaaggatgttggatcttacaaggagtgtagcaaagggtctcatggattaggagttggtggtcaaggttaatgggttggagaatcccaaggccatcaaggctggtagcggttcgacaggggaggagcttatttatgaaaaaattacttgtaagtttgccaagttcaataacattttggggatactagtggtgggttttgaaaatgaaattaactcttttccaaggaaaatggaggcaagaaaagggtgtagggtgaagatcccagggggaaagaggaaaacgttttcgtcttccaatgttgagagggaaatccaaaaactagaatgtttggttaattacaatagctctcctctcttggtgagggggaaaaaggggtttccgggggggaggggggatggtgtttaagccttcttaccgcgaggacgctttttctttcttagcttggttgagggtttttgtttgcaaaagtgttcaagggtgtttttttttctttctcaatctttagggtgtagtgatttagttgttgttagggttgtttgtatttgctctccttttctttctttgcttgccttttggccataattgtatactttgtgtgtactttgttgcgccattttgtaggcacttttaatatattttcttaatttacttttcaaaaaaaaataaaaaaaaatccttgaccagagacataacacccattatggtcagctgtagaaacttttttatttcctgcacaaaatatatagttggagaaaaaatgggaaggtccagtcatgtggtttgtggctcctgaatcagtgatctaggggtgagaataacaatctaaaaataaaattaagcttttagaaatgtcaccttgttgaacataggagcacatagatgtgggagtgcttatttggtctagtaaggcctttaaatttttccagttgttcattctgcaaactcttttttggataaataaagcatgatatattaaaaataaaagacacatgcaaagtgcctgaaagtacatgggacattcatcctgcaaactcttaactgcgtgtagaagtttcttccttcttttactccattgtaaaaacccaattttgtatatgaccgcttctgtcattttccaccatttttcttgatggaaaagggctttccatgaaacttccaacaggtttctcatgtgtgtcaaggtttgttgcaaaaatcatatcaccttgtgtccttttaatttgatctccttccttcttgcttctcagctgcagaatagttattggatttgtgaattatgggagctgaattctccattgatggtttttctaatatcagaatccgatgactcttttctgtatacactagggcaaatacctccttcaatgaggggaaaggttctttgcctagaacttgaaccctttcttgatctggtccaggttttaaaccagctaggaaggcaaaaaccctgtcatgttcaatcatctttttgcagttgtacaacatcagcagcagattccattgtgaattgttgatagtggtccaattctagtcataatccttccaacatattgtaatactctgtcacagataacaacgtttacttcatagtgtaatgctgattcttcaagtcataaacttgagcctttatctccaccttggaatatgaacgagtcacaacatctcatatctccttagccattaaaaggaagagaagtggtttgctgatttcaggttgcatggaatggagcagccaagacatgattatggaattttcagctttccatgccttaaacttaggatcatctcccctgacaaatagcccatcttcctcatgcttttggtgaataacttggcaaattgcgaccatttaagaaaattgtggccattgagttttcaggttgtcatttgtgaactagagtggtgtttataggttgggtagttgttaaggccgtgactgtggtttagcaagaagatgactcggcattattatgaacaaggtgatgaacaacaatgagggctgtagaacaggatgtttggagattaacaccataggttgatgtaggaaaattttctagataacaaaatcctgaaatctgagagagctactaggcaattgagaccaagttttcaaagggaaaatataattaagacaaagcaaggagaagaaaaggtacagcaatagggtgatgtaggccaccaaattccggaaaataatagaccagaaaaaacaaatctagagcagaactctaacccactctgatactatataaagaaatttgaatttcatgcatactaatattgggataacagcagggatacatacacacactcacatatatatatgtctctctatgaaactattctaagaaactatcaaatcagcctagctactattctaggagaaattataacctaaatatcagcctccatgttacaacaataatactattagaaaagtactataatagaaaactaaaatcccttgaaataatgaacgactttcaacattaagtactcttttcaataagaattaaattatgattctcagaaggcttggcaatctgcagttgattgaggtgtatctcttatagataagaggtgtgcccttgaggcctaactcaggtggtaaaggggtgggagggttcgtgggggtaccaggttcaagtcccagtggggacaaaaatttgcctatcaaaaaaaataaataaataaaacaaaaaaaaaatgaaaaacataagacaaaagaaaaagataagaggtgtagttgtaaaaagaagatggatggaaaactatctctgatgaagcaagttgtttctattttgtttcttatattctatggacagtgttggcatgtaattttctgtttctgattctcatttcctttgtaacaaaaattggaagacagtaggcacagaatcccaccaatagtaaattcatattgctgtggcaagtttgaatgagtgtgttcctgcttttcagaccttccctgatgaagtcctcccagtttgcagataggcaaagcagccaaaccactgactttggcatgactatgttgtgattgctgcaagtcaaattggccttctctaatcaggttgtggcttgtggacctatgcacttcaaagaggaaagacataaaggcccaagctgctggctcagtgaacctttagccatctttatgtctaaattagcccttgcttggttctggtgatttgcgctgctaccctagttcgacctcaactcatgctattcctccaattttcccttagcatttatgttgaactttgcagatattaagttactcattttgtatgggattgaaaattaattatcttaaataatgaagaattctctccagatacttggaatgataatctttaggtattctagatctactgggaacaagctaaaggataggcatctgaaagcttactctaactgtattaaaacttaagtcttagctccaaacttggttagaactttgaagtgttgataaagttatcctgtgccttctcacaataaataaataaataccttcattaatcccctttggaaaaagaaaaaccattcatataacttataaatgacagctcgtatatcctgtgtaggtcttatttttctgaataaggactttcagatgcattcagttccatgcaagtagaagtttaatatttagttagtaggtttaaccaagtaaactacttcttgtttttaatagccgttgtactagcattgc

SEQ ID NO: 11654 - DNA, 6103 bp, Vitis vinifera
  Intron number 1 from transcript GSVIVT01000060001 (locus G SVIVG01000060001) derived from phytozome v7.0 (chr-ID chr1 4; pos 3160699 to 3166801 reverse strand)
tggacgataacaatctgactggaagcattcctgctgtactaggccaaatgacaaacttgacatacctttgtttctctgagaacagcctcactggagctatacactatagggaaaaagatatatggtgacatttataacgagttaccataaacatagggtgtcactacaacatagcgtcaccttctccactgataccatagagggtaccaattggtaacgtatttggaagtgacaccaaagtagataaatggtgacccattcggaagtgacaccatatatttctagtgatgagagggtatcgcattaaatgcatcatctttgaattataatgtcatattaaatgcatcacctttgagtaatggtgtcacatcattgtaaattattgtggaagatatgattgcttttagttataaatttttgtaatgcttatgaattaataagtaagattaacctatttattttttgtccataaatataacaataatattatatttaactcatttttctgtaatgtttctagaataactcataatacattgatcatctaataatatttgtatatcaaatgttcacaaaaagatagtacatccaacatatcaaacccatcaaaactaaaaaaagaagagtgaatacataccaaaacatgatttagaaatgttaaagatcccaagattcatgtatacctccaattcataagcataaaaccggctaactataaaatgacataaaagtcccatctaaaaatctaaatttctcagtactaattaaattaacatttatgtcctacaacgtatgacataagagttgcatttaaaaacccaaaatcttgttgccttcttctttctttttattctccattccaccatcccaaaagtgtatacttgcatttcatagtttaatgagttttatagatttttattgaagaaaataaacatggatcgatgttatcataaatgaaaaaaatctaagaactatttttttttctttttttttttcaaatagaaacattattcaaagaacctatggaaaaattcatgtagtagctaaaggactcaccatgcatggtgatcatgatgcatcaacatgattcatgattagttgtagcacaaaagtagcccatttttctctaatttcatcgaattctacttgagaatatgtttttttatcaccaaactgaaatcaaataagaaaataacattaaaatgcataacatttggaagcctaaaactatgtacaattcattaaatttgtaatacctttgaagcaataattgtaggataaaaaattatctcttttatgaatctcataacaaagtagccacattcgaaccctccttcttgtcttggacactaatcgatcaattataaaataacattagtactcatatatataaatggtgcaaatgcataagctaatgtgtaaagaaaattttttggatgtcacctgcactagttgccaagatggctcccttttagatgttttctttgtagatattcgaagtgccctatgtaaataagttcaatgtgtttgagatgaatgtattttttataaaaaaaaaaaaataatactatgaaaaataataggaagaacttacatgtttacgatattctttaagtcctcaaatagtttgtgatgcatagggtcaagatagtggactatcattttccttggctcaatcaccaccaagacccaatgaaagctaaaacattaaaaacaaaagtagcgtctaattagaaatataaatcaatcataaaacctcaaattaaagtataatatttgtcacttactcagggttgtaaggtatgaaaacatatttagcatcttggcactccattaagcgttttgacaacaattgtgctcttttctctgtttgatgagtactaaggcttgctcgtgatattgtaaaaggattaacaaatataaattgtgattcctttttggcaatatgtagttgatcatgcatgtgcctattattgtatcaaaacaccaaaagaaaattatcattagtcatatccaatttcgttcaacatgggcaactcatatttaaaaaaataaaaacaaatgaaaataaaaggtgcacaccataaatagaaggagatgcagtttgatgacacctctaaagatgaaataatgtattcacaatcctctctagatatatatgtttgaaattcgacaccaaaaagtgaaatggggagctgtattgggtatgtcttgtcattaccaagacaaccatccacaaatttttgaaaatttttaatgaccgaatgattttgaggcttagattttcaaaaaattggtgtcttcactatcttcttctttcctttatccaacacctatgaaaaaggaaggaatgttagatatatatactcctaaacaataaaataccaagttacaatcaaatttactataggcataaaatgacatacctaaggatgttcagtttcaagtatgacaaggcttgttggccagtcaagctcaaagccaatagcatccccaacattgataatctcatatggatttggaaatgggagtctagcatctggcttgtgtgcagcatttattacaaccaacctattcgatcctttttcttctattagtgtaccagttggaacaacattttcttttctttccactgctaatttacatttaattaccttcaatacaacaaataatatcatttacataggctttatgtcacttatattaatcttgtattattagtaagtaaatgcataccttgtgtttcagtggtggttctggtggttggggctcttctatcattttaaacattggtttttctgctacaactagttgtaaaacaagttgttgtctcatgttattactacccatctcttttcgtaccatttcccatatttcttctttgatttttttcatgtcatcatatggttgatgaaagtatgagctaggcctaatcaatttaaggatatttctcttttgataaaagccatttcctattgtaatacaatatagtacttttaaaaaagatgtgtttagcattcctagattttatgtatcatgattaccaacaagaaaaggaaaaggttgaattatggaatattcgttctcaaaataaaagtaacttagatctgtaaaatctgaaagcatccaacatggcataccataaacctaatcaactataaataattaaaataaaataaaaatatgcaagttgcggtatttgtggcttttctatgtttttgtatggtgtcagaattttccaatttataaaacttgtaaaagacaaaacacaaaaatactacatcatatatacattgaacaatgcatgtatagtggttttgatttagagccaaccaataagagaaggttacgagtcatcttaagatgttatgttttcaaaattttaaagtttgaaataaagataatgattcattgaaaagtttcagccataaaatgaaaatatgcaagttgcggtatttgtggcttttctatgtttttgtatggtgtcagaattttccaatatatacaacttgtaaaagacaaaacacaaaaatgctacatcatatatacattgaacaatgcatgtatagtggttttgatttagagccaaccaataagagaaggttaccagtcatcttaagatgttatgttttcaaaaaaatttcaaaattttcaatttcaggttaattgttgcagcctttgttgtctagaaccaatgtagctggccacgtgtttccgttcaacaatattcagcaccgatgtagagatcgaaagccaaggtttgcgttgactaatgccatgtttcctggtcaactgaggtgacccgcctgttccaatacttctccagttctctctttattcacgcccatagattgatcttccctctagcaaaggctgttcaatcctacgcagtcccctgaaacatttgccacgcatagcgggattggttgaccgaagccttctatatttttgtctctttgtggagacttgtcttctaatatttatcttttctatatatatttatgttcatctccatgcacacatggattaagatatggacaaatacttagtggtggtgtcttggtggtacaagcaatatgacttttgaaggggccttcctatcacgtaaggtaccatttttggagcatcctattgggtcacgccctccttttatgaaggttgcaccaagccatcctaatcctactaggagactaacttttgagtcctagtttgcgtccgactcaagcttaacagatgacaaatttgagtaggactccaagtcctactgaatctaaaactctcatgccacatctctctatctccttatgcatgaagatttagttttctatcccgattaggagtcttctcatgtcaagagtccctttctcttcctgcaatattaggtctcaatctcccactttgactagaagtctcatgtgataggagtatgtctcatgcaataggagtcttgctcatgtgatgcatcagttcaccatgcttcctattgtaggagactacaccttgctcaagccatcccgatgccaagatgtgtctattcaaatctacctgcacatgactcatactgttgcatctaggaatggcaacggggcaggttcgggacgggtcgcccccatcccaaccccgccccgtttattaaaaataattcccatccccgtcccgtttaaaaaattaaacggggcagggcggggcggggcggggcaggtatgggaaattcccaaacccgccccgcccagccctgtttagcctcctttttaaaaaaaaaaaaaattgcttttaaaatttttaattacattaaaataaatatatttataaataataaaattattatattttttataatttattttattaatttttttttattatctatatattaaaaatagtaaaataaaattaattttaaaatttaaattaaattaaattaaattttaaaattgattttatatgtaaacggggcggggcggggcggggcggggcggggcggggcgggatggggcaatacccgaacccgccccgggtttaaaaaaaaaaatcttatacccgttaaaaacccatttattaaatttcaaccccatcccattaggggcggggcagggcgggtacccgaaaaaacccgccccgttgccatccctagttgcatctgtgcgtgttgggctcacacatcaaggcacaagaacaacaatgaattccattaactctaatggatgacctttggacccattccttaggatctgattggaacccacccagtcaaacagttgactccggtactaacaataacaggtttccgtcactaacagtaacagatttcctcatgcagattaatccaaagaatggatttgaagattctgtgaatataatggaacaaaagtaaccccccccccacaaaacagtgtggttgtcgttaagggctgatttggtctagcatggcagtatgagataaaattaatgcgtctggagtgaaattctatatctcattctcacttagatacaaacagaaaaatcattcttttttttttctctctcgttttttagaagggatgaagattatgtggcagtatatctcaaaaaaaaatctatacctatcattctcacacaaatacatattaaaaatcattcattttttcttgttttccacttgtttttatggagttgatcatgtgtttggttcagattaaaaaatcaattaatctacaggttttttcttctatgctagaactttaaacctaagtttttcttccttacaactcaaaaaaacacagttcataaaaaccataatacaaaaatgttgaaacaatgtaaacgtttggatcatgcagattgatattaaattggacctgcctccacctgattgtacattgctttatattctggttaagatctgtttactgactaatcctacgtaaatcaacatgtattggtgcaaccgcttgtcctcgaaagtgaaaaaagaaagaagaaaaaacttcccattgaagacttggtgagtttatgcaaagactaactcatcgactctggtctataaattaacatcttttccatgctaaatttcttatccccgcctaaagataaagattgtgattgttggaggcagtactctaac

SEQ ID NO: 11655 - DNA, 10416 bp, Vitis vinifera
  Intron number 5 from transcript GSVIVT01036270001 (locus G SVIVG01036270001) derived from phytozome v7.0 (chr-ID chr1 4; pos 7703892 to 7714307 reverse strand)
cttggagctgttgattcaggtcatatagaattgtttgccctctaattttagctttctgctagcttagtgggaaatgctgatggtttctttatagagatttatctggaagtgaattgctttctatttctagggggccatgttatattgcatttttttaatccatctaaatttttgtgcatatgtgattgtccttgatctttctagagagatagagagtgaaactgattgctattcctatccatacgctaaaaaactttcgactctctttggagtcgaaatcccttttataaaaatttttccttaaaaggttttcattttcctccaaaatacctagaaaaaattcagatgttctatgagtatatcttggtagatactgactgcatagaacagattataatcaacttttccttttgtcaataactccttttatcttggtagatactgactctatagaactctcccatatgccaggctatcattgagttgtatttaaaccagtggaaattcttgacaatcaaacattaaaactaaagaatacatcaaatgatcaacttctaaatgaactacaaaaactagtaaaactggatgtttcaaaaccctccacctcaaaaaatataaatacggtagaagacacttcaaaaatagaaataggaaaattaggaaatattttcaaagaacaacagtatgtgcaaattaatgagataaataccagtcatccaagatgtaagactaggaaccaattctttcaaatatccagtatgaagaaagaagccaatttactcaatcaaagtatggtgtagaaggaatatgtgaatggaatatagaatgctctttgtggcttagtttactgtcaattggattgtatactgggactatactcagattcaagttgttacttctccatttcgtccatatctaggtagagaattctagattaaatggtgatagattgtattctatatttgatatccatattattggagttgaagagtggtattgtttacaatccaaaagtaagaaattttctttgcaaagcccctcaagccacgcctaacattccaatgtccacatggtttgaaattgatgccctaaaaaacaatattttttttttttttttttgataagtaaaatatattcattcaaaaggcaagacgccacaaagtatacagggggtatacaaggcatctaagcctcaaaaacaacaaaaaaacacaaacccctccctttaagtggaagccatccactcaagaaatcctataagagagaacgcctcctcacctacatacagtttggcccagctccacaaattgcaaacaaaaaaattctttaacttctgaatattcaacaccccccccctaaatgctaatctattcctttccttccacaccgtccaaaaaatacacaacggaatggctttccaaatctttttccttttgtttcccacaaacgagcccctccaactaactaacacatcctttacagtttctgggaagacccatttcacatctactaaaccaaacactatatcccatagaactctgaccactgtacagtgtaagagaatatgatttacactttcttcctcacaaccacacagaaagcatcgatttggaagttgtaagcctcttctttgaagtctatccaaagtcagcaccctcccccacgtcgcctcccatgcaaaaaaacaaactttagttggcacccttgtcacccaaatgctttttgaaggaaagcctgtatcatcagatctcaccagcaaattataagcttcctttaccctgaagtgtgcccttctttctttactccacaggactgaggcttctaccccagagggtttgtggcccctcaaaacctgaagaaaatcccccaccaaccccatctcccaatcattgaaatccctcaagaaattaagattccaatttccgcgacccgaattttgatcccacatttcctcaaccgttgagttcctttgaaccgccatagcaaagagatgaggaaaacaatgggacaattgactatcctttttctaaaaaatcaataaatgttcaaataaaagggttaccaaatcttggatagctacgaatgatattgttattacttcagtatatagaagaaataaaacttaatgctcatactatggagataattaatttcttttaagaattgattgtaaaagtgttaaagaaattcttgaacgaggtgttgataatcttgtttcataacaattttttgctagatgacaagctattttatttgttttcaattttgtatgactcttttgtttttagcttgcctattgaagaatgagaaggtttagaagtgctcatctttttcctgtaaaaattctcttataagaaaatttgtaagtgaatttaatatgtttgaaatccacacttggtaagttgggcgatagtttgtttagataaaaggaaggggagcttgggtgtgaagtgtctttcaatgcttaacaaggttctcctttgcaaatggagttgacgttttgctgataaaaggggggtgctttggaaacaagttataagtgggaagtataggaagaagggaggtggcgttttcaagaagtgagtgatgggtatggtgttgggttatgaaaaaaaccatgaggaaggattgggatcttttgaatagtaggatttctttcttagtggcaagggttggagggtgaaattttagaaggacaagtagtgcggaatttcaccattgtgtgttttcttcccttcgttatttgccttagccattcctaaagagatgtgagtagtaaatgtttggaactcttcagttgaaggcggggtgggttggtgtctttacttctctaggcctttcaatgattgggaggtggacaatgtggagtggtttcttttaagtttgcatgagaagagggtgtttagggatcaggaagatagaatattttggacagagacaaagaactgaaagtttacaatcaaatccctatattccgccttggagtcgagcaattcagtctcttttccaattaacgtcatttggaacttgtgggtgttgcctaaggtaggcttctttgcttgggagacaatatggggaaaagccttaaccttggataaggtccaaagaagggtttggtttttagctaatagatgtttcctttaccaaaataatgaagaatccatagaccacattcttgtatgttgtgcaaagacaagggttttgtggctgttgctttttgttctttttggggtgtcttggatgctctcttcttaggttagagagacccttctaggctaacggagacctcatcaagggatgaggaatttgttccttggatgagaattccttgtcctcactatgcctagtctaaaacgggaaatgggacgaggatagagaataaatttacaagtggggataaggacaagcgagccttcctcgaccttgccttgtttacatccctaaaatgatgatgattattattattattattattattattattattattaaaattttaaaaatattattctatatgtaatttaatatttaaaaataaatatttatattaaatatattagtttatatataattttatatttaatttttttaaaactaaatataaattctaaaattaaaaaaactaatgaggatttcctatcggggatgaggaatttatttaataaccattccctatcctcgccttgctaatctcaaacgggaaatagagatgggatggagaataaatttacaagcagggattgggacaagggagccttctttgacctaccttgtttacattagtaagaatgaacctccttaccccattagaatgacactctagactaaatgtcctcccacttccttcctaagccttgaagcacatcttgtcttcatcccaataacaagcttccacacctttcaataatcaagacaagctcacgtccctaaaaccattatgggtggaaaagcctctgcctatctctagatttttttccttccagccccccttgaacctcctaaacctaacacattagtaaaatctaccaaagatgtttttcagacccatcagcctgcttgggggtatatataagctcttggccaaagtgctagcaaacagaattaaggaggtgctagacaaggtggtctcgccggaccaaaatgcctttgtgaagggaagacagattttagatgcctcgctcataaccaatgaggtgattgattattggttgaaacgcaaagagaaagggctgatatgtaaactggatattgaaaaagcctatgatagtattaattggaacttcctcatgaaggtcatgcgaaagatgggctttggggaccggtggttgaattggatgtggtggtgcatttcaacggcaagcttctctattctggtcaatggggtgccggctggttattttcccaattctagggggttatgccaaggagatccactctccccctacctctttgtgttgggtatggaagttctaagcactatgataagaagggctgttgatgggggcttcatttcaggttgtaacattcaagggagggggggattggagataaatgtctcccatttactttttgctgatgatacgatcattttttgtgaagcaaggcaagatcacattacctacctaagctggattttggtgtggtttgaggcaacctctggtcttagaataaatcttgctaaaagtgaagtaatcccggttggagaggtggaggacattgagatgttggcggtggagttagggtgtaaagtggggaccctcccttcggtttatttggggctgcccttgggggccaagcacaaggccatggctatgtgggatggggttgaagcaagaatgagaagaaggcttgcattgtggaaaagacaatatttgtcaaagggtgggaggattaccctcatcaaaagcactttggccaacatgccgatttaccaattgtctctttttcgcatgctaagctagttgtgaaaagacttgaaaaacttcaaagggattttctttggggagggggaagtatggaaagaaagatccatctaatcaattgggaggtggtgtgtacccaaaaggagagtgggggtctaggtattcggaaaattgatcttttgaataaggctctgttggggaaatggatttggcggttcgcctttgaggaagattttttctggaggaaggtggttggggtgaagtatggccagttgggttttggttggagaacaaaggaggcacgcggaacgtttggggtgggggtctggagggatatcttgaaggagtcgtcttggtgttgggataatatagtgttcaaagtgggaaaggggactaaggtgagtttctggactgaccattggtgcggaaatgaggtgttgtcccaagcttttccccagttgtttgcgttggcagtccaaaggaatgcctcggtaaatgagatgtgggattctagcctcggtcaaggaggttggaatataagactctctagaaactttaatgattgggagttggacgctttaggagagttgctgcatttgttgagggatttgaggatttctcttgaagaggacgcagtgatttggaaaggagagggacacggccgttttcggattagagatgcttacaagctgttgtcagggtctaatgtcatcatcttcccgaaaaagagcatttgggtggacaaggtcccaaccaaagttgctttttttgcttgggaggcttcttgggagaaagtcctaactttggacaagcttcaaagacggggatggcagcttccaaaccgctgttttttgtgtggctgtgaagaggaaaatgtaaatcatattcttttacactgtacagttgtaagggctctctgggagattgtcttggccttgtttggggccaattgggtgttcccagagaaagtcaaagagatgttagttagttggaggggcccttttgtggggagaaagaggaaaaggatttggatttccattccgttgtgtattttttggacggtatggaaggagagaaatagattagccttcagggggggctctctagctattcagaagctaaagaattcttttgtttgtaacttgtggagttgggctagggtgtatatgggagaggagtcctcttcgcttttaggttttttggaatggctcgccgttccctaaggggtggtgagtgttggtttttgttttggctactatgtatacgtcctgtatgctttgtggctttttgcctcgtttaatatatttgcgctcacttatcaaaaaaaaaaaaatcttccaaagatgtttttccattctttatagatccacgagtcctaaaaaacaatcctcatattttcagttgcaatttgactgcttagaaccattaagaaagagggatgcacaaaaaacaacacccttgcctcacttacaacctaaccaaacaataagattagataatgacaataagctaaaacctgaatgcaccatagcccaatccaagaacatgtacataaaggagcatataattgctttctcttcttccataaggtccaaaataagcattaagaaactgctctccataccttcttccttttcttccctacaaaagctccatgctagctaagaagggcattgttgatagaaggtggcatcaccattgaacaataagtagagaaaaaattaggtgccaaagtttggttgttttaaggtagtgaaggaggatatagtttgctgattcttcctctcctttacacaaataacacctgcttggtaaatactaactcctttttttagctaatctagagttagaaatcttcctcataaagcttcccaagcaaaaaaacctaaccctcattgagaccaaagggttccacatgatgcctgaagggaacaccttcagtctacaaatttctaggaatgaataaaaggatttaactgtaaaaatgcctccctttgactcccaccaaatcatgacatcctcaacatcttttttaatcatttgtccttgcaaccctttgaaaaaagcttccacctctcccatctccgaatctctattttgtcttgtgaacactagatttcaactacccacttcccctaactactcccacattacttaggcatctttagtggaggctattgagaacaattctaggaaagtctcatctaaggaatccttaccacactgtctttccaaatcttaccctcttaccgtttcccaccctaaatttaacccctttgttaaactccttccacccgttcttgatagccttctaaagacccatgcaataaccttccctcgaaactttagaacaccaacccccttctttctcctcatacttccctacaatctcttgctttcaaagcaactcattctcatatgcggatctctaacaccattttccaataagagccttatttagagtagacaaatttctaatacctagctaataggttgaagaaggtagtgagtaaggtggtgtctcctacccaaaatgcctttgttgaaggaaggcaaatccttgatgctgcgttaattgctaatgaggccatagactcgccgctgaaaggggatgaagctggtgtgttatgcaaattggacctagagaaggcttacgatcatattaactgggatttcctgttgatagtgatgcaaaaaatgggttttggggagaaatgggctggttggatcaggtggtgcatctccactgcttctttcttagttttgattaacggatcgcctacgggttttttccagagcactcgagggttaaggcaaggggaccccatttccccttacttgtttgtattagggatggaggccttaagctgcctcattaatagagcagttagggggggtttcctgaccggttgtaggttaaggggtaggggtggcagtgggattcaagtgtctcacctattgttcgcggatgtcacgttggttttttgtgaggattcccaagaacaaatagctattctaagctggcttttaatgtggtttgaagccatttctggtctgagcatcaatttgaacaagagtgaaattctgtcggtgggaagagtaaagaacgttgaggttttggcttctgaactaggatgcaaagtgggttctctcccctccacttatttggggctccctctaggtgctcctcataagtcggtggctgtgtgggatggtgtggaagaaaggatgcggaagagacttgctttgtggaagatgcagtttatttccaagggggtggggagaatcactctcatttggaacactttggttagcatgctgatctatcttatgtccttgctgcgtatgccaagagttgttagattgaggcttgagaaaatccaaagggacttcctttggggtgggggtgcgttggagaagaggcctcatcttgtaaagtgggatttggttcgttctcttaaaaaggagggcggtttggggattagaaaattttctattctcaatagggccctgttgtgtaaatggagttggtgctttgcggttgaaagagagtccttttgggagcttattatcattaggaagtacggggaagaaggtagagggtggatttctcgtgaggttagagagggctatggggtggggttttggaaggaaattagaaaggaaggctttctgatgtttcaaaatgtctcttttgttgtaggggatggtagaagggtgaaattttggaaggacatttggtgtggaaacattctcctctgtgaggcttttccttctttgtttgcctttgcggtctctcaagatgcgtgggtagcggattgttgggactctataagggatgcggggggatggtatccttgtttttctagaccctttaatgattgggagatggaggcggaggtgagtctcctttcgctccttcaaggaaagaggctttttgttgggatggaggatagagtgttgtggaatgcttctaagaatgggattttctctgtaaaatccctttacaatactcttgattctagtggtgcagtcccgtttccttggagaatcatttggagcccttgtgtgcctacaaaggtgggtttttttgcttgggaagcttcttgggggaaggttctaatccaagatcaactcaaaaggaggggctggattttagcaaacaggtgcttcttgtgtgatgaagaggagacaataaaccacatccttattcattgccccaaggcgagggttttgtggaatcttgtgttttcgttgtttggtgttaattgggtccttccgcttacggttagagacactctccttggttggttcgcttcctttgtggacaagaagcgtggaaagacttggcgggcagctcctctctgtttattttggacggtgtggaaagaaagaaataggatagtttttgataatgaggctttgtcgatccaaagattgaaaaactcctttgtttgtaatcttttcacctggtctaagtcttgtttagatggagaaccctattccttaattaactttgttgattggttgggttctagttgagggttggtgagtgtttgcatttttgtgtttttttgtcgaggggtttctcgtgcatagtccctgtatgcttcgggttgccttcttgctcccttcttctaataaattttctgtgttttatctatcaaaaaaaaaaaaaaaagccccgtcctttttatccatggagactattgactaactcaccaaatgaggcctactttgaagttcgcctccccctcaaaggaagtacctttgaatcttctcttatcttaaactcaccttataggggattacaaataaagacatagtagattagtaagctaaaaagagtgctctttatgaaagttagtctccttctttttgataagtattgcatctttcacattgtaagtcgttcttgaaatctttcctccactacatcccaaacctgcaaagatttaatagaggctccaaatgggaggcccaaataagaggaagggagagagcccactttatacctcaacatcgtagccaaatccttagaattagaaacttcccctgctcatatcaacttggttttaaccaaattattttttaaactgaaaatcacttcaaaccacatgaaagcctaactcaagaactccagatactccttgttagaatcacataaaatcaaggcatcatagattattgtttttattatcattaagaatttattggattcatgggagttggctgattttgatcagactatttgcatggtgctggattatctctgatttcccccatgccattattacgattgtgcatgttagcatgatatctgctaacttttgtgctcttttatttgtttttttttgttttttttttgttttttgcttggagtgggtaaggtactttctaatgttctacaaccatctgcttgcatatgacactaactttttgtatgttattttgtgcaggcaggtgcaagagtgaatattattgctggtggagc

SEQ ID NO: 11656 - DNA, 5043 bp, Vitis vinifera
  Intron number 14 from transcript GSVIVT01034572001 (locus GSVIVG01034572001) derived from phytozome v7.0 (chr-ID chr 18; pos 19248638 to 19253680 reverse strand)
aaaacattaaggtaatggttatgaaacttttcaattgtaaaaccagctttcatgagttacttctttcctactttctgcactatcctaatattcattgtgctttactcctactaaaattgactgtggtgtgcattttgatgtttagttttttttttttcttttttgcacttcatatttatttataggagaaaaatatcagtatcatgaccagatctttaaatggggagcagccccttttatgtttgagaacatatggttactccacccaaatctgaaggaaagatttagcttttggtagggagagtttcggattgaagggtgggaaggtcataaatttatgaagaagttacaatttgttaaacaaaaaatgaaagagttaaacaagggtgtcttttgaagatttaaaactgaagaataaacacattcttacagatattgctggcattgatgcaagtgagaaaaaagggaattgtcttttgagctttcaatgttgaaggcctttaggaaaggggagctggtgcatttattattaagggaagaggtgcattggaggcaaaaaaaacaagggtgaaaagggcaattgaaggggattacagtaagtttttccatagggtgctaatggtaggggaaataagaagcccatcaaatcttggtgaatgaagaagggaccattttgggcaattcttaaagcattttaggggagattatgcactttttgaaaagttgtgctcccccgccctggagattcttggaggttagaaggattggatttgtctgctatcttgacatagagtgctacacagttggaccacccccttttttgaataggagattcacaaagttgtcttttagttagataaggaaagactcttaaacctaatggattcatcaccatagcaatatttcaggagtattgggatgtgattggggaggatctactaagggtcttcttagagtttcacaatcatggagtaataaatcaaagtacaaatccgaccttcattgctcttgtgttgaaaaagagtcagaccaataagatctcagatttcagacctataattctgattgctagcctatataagatcattgctaaagttttatcaaggtgtataagaggagttcttcctgaaatcattcatactttcgaaggagcttttgttgagggaagacaaattttggatgcagttctgatagccaatgaagtggtagatgagaaaagacgttcaaaagaggaaagattttcttcaaaattgattttgaaaaggccaatgctcatatggatcaggattttttggaccatgcactcggaatgaaggggtttagtggaagatggaggtcttggatgaggggttgcttgtcctcaatatgttttgcggtattagtgaatggaatcctgaaagaatggattaaagcaactagaggttttagacaaggagatcctctctcttcgtttcttttcatcattgcagttgatgtcttaggtatcaacatgagttagagttagttcactaggttggtcgtttaacctaccggggtctttctttgggggagaacccaaaggcaaatgtgttttaggacccaatgattgacaaaatctcacgaatattggatagatggaaaaagcattttgtcattaggggttagaagaataattataattcattcatgtttgtctcacattcttagctatttcctctctcttttcaagattcctggtgtgatggtgtctaagattaagacattgccaaggggttctttggtcaagggttagtgagggtaagagagatcacctcattagttgggacctagtttgcaagcttaaggaggttgggagattgtggtttgggaagatttctctgatgaatcgagccctcttagggaagtgactttggaggtatcctaggaaagtttcggctctttggcattaggtcattttgagtatttatgagacacattctaatggttgggatgcaaacattacaattagatggtcatatctgagtctctggaaatccattgcacaggttttttaagatttttctaggcacgatgcaaacattacaattagatggtcatatctgagtctccggaaatccattgcacaggtttttaaagatttttctaggcacacccactttgtgatgggtgataaggtaagaattcatttttgagaatatttgtggttggggggctaacctttgtgttcacaatatcccaattttttttagagttgtcacaactaaaaatctccctattcatttagccttggcacctctctttctttttttcttttttcttttttccttgaagccttaatttccatcataatgtcatttatttggagattgatgaccttaaaagactcatgtcctctttctttcatgcatactttctccatctaacctagatacaagagtttggtcattattctcgtcatgcttatttactttaaagtttttcctttgagccttgtccgatctactaaatatagtatctttctttcctgctaaatttctttggaaatctaaagcttcatttaaggtgaaggcctttgcttagctagtagcacatgagaaggtaaacaccaatgcatgctacagttaagaagaccttacaaatccttagttctaattgttgcattttattaatagagaatgtagagacgattgatctatattgtttgttgactttggggatatggcacagattattcaatcttgctagtttggattgggacttaaagggtaatatgcaacatattaaccatctcttataggggttagggagtaccaagagaggcaaggtcctttggaaaatagcttgccgcatcttgatttggattgtatggtgcaaaagaaatagtagcatttttgaggacaagtggaggactttagaaactctctgaaacctaattaatttctattcctctttttgggcatcctataccactgcttttaaaggcattcctctaaaatttgtttagcttgattggaacttggtgcagaacaaaattgtatggatagcaaggagaggagcattgattatgtctctattggaaagagatgcaatgaagcttatggagtgatgagattctttatttgtatattcctattccgatatagaggtctacttagtatagtggagttcaatcatatgctttttgattagtttttgtatttttggggaggatccttcatccttctaatgtaccttctgttacttttaatacatattttatgttcaaacaaaaaaaaaattagtttcataacataaccactctgttagactaattgattttcctaaaatcttaaatttgtatgatttggactatatcatacactctaacaccctcacgtgtagcttcctttgggctttacacaatggacctaataaagtagggaaataaacatgtagtgagattacacatgatctcctgctaaacgaagctctgataccatgttggacaaccaattttcttaaaagcttaatcttgtaggatttgggcccatattgggctaaactctactgtatctttaggatgaaactcctctgcttctccattgttctatcatgattcacatctcaaatgtatcaaactcatctctgagtgtgggcagagaaaatgaggcaattgccacattgaaagtctgagaacccgctttgccaattgtttcatttcaaagtcagcctccactcttccatttggagtgcttaatgggcatgcagatgagtattcaaaaccagttctaggaagtataactggctcttcacctatgattccaaccttctagacattcttgattcttccatttgcatcagttataatccaatgccttctgagaaagagaaaaaaataaataaaaatccaatgccttctgagaagttgaatgggatggactgagttgttggtaattcttattctatatgcaaaaatgaactaccattttgaaggctgactttgaccgtcaatgcacacttctaacttgacccctgatccccatggttgagttacttgaacattttaggagagaatgtggtgcaatttcctctagctcatcatggtatctagctgcatcctcaaacctctgatcactgaaggctctttaatcaatccatgaagacgcaaaactgtctcctcttcctcaaagaatttcaatgaatcgtgtattctagcagcttctctgtaatcctcagattttgcagtaacctccagtttttccttcaaaaaagtggaagtttggctgtgagaaagaaacgaactcaggctctaattcttgccatttctcctcgaagcacaagcaacaattctacagtttctcctaaaatccctacaattctaacaatcctttcttgtccctatacactagtgttaagagtacacatgagggagggtgttagagggcatgatatataccttgtggttccaaatcctacaagcttaagcttttaagaaaattgtttgtccaatgtagtattggagcttcatttagcaggaggtcatgtatttaaatctcaccacatggttatttctccaatttattaagtccacatgtaagctcaaagtaactacatgtgagggaagaggttagaattcatgatatacattttgggcctaaatcctacaagcttaagattttagaaaaattgattgtctcacatgatattagagtcttgtttggcaggaggtcatgtgtttggacctcactatatgtttatttccccaatttattatgcccacatgtaagcccgaagacaacagctacatgtgtgggagggtgttagagtgtatgatatgtattatgggtccaatttattaagcccatgtataagcccaatttattagccactttattaagagtcttgaatgttgatgaatttgtgaatgaagtataaaacttagaccttaaggtcattctttacctaattttatgcatcacagcatcagaggtaatgatttgttggtcctcacttatctggaagcactttctttcatttttatctgatacaggctggacgatttgttattgaatactgtggagaagt

SEQ ID NO: 11657 - DNA, 27356 bp, Vitis vinifera
  Intron number 1 from transcript GSVIVT01029230001 (locus G SVIVG01029230001) derived from phytozome v7.0 (chr-ID chr1 1; pos 18261535 to 18288890)
gggtatcaagctgaagaggtcctcgggcgtaattggtcagtctttatttatttatttatttattcttgatttgtttggtacttggggttggtgaaatttgcatttttggttggaattttagaggttttagatgcaatttccttttgaatttcgttatggaatcggcaattttgtttgttgagaaagcgttgggggaagggaagggaatcgggtctttgaatgtttttctgttaggtattgtgaaactgtttgggtaggttgggttttcatttttcttgggaaacaaacaacacaaaatgtagaattggaatttgttttcgtctgttgtgttacaaccagatggttcagtttggacaagcaaggtactctgtggttgaatcggttgatagcttgtgaatgctcagaattgagttctttagattggaaggtggtaatctggagcaatgactgaccatggttagtgttagggctgattcaaatatgtttggggttattctgcggggagtgctgatgtgggttttagcactgaggaggctaattagttaatggtggtgatgtagcttgtctagtaatctgatggcttgaagtgggcaaaggaagaggggaaaaaggagcatggaagctaggaaactagggaagaacaggattgagaagttcaaactgccacagataataataagaaagacatatagtgcacttgatggattgatgaactaatcttcaggagggttaacctgcttccttttcacaagttggttcttttttcaagtgccaatcctttttatggggcctgttacaaatggccttgccctcatacgttgcacctaatggaagtaccggataggttgatggaagtagatctgatggatggctgggagcttatcgtgtttgcaactaaatgcattgaccaaaatgttagattttggtctacggtttgatgaactggtcaacggttttcatggagaaaaagggtgggggtttaggtattagaagtttattaattctaaacaagactcttattagaaattggtgttagagattcacatttgataatgaatccctttgaaagtaagtgattataaggaagtatagggaggaagaggggggttggtgttcaagagcattgagggaaggatatggagtggggttgtggaaggctattggtaacaggtgggaggagtttaataaaagggttgggtttatggtgagaaatggtaggaaggtgaaattttgggaggatagattatatggtgatgagttcatggaagaggcatttcctgagttgttctctataacctttgcaaaagatgcttgggtaaacttgtaaaaaaaataaaagtaattgtaggaccagagtggggaaggagtttgttggaatcccttgttcacaagacaaaataatgattgggaatcaagagaggtggagactttttttaggaaattgcaagtgtagacggttagaaaggatttagaggatatcatggtttggtggatttgaaagagtgacatatctactgttaaatccctttattcctccttgacaaattgtagaaaggagatgtttccatccgacattgtgtagaacctttgggtcttgatgaaggttaagttttttgcttgggaaactttgtggggaagaatattgactttagatcaattcaaaaggagaggttggaggtttccgatagatgttatttgtgtaaaggagaagaagaaacaatggatcttatcctctttcattgttccaaagcagttatgctatgatagttaatttatcctttgtttggtgttcagtgggtgatgctcttagttagagatgtccttcttagctagcgtagatcctttctagagaagaagaggaagaaagcatggagaacgacacccttgtgtacattttagaccatatggaaggagagaaatcgaagaaatttcataaatgctaaaaatatggattaaacaatttaacaatttttttatgtacattttttaggaatagattagggtgcacataggagattgctccttgtcactgttggcttttgtttattggatgaactttaagtaacatgagggtgttgtttttgatgttcccctctgtttcttttggcctttggtgccttgtatatgatgtgtatatttttatgcgcccttttggttggtgcttttaatacaattgttcttcacctattgaaaaagaaaagaaaaaaatttttagaaccaaaaatctcattgagaagagacgaactctgccactcaattcacttggcaccaaaccttatcaaatcctcaaagccataaaaaactgcattgcgaaaaattattgctctaataaagctctatcaactgaacaattggagcaaaaaagtaagcctgtgcgattgtagattcttcgagtctgagtatgatctaagaaaagattcttgatttgatttcctcaaccccgtgcaccagatcccaatcaaacataattcctcctatgggattcacctgcttataagcgttgcctaaatgatgaaagaactgcatgttatggcccctttctaaattctaagatctaaatgctttaaatttttgcctcttcacttcctcaaattcaacacatggctggcattcttctcaatcagtgttctgtgactgcgccttctatagcctggaagttctgaacttttccatcttattccacctcttaatttttatccatgagtcacattctaaatgatcttctttatttcatgtgcttattttccttctgaaacttcattttctttgtcactctcaaagaaagattttggaaaagcatataactattccaccaagcgttcaccctaacaccgaaaccttcctctttaaggcttttagcaaaattgaggctatcacaatctagaagcaaaagtagctgatctgaaacatgtttgtagcaaactctgtgcgacatttgaaaactgatcctctcattctgaggagacaagaaactgaactatatgagacatcaattggttgttcaacctaccagcctatgcaaaacattcacctcccctgggaaaatcctacacataaaatttgtaatggtctgaagacattctattgctccatagaatctgccagaattgttcctcctaaaaggaaagcagtttgcattgaaatcaccttaataccctaaggatccctttaaggcccaaatcagcacagatcccctccagaatgaattatttctttctctgacaggagagggccatatacccctggaaaatttatataaatccatgtttctcatttttaaagctgtaagggattggaaaggtccctataactatgtccagcttctgttatgaccttttgtcccagaaatctaagattctcctgtgtttgcttccaaaaagggctcaatcaagggatttattataaccaatacaacagaagaagtttgaaagaaagacaaccactttagttttctgagtacacaataaattggccttccaatcctcgaaggtgaatttaaaatttcacccttcttcacattgttaaagatcattgacattccaaaagatgattctgatccatggtcgtacttagcttcctatcccttgctgacattatcttacttacactcatatccctttctagatatcctcttcaattttctttcattgctgaagtccaactccttgctcttttttgagtcatgcttgtgctgaaacctactcatttgtatgacttaaaaaggctgcatcggcttttattcattccccttaaaggagactcctaggtataaaagctaaagtccctcatcttgttaagaacccgaaaagtaatgccctagttgaactctttcaggtctatattctttctgtgattgtaaagaaagaggacttaaaattgtcacaggcatcacatcctctgctggagtaaggtgttcaacattctcattatctactaatggatccttgctcaactcattgaagcaagctccaatatgctttcccttcaagcttgaattgaagttatcccaatttgccccaactcgcctaatggaatatatgcccaatcccctatagagcactttacctccaaaggcacatataaattaaaaaaaaaaatcaatcccaatccttccttctggtaggaaatagagatttcaaaccctaaagggatcctactcaactaccatctaaaaaggaggtttctcttcatagagataagagtttacaacctcaactcaaagcataacaggaattggaggttgtaatcacttgaaggctccttctcaactaccaaataaatagaggttccttccataggaagtagggtttacaaacatgactcctggcaattctttagtttcagctcattaagaattggaggttctaattggctgaggtctgattaaaaaaaaaaaaaaaaaaaaaaaaaagcctgagggcttctcctccaattgctacacaagaaggagaacctgccttccctttttgaatgcagggagagatgaaccacttactgatagtctttcccacagtgcaggatcagacaaggtacctacataagctatcagcctaaattgaccttcttgtttgtttatgctataggaaagctttgagattacttgttatgctaatcgaagtacttatgctataacagcaaaagaaattgcaatatcagaaatgaatgtaaaattaatatagtttcgcaaaccttgtccaattccatgaacaagataaagcagtccactaaaaacctgagctctgctcttagtatctcaccctaacctaagccatgaacaacttgtggtttgatgatccatatgggccatgaaccaaacccatacttcctagcttcatttgaaccatgaaataaacctacctctcaatgttatgctgggtgtttaccttctctccttgatctccagaaattttgtaaaactgttctaggttcatgctctctctcattcatatctcaaacctagtaaaaagcattataagcccatctccatccctgtagaccctataaaactgttataagtccatctcatccaatcattcccataaatattgtaaaattattataagcacattgccatctctgcaaatcttctacaaattgtcatagattcatctctatctccacaaaccttgtagagttggtttgattcatttctatctcataactttcctccattaaaaaagaaatcttattcccactagaaaaacgtacaagaagtttattttacaagaaattccactcttaagggaattctaatgaaaatataaatccaaattggaatttgagatacatggcattaacttcttaaaggtgaaatccaattccacctttaagaagtgcaggtgaagatgggataacaaaacgcatatcagtcacctgagatgtaacaaacacaacatctccaaccataccaactttccttaggatgaagggtaaggctttagaagggtaagtaacacatttacagctggctggaactctatctcttaacatacactttacctctatctaaagccctaagaaactctggggaggatccaaatcaagaataattaggctatgataaaagaggtcaataagagaatttcatcttccaaattaaccaatgcattagacctaaaaactatgcgtgatggaagctagcccatcaatctcaaagaataagctctttaaaatttgaacaaaggcccaacccaccatcaatcttttatatattaattaattaattagttttttttttctaattgctttgaacttgaaagtgcagggaagatgggttatcattaaagaagctaataaaaagattataaaactagtggaagcaagaaaaccactacaaaggaagtggagctagtgtaatgaatgactactccaagaaatgacactttgttacctagaatagtcagtttccttcttgcaattttcctttgtgcttgatggcctagtgaagcaatatgatgtttcctggtgcctttgggtgccattcttaggacacttgcattgctaagcacaattccttttttttttttttgatagtcaaagatcaaatatattaacaacgcctaataaataaaatatgtattcttcttaataatatatatatatatatatatattgttaataaatttatattaaaagtatattgttttttttcttttttttttttgataggtaaattttttgtccccactgggacttgaacctagaacctctcacaaaccctccccaatcctttaccacttgagccgaacctcaagggcttaaaagtatactgttgaaattaccaatttatcttatgtctttgtcatttcaataatggtttttttgtttttttttttttttgttttttgataggtaaattttttgtccccactaagacttgaacctagaatctcccacaaaccctccccaatcctttaccacttgagtcgggcctcaagggcttaagagtacattgttgaaattaccaacaggagagggatagggagtggttttggggtgagctaggggctataaagggactttggagtggtttgtggtgtgttacaggggattttaactcgattaaatgccttgaagagtgcaataggggagggtgtttgaactcagacatgagaaggttctctgagttaatagaagacttagagttaaaggacctttccattgttgggggggccttttacatgaagtggaagggcaaacaatcaatcaatgtcaaggttgaatcgtttcttagtgaatgaggggtgggactgctggtttagtgggtcgatgcagtgtccttccgagacctgtgtctgatcatttcccgattcttttaaatggaggaggtttgagaagaggcccctccccttttagatttgagaatatgtggctgaaggtggagggctttaaggatcttttgaagttgtggtgggagggggacaactttagtggctcttcaagttttattttggcggcaaaattaaaggccttgaagtctaaactaaaggagtggaacaaagatgtttttggtaaggttgaagctaggaaggatttggctctaaaccaggtggactattaggatgctgaggaaaagactagcaccctgtctttggaggagttggaagctagaaaagaagtgagggaagattataaaaaatgggttatgttagaagaaatctcttggcggcaaaaatctagggaagtgtggctaaaaaagggtgagaaaaatatgagattctttcacaagatgattaatgcacacagaaggaggaatatcgtggacataattaagattaatggtgtttggtttttagaggagaatgaaataagggatggggtggtcagagcctttcggtctttgttgtcctttcctgtttgggttgtagtttaagactttggagactttggatgctctagctttggaggtgctgttcacagaagaggaggtgtatggtgctctgttggggtgtagtgggaacaaagcaccagggcctgacagtttctctatggtattttggtagttttcttaggattttgtgaaggattatataatgagtttcttcagggaattttatgaacatggtaactttgttaaaagcttgaatgcaacctttttggttttaatcccaaaaaatacgggtgctgaagatataagagattttaggcctataagtttgatggggggtttgtacaagtggatggccaaggttttagtcaataggctaagaaaagtggtttctaaggcccaaggggcttttctggagggaagacaaatcctagatgcagtgctgatagctaatgaagctattgattcactcttgaagaataatgaatatgactttttgtgtaaacttgacatagagaaggcgtatgaccatgtggactgatcatttcttcttaaagttatgcagaaaatgggttgggtggatcaagtggtgcatttccactgcaagtttctctgtgttggttaatgacacctctatgggtttctttcaaagctcaaggggtttgaggcaaggggatctgcttttgccttatttatttgtgattgctatggaagtgtttagttgtctcatttagagggcagtggaggaggttttttgtcgggttggagggtgaagggtaggagtaaaaaaggggttcagatttcccatttgttgtttgctgacgataccttggtgttttgccaagcttcccaagatcaattgacctatcttagttggttgcttatgtggtttgaggccgtgtcggggttgagaataaacttggaaaagagtgaactaattctagtaggtagggtggagaatattgatgatcttgctatggattttggttgagtgggcagcctcccgtccactgatttggaccttcctttgggtgcaccgtttaagttagtgacagtttgggatggtgtggaagagcggttccgcagaaggttggttccgcagaaggttggctatgtggaagagacaatacatatccaaaggagggggggcgaccctagttcaaagtatgttgtcgaatttacccatctattttacgtctttgatgcgcatgccaaactcagttagacaaagattaaagcaaattcaaagggatttcctttggggaggcggttagagagaggctttgtggaatcaagtgattagagggaagtacggggaggatagagggggatggtgttcttggaaagtgagagaggtgtatggtgtggggctttggaaagggataaggatggattgagactttataagttctaggatttcctccctggtagggaacgggaggagggtgagattttggagggataagtggtgcagggattctccattgtgcatgtccttcccttccttgtttgctttagctgatgataaggaagcgtgggtggcggatatttgggaccctttggcgggagggggggaatgaaatccttgtttctcaagagcctttaatgattgggaggtggaaagcttcttggagcggttgcataggaagagagtgcgcggagatgtggaagacatggtgttttggaccgaaacaaagagtgaaaagttctcggtcaaatccctttactatgtttatgagctggacaacccttctctttttccttcaagttgcatttcgaatgtgtgggtgaagcccaagattagcttctttgtttgggaggctacatgggggaaaattttaaccttggatttaattcaaaaaagagggtgggcctttgcaaatagatgctttttgtgttatgagaaggaagagactatagaccatcttcttcttcattgtacaaaaacaagggtcttatgggatttgctatttactttgtttggggtgtcatgggtgctgctttcctcagttagagagactctccttagttggcatggttcatttgtgagcaaaaagcgcaaaaaggtgtggagagcaactcctctttgcatattttggacggtttggaaggcgagaaataaattgaccttcaatgatgatgtgttgttaatccaaagactcaaatacttttttgttttttccctatggtcagaggccaagttgtttatagttgattaccctctaactatagtcagttttattaattggttgggctctagttaaggttgttttttaacccagctgggtgcttgtttatttgaacttttttggtcagtttggcggtgggtgtataggtattgtataccttgagtcgcttttttggcgcctcttcttaatagatcttttcttacctaaaaaaaaaaaatgttgaaattaccaatttatcttatgtcttaaattgtcatttcactagaggtgttgtgttttttttttttggataggtaaattttttgtctccactcggacttgaacctagaacctcccacaaaccctcctgatcctttaccacttgagccaggcctcaagggcttaaaagtacattgttgaaattaccaatttatcttatgtctttgtttgtcatttcaataaaggtgagtgtacaattggagtagattcaaagaaacatcctttggggtggggcccgtatcattgaaaaaacccatatccttaattggttcatagcctattcgaacaaaaaggatgggggtcttgacattagaaatctctctacccttaacaagacgttctttggcaagtgtagttggagatttttaaatcatagggaatctttatggaaaaatgttaatagcacaaaaatttagggaaggaataggggttggtgttcaaagggtgtgagggatgatcatgggttgggtgcgtgcaaggtcattagaaatgggagggagtccttcatgagcagatctcatttcataattggccatggaagattggccaaattttggagggatagatgatgtggagacttatctttggaagtgcctttcttgacattattctttatagccaacgataaagattcatgtatagcagtggtgtgggagcaagttggggagggaagtgagtgaagtccttgcttctcaagacaattcataattgaatgattgaaggggtgatagactttttatagaatatgtagaagagctcagttagtagagaggaggatgacaaattggggtggaagtagcttatcaaaaaaaaaaaataaaaaaataaaaaattggggtggaagtaatgtaagtgtggcgagttctcgattaaatcatttaccactccttagtttgaggaagaagagagcctttccctaaaaacatcatttggaatccctaggtacttgtgaagttgggggctctttgcattgaaagtaacatgggaatgaattttagtgattgattagtatagaaggatgggatgaataatgccaaatagatgctatatgtgtaaagttgaggaaggattgattaatcgtttactatttcattgccttaaagcaagtatcctgtggcaattggttatctttttgtttggggtggcttggtgatgcactctttagtaggaggaaatatggtaggttggtgtagatctttcatgggaagaaatgaaaaaaaaaatggaggaccgctcctttgtgtctattttagacgttgtagaaaagaggacgggccttggcaaatagatgctttatgtgtcttgagaaagaggagatcatagatcatctccttctacattgttaaaaaacaagggctttatgggatttactctttactctatttggggtgtcttgattgctgccttctttagttagagagactcttcttaactggcatggttcttttgtgggcaaaaagcgcaagaaggtgtggagagctgctcctctttacattttttggatggtttggaaggtgagaaatagattggccttcaagaatgatgtgttgtcaatctagagagtgaaatattcttttgttctttctatttggtcagaggctaagttgtttatagttgactgccctctaactatagttaattttattgattggttgagctctaattaaggttgttttccgggccatctaggttctttttggcctttttggaggtgggtgtataggtattgtataccttgagtcgcttttttggtgtctctttttatatgaaaattttctttacctataaaaaaaataaaataaaattttagacattgtagaaggaaagaaataagaggtcctttgaaggcttagaatagtgaaaacaaacacttaaagcttctttagtgactacttttttggaatgtgtcaggagtatacatagatgatctttctttgacaatgctaggcttttaagtgaggatgagaattctattttttttttttttgctattctctccacttctagtgtgcttttttagcttcatatattgtgtgtactttgttgcactgtttgcataggcgttattaatatatatatatatatatatatatatactatttggctattaaaaaaaaatatatttctatttttcttgataggtaattccacattccttagactaaagtttattactacctcactagggtttgtaatatggattcttttatttatgtattcacgtgcattgaatttatccaacctcttaatattaggacacaagaacgtgataaattgtcaaagtattctaatttttcttcttttatattcaatggtgaaataagtgttcattctaaactatccttacatgcaaactacaataatttttgaaatatgaaagaagtagattaggaatattaggatatcatttggaacctctggaaaaatgaacattttctttttgtcttttgtttgacaacgtttggctcatcttcatatccatgcccatggcaagggtagtgctcacatttgatgttttcacgtaactgtgggagagagctgtttttaatgttctttcttttttgacattgccatttggtgtctacggtatatgtccaatatactttggtgtgcttttttttttttggtttattgcctataaaaaaaaatagtaacaatcttatgtacttgattggatgcattagtaagaaattttttaagataaaagttaacataagatatgcttttacggattgagatgtgaaaatattgaaacttaaaaactattccatctattaagtgaatgtatgattatatgatgtgatattaactttagtggccttttgacttaatgagtgtgggttgcttccttctttactgaattgtagctaagtttttaattcatcttggaatttcaattttcattgaaacctttttgatccaaagattgaggaactaactagcgttctttcttctttgcttcatgtatatgtatatcacctctctttctagatgaaagagtttggtcattgactccctctggacgtttctctatgagcttcttctataaagctctcttaatctttcctcattctcctgttattacttcttttgctcctacttggctaagttggagctcaaaagctcctccaaaggttaaggcttttgcttggcttgtggcaaataagaaggttactaccaacaacttgcttcaattgaggaggcctaacaaagctcttagtccagacaatcgtgtgatgtgcttaaagagtagtgaattagctgaccatttattttttcattgtccagctgcattggtccttttggcatagattgttcaatattgccaatcttgattggattactcctggagtcacaacaaagatgatggaaattttctttggaagccttccaaaagggaagattctttggtaggtggttgtcttgtctttgatttgattttttggttggagaggattgcaaggattttcgaggataaatggagattgacagatgccatttaggactcaatttcttttccccttctatatgggccttgatcacctaaccttttgcagatattccatcgtgtcttttaatgctagattgaaagagtgcttgctattctatcaatttgaagaagaacataatgattgactggttaccctttgtagtaggttcagtaaagttaaacttggatgtttattgggtaactctggatgggtaggtactggaggtgtgattagagatcattttggcactgtattgagagctttctctaagcatgcagaaatgggattagccattaaggcagagatattgacattattggagggtttgatgtaggcaaaaagtctctctctatccaatctaattgtagagggagattttttattgcaatatcttggataactaataaggaaaagggttaatgaaatttgacaattggatgagcaaaatcatcgatactgcgaatgagctggattgttctttctcttggattcttctgttagctaaccaagtccatgatcaattagccaaaaaaggagcaaagcatatgtgacctcctttgttggagatttccttcccccttgagtatccaatattttttctcctgtatagcaagtttttatgaggaggggctagtttttgtggttctaattttttgttaatttctaccaacttttgtgcatctttgaaggattgcttatccttcttatatttatcaattgattgatgactgaaaatgcttgtttgtgattaaaaaaaagggaataaggttgattatgaggagttaatgatttggaaaaagaaatattaaaatcttgccatattgcttagtgaaaaaatcaatcacatatggaagtgccttgttaaagatatttgaggagaagagatgaaatgaaactcagtttgaaatttataattaacttggtatgttaaaagggaaaaagaaagattaaaatcttgctatatttgcttagcgaaaagatcaatcacatatagaagtgccttgttaaagatatttgagaagagatgaaaggaaagtcagtttgaaatttacaattaacttggtatgttaaaaggatatttttgaaaattttagaactctggattgcttatgctttcaatcactgtgggtgaatggaaaaccttactgttaatattgaacaggtgtaatgaatcatcctatgaaagagtgtggttgggagaaaaagagaaaataaagtaaatttattttacaatttgtattattgtaatctgtaatgatcatcttgaagcaaatctttaaggaaaaaaaaggaaattatagtaatctttcttattttaaaagctttagtacttttgtttaattgaggtgggatacttcttccatctgtttgaattcatgatggaaggttgtaaagtttacatttaatacattgctaataagaagaaaacattattattctttattggagactaataaccatgatatgtttgacacttctccttggtggcaattggtgtttcaaatactttcagacataatgccgtgactgcttttgtcctgtctgagacctattgagcacttgagtgtaaacctttatttacttcaaaaatgtgcatagaaacagagtgtatgcttttctttttctctcaagttgcttttagtattaccctttttattttttgctatgatccttttatgaacatgtaaactgaaatatagataaatacatacatgttcattttttgcataattacatatgtttctagattttggggaattgcttcagtgtctgctaccttctattcttgttggactgccatgttaaatccatttgcatggatcatagttcttaggttagaagcatttgatagtattgatccttgttcttgtcatgtctcattatggattccttggcaggggcaattgtaaccttattatgtaaaattttctgatgcttcaatgtgtcataaatatcattgtcaaatgtaattattgcatagcagcacgatatattgttgcagtcatatcattaggtgtgttttcatgctactaagcctactattagattttttttttcttgctgttaagaaaccatttgatcatcaaagttcgtaatgcttattataaatattaggttttaaagaattgttttcttttccttatagcttgtcaattctcattgttgaattgtcgatttgttaagctgtttgtttttcaggcttatttattttgcataagtctagattatatgcttttaagcatttccatgccagaagtttactttgtttcaattccatttttggatattttcatttctaaacaggttgtgacttttcttttgacagtaagcaatgagaagaaacatattaataaaaagagctataacttaggtatacaagatgtatacaaagggaaacaaaaggcatagcctgaaagagggaaaatataaaaactgctccctccctcatctaggtcccatgcaatctacaaacttgaatcgatccttgtgctatgtacaccctaacccatgtcagcaaactttaaacaaatgagctgttcgatgtttgagccaattactctgcatattcaaaggttcttcaatttctttctttccacaaaatctaaaaaaaatacacaatgagatagctccctagactttcttacacttttttcccatgaaatagtcatgctaacttaagagagtctccctaatcaaaggatggacccaaactactttgaataaagcaattagcaagtgcaatagctccttagctttagagcaatgaagaaggatgcgatcaattgattccacctcactttagaaaggtaacgtgttgctaaagaccatcctcttcttttaagttgatctaaagtcaatacctacccccaacaagctttctaagcaagaaaactcactttagatgagaccaatggattctaaataatgtctattgggaaaaaggattgagcgcctttactctagcatagaataaagagatttgaccaaaaagacaccattccttgaacttgtccacaccatcttgtcctctcctctcttcataactttcccttgtaaccttatgaaaaaagactccataatttccaactcctaatcatttcttgctaaatggaattggcgtttcgcaaatgagagagaggctttgtggaatcaagtgattagagggaagtatggagaagataaagggggttgttgctcttgagaagtgagagaggctcatggtatggggttgtggaaaggaataaggatggaattggaagttggtgagcgataggttggttttcatagttggtaatgggagaagggtgagtttttggagggatagatggtgtggggattctcctctgtgtatgtcctttccttctctttttgctttgattgttgagaaggaagtgtgggtggcagatatttgggaccccttggctgaagggggggggggggttggaacccatgtttcttaagagctttcaatgattgggaggtagaggaggcggaaagatttttggagaggctacagggtaagagagttattgaggatgtggaggatatggtgtcctggactgaaactaagagtggaaaattctcggtcaagtctctctatgtagcccttgaagcgggtggttcatctttgtttccttcaagctatatttggaatgtgaatgtgcagcctaagattagtttctttgcatgggaggctacgtggggcaaagccttaaccttggatatggtccagaaaagaggatgggttttggcaaatagatgctttatgtgtcttgagaaagaggagaacataaaccatcttctccttcattgttcaagaacaagggtgttatgggatctactttttactttatttggggtgtatcgggtcttgccttattcagttagagagacccttctaagttggaatggttttttcctgggcaaaaaacgcaagaaggcgtggagagctgctcctcttcacattttctagacggtttggaaggcgaggaatagattggttttcaaggatgatttgttgtcaattcagagattaaaacactcttttattcttactttttgggctgagactaagttgttcatagatgattgccctctaactatagctaattttattgattggttgggttctaagtaggtttgtggtgttgggttttctttgtcttttggccttgttgaagttgaaggcgggtgtataggtattgtatatactttgagttgtttttttagcgtctcttttatatatgaaatcttatttacttatcaaaaaaaaaaacatggatttcagtatcccccctcctcttgctcttcccatacatttgctacctaggcttctttagccatagctaaggcatttagagtgggaaaagacgtgcagaagggttcttccaaaacccatctatccttccaaaactctaacctcctcccatctcccacctcaaaagaagttttattgttgaaaaggtcccccaccctttcctaatagcttttcatagcccgaccccattcccacctcttgctatgcaagacctccaacccccttcctccttttatactttttcttaataacctgcttccaaaaagcctctccttagaagtacatctcaaactccactttctcaaaagagttttattaagagtaggaagacatctaatgctaagccctccctctctcttttgtttgtagatgatttaccatttcactaaatgtagcttttccctaaagcaccctctccctaaaggaaatctctttgaatcttttcaagcctcactctaacttttctaggaatgctgaacaaggcatgaagtagatagccaaattggataaggtactatgaatcagttcaaaatatactttcttttccacattgatagcttttgtcgaaatctgtcctccaccttatcccacattgtatcttccttgcatgaagctcctaaagaaaatttaagtcggtagatggaagattccccaccttaaatctgaattgtgctaccaaaacctccgcattgacaggcccgccaataggaattgagtttcctttttcaaggttgatttttaggctcgagattgcttcaaaatatattagaagccaacttaaatggactattagagtttgagaagcctaaaaaaaaataagttatcatcggcaagcaataaatgggaaacctcttcccctacccttccctctccttggctttgaaataaaagaccaccctctctagccctctccaaaaagacaactaaacggctccatcactaacacatataagtagggatagaaagagtcctcttcttgccttagccctttagacccttggaagaagcctatttgggtaccatttactagaatagaaaattttgctgtagaaacacatcacttgatccatttaatccatttctggccaaaacctatcttatcaagaatagctagcaagaatttctagctaacatgatcataagccttctcaatatcaagcttacaaataactctactagaattgctccttagcatagatcacttccctaacagctgggctatgcaccactaccataaatctttaggatcaaagatcattcaataattttattaaggattaatagtgaatggtcttgtgatgaagaatatgggatttggacaatgttaagctgatctaacaagtggtagtgctcatatataaagtttgagatactgtaatggctgccttctcggagggggaaggagctccgaaggggggtaagagctggtttgctgtggagtcaaagacatttgagatcaccattgaagagactcgaggcaaactgaggggggttattctggaaagaagcaaaggcttctcttcttggataaaatttggagcaaagagcctcagttctctgctggaaggagtggaagagtggtgcagagatgaatcaagctcgaggagccttagagcttgggaagaaggaggaaggaaatataggttggagtgtcgttcaaatattgcaggtaggtatctgctttgttcggtgagggactcggaggcgaagaggttttgtctagttttcccagaaggtaagggattagtaggtggttggttcatgctggctcagaagctaagagctcttggaattactactcaacccatgaagaagtttgaactgggtaattccacctctgtaaaggaagattatagaggtaaaggaaaggagaaagggaaaggagtttttccagatgctgtgagaatggagaaaggagaattaggggaagctttatgggtgcatgttggtgagcgagacttgaccagaagggaagtgcagcttagtcgctgcttggtaggatgttttggtgataatgttgaggatgttccgcctttgtccttcttggaagagtgggcgtatgaaagttggtctctcaagggaggtctaaaaatctcccggttgggtggagccctagtgctgttcgaatttgaagataaggtggaagcggactgggtgctattaaggggtagtagaagtcttcagatgagagagtttttcttgcagaaatggggacctgaagtgggttgttgcagaaatggaagccacccaaaggatgtgtgggtgaaagtagtcggtctaccccttcacctttggagtagagaagtgttcaagagtataggagagagatgcgggggatttatagctgtggatgaggatacaacctttttctccgagctacagtgggctcgcattttggtgaaagctccgggaaagattagacagggtacgttacaggtggtagccgggaaccgttgttggacggtgagtctttggtgggaaaatcctccatggttctcggaggtggtagcaagatcaccctgatccaatgaggagaggcgggaggtcaggtatgagggtaggggagattcacgcgccagtggtagcgtgagaggttttcaaaatggcaaaagtggtctgcaggcttaggcgtcaagggttcaggttgagtgtggcagagggcaaggtgaggcggcaggcgcagaggtggctgagggaaggaggccctccgcaggtgatttgggccattcaaacagcgggtttgggcccagaaaagataaggggcaggcttataaaggaaagagtgacttgggcttaagtgaggacaggttttgggccaaaagcccactacccgttagttttaaaaaggagggttgggggtgggcttctaagcccacttctggaatagagtttgaggagcggtcctcctcggctagggcttcctctgttcccgcggaggctgaagaggggatggatccagagctcatggtggtccaagctgtaaatgctgtcgtgttgacgccgcgtggatggagaggcaccgacgaggctctaatggaggaggcttccaggtacgatgctggtccttctcctctttctcagttggggcatcggggacactcccacctttcttcttcttcttcttttgggggcatcgccgaggccatcgggacttcggagggggtgatttttggtgcggaaggggagttggattgttaggagataagattggggagaatcagtgccgcgtcggcttgcggagatgggagtggacatcttcgggactcgggtgatgccaaaaaaggaaaggagctagctctggtaccagttggggaggtttttatgagtctctgtgaggaagaggaagcatgtcacatagaagaaggggaaagtggggaaggatggagtacgagtagccttgcgagattcagccactgtttggggatgccaacgaaaggcttcgaagaggaaatcttatctcttaagaagaatgaaggggagaatggagcaaaagggcagggatggggtgactatgaggacgagcttaaaatcttcaaaatccagtagggaactcaagaagttggagtggacggttagttacaaaaaggcgaaaatgggatctagcacgggcttttctagaggggcttcaggatcagggtgtaaatgaagataagaattctgtcatggaatgttagaggggctaatgatagggataaaaggaggatcattaagtcaattattaaatcccagagagtggatgtggtttgtttacaggaaactaaaattaaagaaatgtctacggggcttgttcgaagtttgggggtgggaagaaatatagagtggagagcagtcaactctaggggagcagctgggggtattttggtgttctgggacaacagggtggtggagctggtgggatgggaaaaaggagtgttctcaatttcgtgccggttcaaaaattgtgtggatggtgttgtgtgggtgttcactggggtgtatgggccggtttgcagtggtgatagagaggagttttgggaggaacttgggtcagttaaaggattatggagtgacccttggtgtgtgggaggggatttcaacttggtaaggtttccagaggagcgtagcaggggaggtggtcttacagcttctatgaggagattctcagaagtggtagaggatctggagctcagggactatccattgagggggggtccgtttacttggagagggggtttgaataaccgggtccagtctaggctggataggttcttagtgacggatagttgggataatatgttcaatggtgctgtgcagggcattctccctagacctgtctcggatcacttccccattctcttggaaggaggaggtttgaagaggggtccttcccctttcaggtttgagaacatgtggttggaggaggagggttttaaagacaagttgaagatgtggtgggggagtttaaagtttactgggtcagctagctacattttagatgctaaactgagggcccttaaaaatattttgaagatttggaataaggaggagtttgggttagttgaggctaaaaagattgaagctcttaagcaggttgagtactgggatgaaaaggagaaatatgatgttttaaatatggaagattgtgaagcaagaaatggagcaagggaggcctacaagtcttgggtgataaaagaagagattttctggagacagaagtctagggagttgtggttgaaggagggggataataataccagattctttcataagatggcgaatgctcattgtagaagaaactggctgtccaagttgaaagttaatggttattggcattcagaggaaaataacttaagaaacagtgtggtgggggcgtttcaagagctgtaccaggaggaagaggggtggcgtcctagtgttgacgggatctcttttatgaggttagatatcagtgaggctgaggggttggagatccctttcaaggaggaagaggtgttagcagcttttacggacctaggcaaagacaaagccccggggccggatggctttacaatggcattctggctttatgggtgggatgtggtgaagtttgaaattatgggcttttttagagaattccatgaaaggggcagatttgtaaaatccctaaatgcaaccttcttggttttagtccctaagaagggaggggcagaagatttgaaagattttagaccgattagccttgtgggaagcctttacaagttgttggccaaggtgttggcaaatagaatcaagaaggttatgggaacagtgatttcggaaccccaaaatgcgtttgtggagggtaggcaaattcttgatgcagttttgattgctaatgaggctgtggactccagattgaaaagcaatcaagggggcgtgatgtgcaaattggatatagagaaggcttttgatcgtgttggctggaagttcttgttggctgtgttaaagcaaatgggatttggggagagatggattatgtggataaagtggtgtatctcaactgttagatactccgttctgataaatggctctccttccggattcttccaaagctcaaggggtttgagacaaggtgaccccctatccccttacctgtttgtgataactatggaggtgtttagttgcttaatgagaagggccatcagtgagggttttttatctggatggagggttagaggtaggggtggagaagggattctgatatcccatttgctctttgtggacgacaccttggtgttttgtgaggagtcccaggatcagttgacgtatctaagttggcttctcatgtggtttgaggcttgctcaggtctgaaagttaacttggagaagagtgagcttattccggtggggatggtgactgatatagaggatttggctctggagttgggttgtaaggtgggtggtctgccttccaggtatttgggtttgcctttgggggcacctttcaaatcagaggtggtatgggattgtgttgaagagaggtttaggaaaaggttggctatgtggaagagacagtatatttccaaggggggaagtgctcttgatcagaggcctcatctggttaggtggaatctggtttgcttggaaaggaagaaaggtggtttgggggtaagaaacttagcgttgatgaataaagctctcttaggtaagtggaattggcgttttgccattgaaagagaggtgctgtggaagaaagtgatcagtcacaaatatggtgtagaggaggggggttggtgtactcgggccgaaagagggaggcatggtgtagggctttggaaagctattagaaaggagtggttgggtatgtatagcagtttagccttccgtgtgggcaatggtcggagagtgagattctggaaggataagtggtgtggagatgagcctctctacgaatccttcccctctctttttgccatttctcaggctaaagacgcgtgggtatcggatgtgtggaacccagatggtgtaggggatggttggacccctttgttctcaagggcgcttaatgattgggaaattgagatgatggaacagtttatgcttaaaatccaagcttttagggtgcaaagggagaacgaggataagatggtgtggacaacatctaaaagtggtgttttctcagtcaagtcactctactcttttttggagcctggtggttcagctatgttcccttatattggtatttggaaagcgagtgtgccgccaaaggtagcttttttcgcgtgggaagcatcttggggcaaaatcttaactctagaccaacttcagaggaggggttattctttggcaaataggtgttttctttgtcttgctgaagcagaaacagtggatcatcttttactccattgtgttatgacgaggacattgtggaatcttcttttttctctctttggtgtggagtgggttctctctggtacagttaaggaaactctcctggggtggtatggagcgtttgtggggaaaatccgtaaaaaggcgtggcaaatggcccccttatgtatattttggtcagtttggaaggaaagaaattcgttggcttttgggaacgaggtgttgtcaatccaaaggttgaaacattcttttgtatgtaatttgtggtcatgggtgaggatgtttatagttttgagcccgcggtctctggttagctttattgagtggctcggtttttgttataggtaggggttttggctcgcttccttggtttagattcgaggggctgcttttgtataccctttgtatacctagaggacactagtttggtgtctcctctttcattttaatatacttctctttacttatcaaaaagaaaaaaattagcaataagaactgcatcaaggatttgtcttccctctacaagggcattttggaacatggaaactactcttcccaccaccttcttcaacctattggttagaacctaagctaaaagttgatacaaccaacccattagattaattggccataaatctttcaaatcgtctacaccacctttgataggaattagcacaaagaaagggtgacatgcagattttttacaaacctttcttgatcttagaattcccggaagaagcctaacactccccccttcacaaaatcacaacagacttgccagaagtccaaagagaacccattagggccaggagccctttccccattcaaatatgaccaagtgcttaacacctcctcctcagagaaaggcaccctaaggcatcagccttttgactttctaaggctttgaacaacatcccattgatgctaggtctccaatttgttgaatcagacaacaaaatgtgataagcctgagcaacccttccttctatagtgctgaaatctaaggatcctgcgtcatatactttgtcttttgtgaattcttttatgccctactgttctgcattaattttcttaaatatatacatgcattgtgtagtttgaagtgttgtccttgtagagtttgcttcctagggtgagacaatacctaaattataaaagaagattattattaacatgctgctttggacttcaaatgcagacttgggtggtatgttaacaaaaagatcttaagttatttactgtgcagcttgagcattgaatgtatttctaatttttgttaggttgtgatgtagaaaaattagagagcgcacttattttgtggttccatcttatgatatgtatccattgttttggttggaaaattcaacttagagttgtacttttcacttttgctccttttcctaagttatatagtcctgaaaccattgtatatatttcatttataattcaaggaaacttttgtcatgaataatgtaacattactaaccagacttaatttgggttggactcgggttgagcccatgggcaccctaagccaacctgaacatgatgtgagatacttctttacattattgttttaaaaattcattacgtgtttatggctatatgtttatataagatgtttatgtttttcaaatgaaaactaaggctattttgttttaattgtggcttctaatgaagagcttttgagactatctgtatagtgaccattgtattggatataacttcattagtgcatttttctctcgtgcgtttttttgcgcttctaatacattctcttaccaaaaaaaacaacaaaaaaaaacttaattagtgcatctttggaagtactttgctgtggacaagtaatagaagtgcaattttgtccctttagaaaatgttgctaggacaagcgttacctaaaagatccacttcattttagaggtggcaatcagactgttgggtttgaatttgggtcaattgaaacatggccataaataaattgagaaatgcaaatccaaatccacatggtttgatgtgggagtaactaacttaaaaagaattaattatttgcccaaccaaacctcacctgatctagtctgttcttaggttgaatacttccaacatgaggttggactggttaagcttgggcatccttccaatcttaggattgggcttagattggccttcaacctgaccctgcctggagctttagtttagttgtgtccttgggttttgatgtgcagctgtcggatgtagctgttctgaattgcatggacaagccaaatatctctggtgatcacattgcttgagaagaatgcaatcaaaatgtaatactcaatcaatgaagcacctaatgccaatgtatctgagttattggtggcccactaatacaccagcaaccatcttcaccttgtccctaatgcaagatacacaggttctggctagggaagtactggcctaggtgttgcccagttgaaatttcaactactttgagatttcaaccattactatttgctgaccactgactacatttgcggcttcttgaacatgcttttgcattagttgctgtactgacattggtaaaccttattaacgtattaaacagaattttggtttctttctctgtcttgactatgcaaacatgctatgtatgtgttttcgtatgtggttgcttttgaactgctagtgatgctgtacactgtgtatgtctcttttaggattctctgttgtctgcatgctccaatattggggcacatcagctgaaatgactgttctttctctctctcacatgggtcattaactactgatttttttctttttttttttccggtaactttttatagtcttataaggcattatttatatgggattaaatactgatcattgaaattgttgttttttttttggggatgttggatttggtttcagccggttcttgcaatatagaggcccatttgccaaaa

SEQ ID NO: 11658 - DNA, 3331 bp, Vitis vinifera
  Intron number 8 from transcript GSVIVT01011543001 (locus G SVIVG01011543001) derived from phytozome v7.0 (chr-ID chr2 ; pos 12684760 to 12688090)
caacttcattcattccttcaccagtcacctactcagtaatgttccttatccctatcaatggagcagtgatgttcactttagaattttttttagtcagaggttctttgattgtgttgaattgatagtttcctcaattttagttctgccatggtggcattggctcaaagacatcaaactctgttaataaagttcatcagaataccaagttcgtttattacaaaaactggtgttccttgtttagttgttatagtatactgctagagtgctaggtttaagacaaaagaatgactgtagttgtgtgcttcattatctggccttagattctcttatccttgtaagggttattctagtttttgttcttgaagtttgggttataatcaatttgatttgataatttatatttcatttggaggtacatccaatgatacaatttatgtattgttttcagttcaactctatgcagaggctctgaggttactcgctcatagttttaactttttgtcttgttattaagtttttttttttggattttgattgttttatttctactgttacaaatatgtgtagtttttcctaaacagctcattgtttgaggaatagtaatatttctttcaaatacaaattatggttatattaaaaaacttcaattatcgtatatttgtaatccaactgccagtttttatccataattctctgtttttttttagaagtaattaaaattgtcataccataagatttgccaactttaaatttatgtcgaatgaaaagtggaaatttccatgacataaagtactacattgactatatttttagaatcataaaattgtgattacataagttttacttttccaattctttataggattgacattagtcttgttaaatttgtttgtttaattaggcaattggttgtgagaaggatagctgtaaggaatgaagccctattagggagtggttgtggagggttccctaagggagtaatgttgcatggcacaagatcattctgaacatttacaaaatacactctattgggatgctaatattgttgttaaatgatcatatcggtgtccttagaaggctattacactgatatttttgtgatttcacttggtattcaattggtgattgtacaaaaactcgattttggaaaggtacttagcaatgtgatctacctctttatgttcaattcccaaatctctatagagtggtgaaggaaagcgattctagtgtttcttcaattttgagttcaacttcctctgtgttatagaatcttcgcttttgtcctaacctcttggaccatgaaacagaagaacttacttgccttatggtgacattaggcaatgggtatttatcatctacttttcctgatgagaacatttaatctttgacatcctctaatctatttttgatcaattctttttttaaagtcttcattgtctccaccaactcgaatcctttcaacctacattctgaatctagaaatctaaaactcaaggctttgacatggctagtggcatataagaaggttaatacatatgatttattatagaaaagaataccttatatggccttcaactagaatgatatgtcatgtgtaagagaagtggggaatcagtaaatcatctttttctacattgctttgcagcattaacatagtggcacagactatttgaacatgcaaggattccctaggttccatttaaaagtttagtggagatggtgactatttcttactagtttgaaagccttcctaaaggcaagtctttatggtgcatttattgtctctccttattatggacatattggcaggagaggaacacataaatttttaaggttagaaagaagactttttagggcattaggggatctattttatttctcttcattttttgagcatcaacttgtgcaacatttgagagtactcgttttagataatattgttagattaaaacctagcgtacagatctactaggccatattggatacactacctatttggactccttttctagctaaacttagatggatattttctgggtaactaggaagtggggatcatcttagaacattagtatgagcattcttgtaacatgctggagagaggctagcccaaaggtgttagcgttgcttgaagatttgaagctagctaaagctaaaggtctctccaatattttagtagagggagacctggcaatagtcatgtcttagatgaataagaaacaaacaggttgaagggagttagataggtgggttcaccaaatcctttaaattgcctcgaagttggagtgctatttttgttgaattctttatttaactaatcagattgtgaattcgttaacaaagagggaagcaaaacatttgacctcctttgtgggggattttctacctccaggaggaattgattttataattgtgtcttctttctagtttttgattagggattgtaattttgttaagggaaaggatctctcccttccttgcatctaattattttttagcaattaaatgtttatttttgataaaatggaaaaaaatatttgtttaattagtctatttgttggtgcattttgttcttttcaaggaacaacttgtattgaaaaggcataagagataagcaagggaaactacatagaaatgtgggaattaggctacatagaaatgtattctattcatgttctgaaaagcagtggctttgctttcctgcaaaaggcttgcattagatttgggttgatgtagggaaccatggaaatatcattctgaaagcatggcaatggtcaccaatctcctcaatgaaatacatggtaggggttgcgatgatacatatacataacaaaccaatttgccctagatttcgttcttttttcctttttccttcttggaaaattaaaaggaaaaaagaaaaggttgaacataactgcgatatcatttattagagtgccacaacattttcaactttaggataagaacactgtttgattccacatcaaatttatgatgccacatcaaagtctaaatacctactatgatgtagatattccctttcttgactttgtttccatctgaacaaactgattcaaatttgagaagttcgttttctattggcaaatcctaaaaattgtaaaaatgacagcctttctaggaaactaattgattcatagtaaaagtaagggaatgagcttgcttgtaaaaaactgtttgtcagtgtagcaattcttccaaaatcttccctttaacttaagctgatatctgtctccttttatgtgcatgattaatctctgttgacttttctctgtactgcaggatccctagaaccattggggtgtcaataccg

SEQ ID NO: 11659 - DNA, 13111 bp, Vitis vinifera
  Intron number 5 from transcript GSVIVT01012900001 (locus G SVIVG01012900001) derived from phytozome v7.0 (chr-ID chr1 1; pos 6657349 to 6670459)
tgcgccgtggtgttgaccttaaggaaataaatttggtaaacagaaaactcataattcttgtttaggagatttgataaatgacaagtctccttttgcctataaaaaatgacaagtctccttttgcctataaaaaatgacaagtctttcctttcttttgttattgtttttcatttcaaatcataattttttaatgattattagtgccattatactttttagtagtatattgtggtgccatctactcttgaacaatatgctcttactatggatcattgcagcacttgggtgagccttctatgagccatccctacttaagttagaaatatggtcctatgaagaaaaatatttcttatagaaatgcttgggaaagttggcattaaatgtcattattgactattcttactattatgataattaaagttattggggagcaacaatgttgctcttctaggtgacttgacgactcaagaaaaaagcctaggctcagagtgtgtgtgaagtcgggtgttatattgaatactataaaaggtttagcttcccttattcatatcaattggttttcaaatgagatgtgaaagctcaatctaagaattggtattagagctaaaggttatggattgaaatcacaagagcatcatgttgagattgggcttattgggagcaacaacaccactctcctaggcctttgatagatgtcatgatggatatggaaataggtctgggcccaagatgggtgtgaagttacgtgtgatgtggaattccgtaaaaggtttgcattccctcatttggcaccaattggtttataaatgagatgatcaaagtctaatctaagaaaatcggtatcaaaggcaagggtaatgactcggagttacaagagtgtcatgtggggaagcaacaatgccacttgcttagacttgagatgactatcatgatggctaaacaaacatattcaaacttgggagaagtgtcaattctggtaggatgttgaatgccataaaaggcttaacctccttcactggacaccaattaggttttaaatgaaatggttaaagtttgatccaagaaagaatctaaattatagatatgtgcaatggtagatatgaatttgtcacaattaatggactcattctacaacatgtggtacaattctttataagtataaaatgatgcatatcacaagtacatatcctatctcaattgtatctttctatacatataggatggatgatctacatggaggcaaccgattgcaattgattatttttatagtttttttattttttttattttttatttttaaaccaaatttgaaaatttttccctagaaaaatattatattagttgtttaaaatgtactttaaggttaaacaatgatgacaaaacaaaaaaaaaaaagatagagaatgatcttagatgaatcctatcaaaaaaaaaaagaaaaaagaatgatcctagatgaaagcactatgcaattattgaatgttgaccttggagatgataatgaatgaaaactttagcttgatacataaggtttcctttgaggaatagagctctcttagggaagtggctatggaggcttcctaaggaaagtaatactctatggtataaggtcatattagtatctataggctacactccaatggttaggatgccaacgttatagtcaggtggtcacattattgcccttggaaggcgattgctcaagtcttcttcaatttttgcaatcatatgttaatgaggatgaatctctaagagatacatcaagaaagggaatttgtattagttgcaattaaagtaggattagtattacttggaattacattaggattaatattagttggaattaaattagaattagtattaaaattatgattagtatttattggagtcaaaataggattagctagttaagttataatataattaaaatttgagtcatgataggtttattagagtcctagtagattttggatctcttagagaaatctataaataggctaattgatgtaaattaaaggaatgaattgattgatattaataatattatgttttttcattacaagtgttgcaatcctcaatggtgcgattctattgatttttcttctaggtgagactcctaaaagactctaatgagactctaaggtttctatcttttcttcatcgttttttttttctctttattttattttattttattttttctctaccataaactttattctttgttcctctccttatactctaaaatcaaaaccctagcccacctatttttgagtgtagacaaccatcctagggttgtcctacatcatatgtattttttcggtgggtgatagtgtttagatttgtttttaggaagccttgtgtaggggagattgagcattttgttcccaatttccaaaccttttcaaagtagtgagagttagaggttatcttattttatgcattcttggtttctccttttcttgtgtgtcttggaatgttaatttttatcttcacctcactgattcaaaaattgaggatattgaattttttatgtcctctcttattcatctatacttgtcctctttttttaatcagatgtgagagtttagtcattgatgtcctcaaatttatttattgtaaaatatttcttcttagctttatctagatctatgactccaacctctttctttccagcaaatttcatttggaaatttaaagtttcatccaagtttaaggtgtttacatggcttgtggtcagtatcaatgatttgctataagtgaagagaccttaaaagctcttagtttgatccattgcactttgtgtttgggaagtggtgaatcaacactatgtggtgactttgagcctatagcataggttaattagactagtctagataagttgggttcccttaaaaatatgattgacatgataaatatttgttttaggtggtttggaaatacctttagaagtatagtattgtagcatgttgcttgtctcatattgatttggatagtttggtaaaagagaaatgcaagtactttttatgacaagtagaggaacctagagaatatttgggttatgatttatttttgttcctgttttcttttggcctctgctagtatagctttcgagagtactcttcttagagttctacaacttaattggaatttgttgcaagtcaaaagctttagataaagatttgctccctatatggattccacctctagtgggttcatttaagttaaattttgatggatgtgctttgggtaacgtgagttagatgaggattggagttgtgataagagaacatagtggtatagtgttgggagttttttcaaatatctcttttggagggtttaccactgcccacggctccttggctttctaacttattgttggtaggggattaagctattttggcaccctaggtgactaaatcaaatagtggaccttagaggtataataggtagcttcaccaaattctagatgttgctaatgacttgggtttttccttctcttagtctacgtgtttagctaattgtgtcgccaatcatttagcaaaacaaggagccaagcattgggtttttttttttttgtaggagatttcttacctccttgagcagtgtagtgttgctctaacttgtacaagttcatgttgtattcttgataagtatggttgtcctattgtttctactcaagaagttaattattttcttctgtgctcaatgttagtatatttttagaaagatttctcatccttcatttgtacttgaaattcatattaatgaattagttcattttttattaattctcacacatattaggtttctgtttctatgtgttcttttccctttatttatttatttttaaatttttatttatttccttccttcaagggagggaatgataatgaacttggaaagttggaattttgaaaatgacacaaactcaaatcaaaagatctagccaagtatatatttatacttatatgtaattatagtttatatatatatacaaaattgatgaatatcttatttaccttttttgaattcttatttttttataggtaatttttctctcctttttggtccatggattgaacttggaacctccttgtccccacccttacacttccacaacccttctccaccttagccaagcttcaaggccttaagtttataatcttccataaaattggttatgtgttgcttttatactttgtttaaggcaacatatttgtggttcatatatgcaaacatattttatcaatttgtttttcttatgtgaaagaatttataatacactttattatatgacaaattattcaaaaaaatagttaaataattatcaatatgatttatgaattgacaactatgattaaacctttacaagagattccattaacattcagagtttattctaattaaatagtagcaactaaagaaaatatggaaaaaaatttcaacataacaattatttttatgaacaacaaccaatgatgcataaaaaacctaaaaacatattttattgcaattatctcaaaatcttttatttctacaaattacaaatgacatttttataatgtatttgatcactcttgcaaacatctaagtatttgttctttttgataggcaacaaaatcatgtattaagaaatgcctaaaaagatggggtgcgccccacgtatataggcagtatcaaatatctaagtatttgttgtattttagctgttagacattgtcttttcatctaaagtttccattgtaaactataatttcacatcattaataatatagctatacacttataaagtaatatgtccaattccaaacaaaattttattgactttcttaattaaaaagtatcatttcaagaaagtaatgagaattaatgaagcgtaggatatctaaaaatttaaagaaattgaataaatgcatttttttaagttaaaaaataataatttttgacatgaatcacaggcaaaggatgagaaatttttctagaaatacaaaggatgatacaaaaggaaagtaagacaactctacaaaatcaacgataaaataagaacatttacaaaatataggaacaatgtgcgacctaaggggataaatatcccctacacattttgctactggatttgcaacattattagctaaatgtggaggactaaggggaaaaaaaacaacttgagctactagctagatttaatcttggacaaagccacatgttgtactttgaacaacctcttcgacttagatacccatgagatcacgactataaaatccccttccactaataaattgttagagtcaaagcatggacatgcgataagcgctccaaaagagctaaactctctaccttaaaagccaattcctctcttaccagttgagagaagattctcaacaatgtaccatggtgatccctaatcacaacttgaaatccctagtaacatcgattacctagagtagatccattaaagagaactcccaacacccatagaagaaataatcatcacatgtgtcatactctagggagaaatataatttgtcctagcaagattgaatagcctatgctaaggactcaaagtcattgggcaatgtaagaaaatgatcaatggatactatactctttaggcacataatagaataattagggctgagagctttgaagtgctttctcatttgtagcagattattgatgttgactttcttattagctacaagccatgtaaaagttttaaccttagatggggctttagattcctgaatgaagttgactagaagaggggggtgtggggttggtgcggggcttggaataaagggttttaggaagaactggaaagaagagtttatagaaaataagcttaagaaactccatgaccaaactcttacatttgggaagaaaggcgataactacacaaggataagggatgacatgatgtggaaggaacttgcgaaattattagatcacttatttcttcattgtagagtgtcatcacaactatgggctttagttttctctcatgttaaggttttgttagttgtcaccatgaatgacataatggcattattttgatctcttttctaatagattttctcataaaaatactaaacataatttgagttgcaaacatgatctaacaagtttattttattgaaaattttggattaacaagcttagtagtaagaaaatctcctgaaattaattgcttgtgtattacattttgaaagagctaaacattttgaaggaactaaaagaacttgcatgaaatgagccaagatgggcatttttgaatatgttgataacatgcaagatacccatcaaaataaaatagggagtcctccagagcaggctgcctaggcctttatctgatcacttccctattttgttagagggtggtggtttaagaagaggaccctccccattcagatttgaaaacatgtggcttaaagtagagggttttatagatctcctacggagttggtggcaggggattgtggttagaggcagtgccagctttaggttgggtgcaaagttgaaggagcttaaacaaaacataaaatcttggaatagggatgtgtttgggaggctggaatgcaataaaatgtcagctcttcaacaagtggaattttgggacctggtggaaagcgagagaagcctgtcagaggaggaaacaaaattaaaaaaggatgcaaaggaaaattataaaaagtgggtgtcattggaagaagtccattggagacagcttttaagggaattatggttaagggaaggggacagaaatacgggttttttccatcgtatgacaaatgcccatcatagaaataactccatggacaaaattaagataaatggggtgtggctgtcagaggagcaagaagtgagggaaggggtagctaatgcctaccaacaaatgttattagaagattcagactggaaggttgatattgggaggctgcagttagatcaaataagctgccaagaagctgagaacctggagattcctttctctgaggaagaggtccactctgctttgatggatatgaatggagacaaatccccaggcctggatggcttcacagtggctttttggaaaaactgttgggaatttgtaaaagaggaagtcatggaaatgtttaaggagttccatgaacaaagctcttttttaaagagcctcaataccacgtttctggttcttataccaaagaaaggaggggctgaggaccttggggattttagacctataagcctgttgggggggctatataaattgatggctaaggtgctagctaataggctcaagaaagtgattggaaaagtggtctcccctaatcagaatgcttttgtgatgggtagacagattttggatgcctccctaatagtaaacgaggtgattgattgttggcagaaaagaaaagaaaaagggcttatatgtaaattggatatcgaaaaagcatatggcagcattaactgacagttttttatgaaggttatgcaaaagatggggtttgggtcaaagtggttgggatggatgtggagatgcatctctacagctaaattttcagttttggttaatggggtaccggcaagcttctttcccagtgccaaggggtttcgtcaaggagaccccctatctccttacctctttgttatgggaatggaagtgttgagtgctctcattaggagggctattgcggggggcttcctttcagggtgcagaatccggggaagaagaaggtcggatttgaatatttctcacctttttttttgctgatgatacaattgttttctatgaggcaaagaaagagcacctaactcacttgagctggaccttattttggtttgaagtcgcgtcaggtttaaggatcaatttggccaaaagtgaaatcttcccaattggtaaggtggaagaggttgatgtgatggcagtgggttagggtgcaaggtgggctctttgtcatcttcttatttgggactgcctttaggggctcctaacaaggttctctctgtgtgggatggggtggaagagagagtgaggaggagacttgtgctttggaaacgtcaatatatttccaaaggcgggagaatcactctcataaagagtacgatggctagtatgcccatttatcaaatgtctctctttcgaatgcccaaggtagtagcaagaaggttagaaaaattacaaagagactttgtttggggagggggaaacttggagaggaaagcccacttagttaattggaaggtggtttgtgcggataaggagaagggtgggctaggcttaaggaagctagctctcttgaataaggccttgcttggcaaatggatatggagatttgcttgcgacaaggaaaatctttggaagcatgtgatttcggtgaaatatgggcaagagggccttggttggaggacaaataaggctaatgggatgtttggagtaggggtttggaaggagattttgaaggaaatagattggtgctaggaaaatatagtgttcatagttggaaatgacaataaaatcagatcctggactgaccattggtgcggccgtacaacgctgtcccaaagtttcccacaattatttgccatggttgcacataggaatgccacgatggaggaagtttgggaccagaatttcggtcagggaggttggaatctaagattctttagagcttttaatgattgagaattggatttggtaggaaatttgctccatgtcctaaggggctacaggctaactttggaggatgactcagtctcttggaagggtggaagaaacgggcagtttggagttaaggaagcgtacggtttattggttaaccccaatgacaccgccttcttgaagaattgcatacgggtgggtagagttccaaccaaagtcgctttatttgcttgggaggctacgtgggggaaggtgcttacattagataagctctaaacaagagggtggcagctccctaatcttgctttttgtgtggtcgtgaagaagaaactgtaaatcatattcttatttagctggaggggcccttttgtgggaaaaaaaggaaaaagatttggaaatccatccctttgtgcattttttggacggtttggaaggagaggaataggctagcctttagggggagttctttagcaattcagaaactcaaaaattatttggtctataatttatggagttggactagattgtatattggagaggagtcgctttctcttataggcttcttggagtggttagcatccacttaagggttggtaaggcttttggtttttttcttatcttgtttttgaggttttagctaccttgtatatcccctgtatgctttgtggttgtttgccttttgttattatattccttgcttatttataaaataaaaaaaaaaaaaaaaaaaagggaaatgaggcaacctaatggcaccttgagcatgcattgtcaataatgggaattggtatggggatgccagttgcatgagtggtatggatcactattggtggataccttgtgaattttggatcctaacattttttttataggccaaagaataatttgtattagaagcagttgaaaaaaagagcatcaaagtacacataaagtatacaagaagcccaataggcaagcagaatggaaaagagaataaaaaaacctccttctatctacttggagctcaaccaatctacaaaacttatcatagtgaaggaattgtcatctatgtgtactctaacctaatctagaaaggtatacgtaaaggaagatttgatttcttgattcaactgtttagtatcttccaataatgttctatttccttcattcataaaggccaagatagactcaaaggagcaaccctctgaactttcttttgccttttctccacaaaagagtcatgccaaattagaaggtttcctctttatgaagaaaacattacccaggctaccccaaaaagagaaaaagcaactgttgtaaagggtgaaagagcatttgatgagcgaactcctcttcctctttacacatatagcatatgttttgtggagtccataacctctgtttgatttaattaaccattaaacctcttcctcatacaacttctaagcaaggaaactcactttcatagaaattcaattgttccacaccatgcatgcagggaaaggctcacttctgccccaggttgatggggtatagaaagatttaccaaagaatttgccacacttggattccttgcaagtaaatctatcttgttcatcccttctaattgacgccgattattgtctttgagaaaatgcctctgttcctttcaattccaaatcatgacattgtctgtgaaattgaggattccattgaccccctttcccaacttgctcccatctctctaatacccaaaggtgtttatccacgactatagagaataaaattagaaaggatgggaaatttactaaggatgagaaattttctgttaagtccctttatggtgcattggagcttagatatgcagtcccgtttccaaggagcatcatttggagcccttgtgttccttccaaggtgggttttttcacttgggaagctttgtggggcaaggttttaactttggatcaactaaagaggagggggtggtttctagctaacagatgtttcctttgttttgccaagaagagtccattgattacattctaattcattgcaccaaaacaaaggttttgtgggagttattatttgctttatttggtgtgatgtggatcctcccattgtcaattagagagatccttcttggttggcatggttcctttatgggcaagaagcgtaaaaaggtttggatgacaagtcccttatgtttcctttggatggtttggaaggaaagaaataggattgctttggataatgaggagctttcaatttaatggatgaaaaatcttttgtttgtaatttttggtcttgagttaagttatttataaatgaagaacctttacctttaatcaacttttttgattggttgggtcctagatgagggcgggtgagatttttttgtatcccttcttttattttgtttttgtttttaggtgtctgttgtatactccctgtatgctttgggctaacctttaggtgctctttttttctttatatataacatttttctgtgcttttacctatcaaaaaaaaaaggaaaggattcttccgtagcactctcaccacaccaactatctttccaaaaatttaccctccttttgttacccaatatgaagtaagatgtacttctaaaatctcccactcatttgtaatagacttccacaaccccacccttaagcccccttagcccttgtcctccatcccctttcattggccccaaaatttccaactatgacctgtttccaaagagattctctctatgatgcatatctccatctccattggacactgacatatatttgaggactctctcttctcaagttttaatgagcattaatgatggtttggcttaggaaatgcatagagagaataaattttctggattgctgcatttaatgtcttgggatggaaagataaaacagatttgaagcatgctatcagggttgcagataattatggttagagcatttgtggtttctctggccaaggttgatgatgtctccatctcatatgtgttggaagattttgtataatttttgtcgtgttttccaaatattccatttgttgaatccgatattggaaataaatgggatgatgtgtgtgacttatattgttatctgttctatatgctttttggagttgtggttaggtatgtgggaggcttgtgcgtgcacggggtccaagcccacccaataagatttttaagaaccctaacctgaaaccatctaactgggtgcattacttggtcttgttgcatgttcagcgagacctgtaggattcagggttcctgggtgtgttcgaattgactaacattttgctctaccttggtattcttattcctgatttgttagaggattataattaggagagaatatgtgacctactttgtcatttgttgcctttttatccattcactgaaaagcagaggctctgcatattctgatcatcttttctccttgttctttccatacattctattgcccttttccattcatcctttattggaggcacattttaacgtcatactatatttcttccattttggagtgcacccttgcagcagactggttgttgaatcctagatgataggacagtagattacttgctgcaatgggacaatctcagagggtagatatactcttgacgaatattgcattctattgctcttttctattcatccttgattggtggcacattttaacatcatctatatttctttcgttttggagtgcacccttgcagcaagctgattgttgaatcctagatgataggacagtagattacttgctgcaatgggacagtctcagagggtagatctacttttgaggattatttatgcaccttgatctctaagttctatatataattttcagttcttcacatatctgccaactactgtttggatttcagtttgtcttgggtttattcttggattgctttctgcttgttgactttgcctatacataacttccaacactatgctctgttgtttcttcttaatacactaaggatctgttttattctgcactttattgcctaaagaaatctttaccttaaatattgtggattatagtaatttaaccttgtcaaacaaaggtctctctaactccgtcaacactcatgcctgtgaaccatggggtttggtttgctgaatctgattatgtgtggaaatttattagacatgcaataacttcaactcttgaagtgttgcatctcgtttatggagcagcattcaacagaaaatttgttaaggttgagcttcatagactttaatatagtcttgttgtgtgacttgtggctcaatatcagtctgcgcaagtaacaatttgttgcatttagacacattttttaagaaaagttttttctttttgttgtttggtatccaatcactgtgtataactgcatattagagtataacctcttgcttttggaaatcagtagtccaatggattctcccaagttcctaacaactttttgattctgaattgtagaaattaaagcagattgttttgg

SEQ ID NO: 11660 - DNA, 2956 bp, Vitis vinifera
  Intron number 7 from transcript GSVIVT01031509001 (locus G SVIVG01031509001) derived from phytozome v7.0 (chr-ID chr6 ; pos 17792025 to 17794980)
catccgctgttgtatttacttccttcatgcttcattttattttgacatatttatttactttagtgcattttatttgttatcatctcatctgaggtggagttgagcaagtttttgaatttacaaagtggttgccattggtttcatgtgaaatggaggagatggatgtatcttatccggtgtcaatactttgttatgcatgggcatgcgttatatgattacaaaaattaaggccttgtttgttatgttggattagtggtcaagagatgatagaatatatactaatgtgtggtttgttattagataaaaattgctttataagtagcttagactgcatggcttttcattaaaaattaataatattaattgctaaaacatttaaaatttaataatagataaaataaatattaaattatatatatatatatatacatacatacatatacattttctttactttgtttttttttttttttggattaaaaatttaattttttggaataataaatgttgtaccacattacttcacaagagagagaaagaggctggagagattgaagtaatgaaggaaaatagaaaagtgaaatgattcatgagataagtaatatctcgtctctttagtaagattattaaattttatatagaggtaatataaacaagactcaagataagttatcacactcacttatcctattagttggttccaaaaataggaaaaaaaatgagaataagatttttacatcctattcctgcctactaaatatggtccttgtaagttacagcattggggaaactgttgtaatatttttgtcttgacctgtagtggtactaagctttaggactgcaagttatactgcctggtaatatttcagtggaactgtttccatgaagggtgggtggaaaggaggcctcacaacgacatgtaatttctttttaataatttctggtagtttgggcctacattttgcatagggctaggaaatgacatgtatgtgcatagaatacaatgactaatgaaaattcaattctatgggtgattgttattcacgtgagtgctcattcttggtggagcataattctaaatcttaatggatcatcaatctcaatacacctatatctcaaggtcttttatacaaccattgctgaaatcctaaacattcaaattgattcaatataatgcacatgtttgtaaagccctaaaaacacttcaaaacacatgaaagtgcttgtaaaatagggctcctttagctttgggtatttctacacatgttatgaaaatgttatatcttttgaaaaaataaaagtagataaaaaggcaaacaagtcattgagattattttgaaccaaagaatgtgaaagtttgttcttaataacaaaactacctagaagtggtgaataaatagttcaagcttcatgtatcccaatttaaaaatttgtttggattttcttctatatcaattaattcaatcgggaatataaaaagatcagtcaacacaaggaacaccaaatatacttgaaaaaaatatgtatggattcttttagaagctctgttgatgtaaaaaaaccttgagttacacaaccttagaataaatttccaaaatttgaaaagaaaaggtacattgttttacctaatccggacacacctactttacctaatctggtgcacctaccctaagagtcttatacaattagcacctacacttttctctcacatatgcaacacaacacttcatgccccttaatggattactttaaaattgtatgaggcaagcagttcaatgcatcacgcctttctacagaaaggacttccaagaaggctgttgaaagagtttgagagttaagagtctcaaggtagaataatggctacgagatcacttgcctcattcttagtctggaatgcttggtttttatatcaaaaccctagttggatatttagagtaggtttttacaaagtaagtttaccaaaaagtctaataaaagtgaaaaaaatcgagctaaaaaaaaaaaaaaacaatttggaagaattagggttcaaacttcatgtaggggccatttgaatcttggaggacttttgaatgttcattcatattttcaaaattttcttccatttttcaattttttttccccaaattccatttcctttacttatcatagccatttaccatactctaatacttccaacacaaatatacatcaaatgaattcaactctttagcagcttgaagtcaactacaacctggtggaacaagggagtttgtggttcatggtgtaattataaggagtgaggaaacatgaaatgttttgaaaacctagtagttgtatctagtttttgttctttgtaatattctatatggtatagtcaaatgattctcacatccatgaacataggcatgttgaccgaatcacgttaaaacctcatgtatctttgtgtggattcctttatctttgtgtttttgaactaacattatttgcattaaaacttctgttgggtcaataattgtaaggtgattttttgagctctgaccttactaggaatttgatgcaatcactaatattctacaagccaatttctccccctcataactcacattgatttcctcattctcactttgttgagtcacatataatttgatcacttattcacaggcaatgaatggatcatcttggaaagtagtcctgagttatatccgttcattttggcccatttgcctgtcatcttgttaacccatccatgtctgttgtaattcatgtgcacatcatttgaatcaagggtactaaattttgcatatgtttgttttggaaattaatttggtcggctgcttcttgctgataatcatagctttgttccaatactaagtgattctttatatctcattatttcatctggataacctgttatcttatcatcagttattttatggcaggatattcaaatttgttttctcggaaccacttaaaa

SEQ ID NO: 11661 - DNA, 26509 bp, Vitis vinifera
  Intron number 8 from transcript GSVIVT01029389001 (locus G SVIVG01029389001) derived from phytozome v7.0 (chr-ID chr1 7; pos 16047082 to 16073590)
ggctatagtttcatctttacggtattactctcttctcttctcttctctctccgtcataatatgaactatttattgtatcgtaatattatcagaatatgctttaatgtgataatggtagctacgatgactagtttaatgcttgattattttcaaaccattaacattatgtttatattattactagatgtagcatgtagaatgcagatgtttcaattctctgatgctatgaagtgcaatagaagtaaaatgattcaaagcgattcagaaggagaattttgagactccgtaaaagtttgtcaagatgttgagtttgaagcacattgatatgactaaggatttgaagtagttataaggaggttaagaaaaaataaaaaaacataaaatttaacctttccaacccatgctagatgatatctaagaaatgaagacgttaaacacttgaacaaagaaagataatacactggaaagcttgagtgaatgcaaatttgttttaataaggaacctttaaaaagacattctattttttatttttgaaagattccatacaagggcttggtcaaacaagggctttccctatttataagcccctaagaaatattctaaaatgtatgggtttctgcagactctataaccatcctacgctaggtacactatgtaattctggagcattctagatactactagctcttaccttaatttaaaattttccacaatgtttcctttatccaacttcatataggagtaaacacttttagaggactccaaactcttctagaagattctataatatgccttagtggtttttcatgtagcatcttgagcaagttccaaaaccttcttacctaaatatacaaggatgtcatttatgtagggtcagtaagcaacatctttgtcaatgtccttatcaactcttgaaactactataaagcctttaatgaatctaatgtggcctcactttctattagtcccttttagtatattatgtactttattaatgaagttagcctttttcttagtgcacttaacaattcactttgagtatatggattcctttcaatgggaattctcagggtatatatggcccttatttgctaacttttttttagaatagttctaaaagaacaatttttgaaaattgttttctaatatgttgtcaaacaaatgtctgcttagaacctgaaatatttttaacttgttaatttctatattttaaaatgtttttaaaataacttttatgtttagtgctttatttttaatcattttacatgtttgtatagttaatttttaaaacaacacatagagaacgagtgaaaacaaataaaaaaacattatctaaaaacaccatgttaagtttctgattttaagaatataaaattgttttatgttttttggttgacaaatgtgttttcttttttttttttccttttttttgaagagtataaattgtttttgaaaatagttaacaaataggcccataatttttgttgaggggtggatcaaagtgattgcaacattttgaagttctagtagaaacaatccataaccattataagttaaaccaattgatatcacatagaaagagcattggtttgttggtataatagggagtttctaatcttcaataacccctttctccactatcaagggtcacacatcatgctcttcttagaaccttgatacccttatgctcttgcaagaccagacactccaatgaactttcttgttttacctacagtgttagttggtggtcttctccttggttctaacttatccttatgacttaccataagtaatgttgaagttaatttctttcccactagtgcatgtccatgctccagtagctttagctttgaagagcctctcttcctataaatcaccaatgactctacaactactatacctctagtgatcctccatgaagtggaagataagttcctcttctatgatattcaagatctttagaatgaaatatgagaactcctttacgttttattgaataaacctattatgtattaacctattcatgtgcttatgtaccaattaagagataaccttagggtagaattgccttttggtttctatcttgtagtttgcctataactctttatagtgcacaagcctctttgattgttagcatacctccaatgtccataaagctttagtgctaatgaggtagagcattgtggtatgcaccttttctttcttatctaagagccttagtgccttaaaatgcatttccatgtgtcataaatagttatccaactctttggaattaatattgccttcgaatatttttggcttaggcacctccactctagattcctcttaaaaaaccaaatcccttacaaaaggatgcttctttaggtaactacttgttatcgaatgttcatatcatacttatccatctatgttgcccgtgtcttcattttttaaaagacatgtacttcttgtgtgacatttggacttgaactaagttgggaactcttcctttcagctcttgagtctacttcctaagggcccttaagctcttctcaaggctttgttctaacaagtgttaggatagagccattaaaagtattacatgatgtaacaaaatgtggaattcattatttaattatattttagtttcacttttatctatccttagttcatgcattacactttatgagcatttttacttgcatctttttcattgtacgtgacttgggtgcattagaagttgcacgaaagatctaagtcatgggttccttgcaaataaatgacttgttcacaaccgattcatgggtctaggcaacccattcgaggttatagtgtgctacctcctaattggagggatgattggttttggctattaggagaggtttcccatggtgagtgcactagtgtgtatggttacacattggacaaaacctacggtgagttatgacttaagactatcaagtagtcatgacctcaacaagctgctttattatgttgtctctcaaccttgagggaatattgagtttgtgctaaagttatcaatggttttgacctacatatgagatcataagttgatcatatattccctatggattgggtcacaattgatggaaaccagtagcaataggtattctcaatggaagcatcatgatatttcatgagattgagacaaagtgttcctttaggtgatcctaggaggtgtgttcatggaaactatggtcataatagttccttaagtagaacttgacacaacctctttgagagctaagacatgtcaattaaacatacaacaggaaaatctgtaactcaaggatagtagaggtagtcttgaaaggttgatatctttcaccttgttagactatggacaccaattcatggtgagactaaaaacaatggataataggtcacgaacttgagcacacaatgtcttattgttatttacataggatattggaagtcagttgattctttatagtgggatgttgaatctactttagaattggattctaggggagccagtgctcttatgggtcctagtggtccccactcttagcttatataccctattggcataagttatgagggtcagattagatctaggttcatttttatgcataaggtcattttggtaattatgcaaggttgaacaaaggtaattgagcaaggtctttggattgggttaattgattaattagtaggccctatgaggctaattaatcaattagtacccaatttaggctaaattaagttacctaaacccatgtgggctcaagtcaattaagcgtagttatgaaccctataaataccctataggggttagggtttccatcacttttatcttccagcatccaaagagaaaaagagagccatagcctccacttttctttcctcctcactgaaagtgtgtcaaaaacaaggttgagtcattgggcaaaagattgtgggtttacaagacttccaacaacttcgaggtcatcttcaacacttgaaatttaaggtttaggaacatccaaacctaaaggttagttctttaaccctaaaaatcaattttttgaaaatttaatattattaccgttggttagatctaagatgccaacaacaagtccatcatttctcacatgtccaccatggctaactccacatttgcaatccttatctccatgttggaaatggaatcacaagacttatatttttgtcctcttctcaatcccgatcttcttcccctggattagattgctaaatatcaatttttatttctattttttactttcaacatgcttctttccttcctcgatcataagaatgcatcataaccatgctttaatacaccttataatgaacttaggcctcttctaagaatgtcactagtagcacttctagaaaacttatgttggcttaatatttctaagttagttttctaatatatactagaaaatgtttagacaatgaagatgttgggattgagccctagaaagcatgacatgatgtaacagatagagattcatttataaatttatttatttatgtttcttcatttccctttattatcccatttgcattaattggttatttgagcatacatgcctcacatcacttgtattgtacatgacttaggtgcattaagagttgcacaaaagatccaagtcatgggtttcttttagagtgatgagttttccacaatcggttcatggatttgggtaatccatttgagactgtagtgcactacctcctaattggagagatgactcgtcttggtcgtggggatggttttcctatggtgagtgcactaatgcatgtgtacatactaaactggactcacggtgaattatgacataagactatcaattgtcatgattcactaagctactatactgcatggactcttgactttgagaggatattgagcttatgccaaaatcaacaagagggtttgaactatgggtgagaccctaaggcggtcatatatctctatggatgaggtcactattaatggaggttggttgcaataagtattcttgatagaggcactatgatatctctcggattgagacaatgtgtcccctaaggggatccaaaggacatgtgatctacaagactatggtcataacatttcctttagtggaaatttggcatatgcttcttagaacctaaatatgttaattaatcacataataagtgggatctataactcaatgattggagaggtaatcatgataggtgatagcactaccttgttagattatatacactagttcttgggaagtttgcttgtaatggatagtaggtcacaaacctaaactttgtctcattgttatttacatagggtgctagagtgtagtttattctctttagtggaatattgtatcaacttcaaaattagattatgaggaagccaatactcttatgggtcccaatgatatctactctgacctcgtataccatgataacaaggtttatgaggattggattagctcttggttcactcttgtgaataagaacattatggtaattatgcaagtttacataggagatagtgaacaagttctctaattgagctaattgattaattagatgctcttgtgtggttaattaatcaattagaacccgttttaggctaggttaagtgacccaagccttggtgggcttaagtcacttaagcctagtaggggaatcttataaataccccttaggatttaaggtttccatcactttttggtgagagtcgtcttccacctccagagagagaaagagagagagagagaaagagcctaggattcctcaattttaaagctcacactttggagtgtcaagattgtagttcaggtcattgagtaaaagatcttgggtgtatgagaccttcagacttttcaaacttcacttcactaagcaaaattgatttggaaacgttcaaatcaaaggtaaagttttctactaacttttctctagatcgtacatagttaaaatttttatttttgcttttgttgcataggatctagtgccctagggtagtttgcatgcacctatatgatctagggtatgggaatagatatatctagggttcctagtaattggtatccctgggataggattttacatgtttgatttgctctaaggtgagctaactctattttgtagggcttgtttttcatctcatcgctctaggaatgaatatatgtgggttttctatataatatgatggttataattatgattggattgtttgtttttcctagaatgggttgtaagctctgtgtttaggagcataggattttttcttgattgtaaaaatctctcttttattagattggttgtaaactccattaatggggtataggatttttgtgatgtaaaatattattattattattattattattattattattattattattattttaccaatcttgtaacctatgaaaggaaagaaagcaatccatgacatcaatcatggctattgtgactcccactctgaccaaggtaagtttttgatgtagaatatgcaaaaaaagcagccttgggtgtgtaggaaagggatacaatgctcgagtgttgagattagcacttgagaggctcgggcacttgagcaatcacttacaatactcgagcaatatgagtaatcaagttgtgtttttagcagtggtaagttgcttctagtgtcctcaaaatttcttaggcatttgggtgctcaagcgcaagtgacaatagattggtagtaaggaaatgacaacaactaaaagtagcaaattgagatctttgaaatagattagggtttttaagtaactaaccctatttttggttgtagatataatttttataaattaggatttttttttatccaaatgggttacccattttatgtaatagaatctctaaggccatgggaagcagtttattattttattatttattctatgctatatttttatctagtatgtgttaaataaataataaattttaaaaaattaattttggatttttcttaaggaaaataagttttcatgagaagttttttccaaggttatttttctttgaactaattgttgttaaaagatattgttattcctttttgaattatccacttagttggataggtggttttccatgctttcattgcttgagagaaagagaactacacctatcattggtcctctaggctcctcctctcagcccttgagaggaggaaattgttttgtatatggataatccaaggatagaggaataagaaaacaattcttttagcataggagtctcagtttaagaaataaataacaaatttaaaaaatatcatgatagagaatttattttaagaaatgttattagaattactaaaagtctctcttttcaaaagattaagtaggagaagaccttagcaaagtccaaaacctctactgtcgagttcattttgatttaggttcatcacgacccccacggtgggttaggcgctaggaatcaagggacatggactctccttatggacaagacttaacatgtctatagtgggagtaatcaccccccacaatggggttccttggtaacattggtagctcaaggacaatggttatacacttaacattggatatgaagtggtcaaataaccccactcaatcccacttgcatagtccatgggtaaaataaaaaggaatattaatcttgcatttggataccattcttggttaaggcagggaaatcaatctaagggggtctctagatagtaacaaggtcatagcctgcctcaagtaggcttgattcttatgatattaggatatcttacaaaaggatatgtagtttgagagcactacatttttgctaaactaattaccaatttgttgtgtatactcaattaattaatgcatggttttatttctattacaaatatcatgtcttataatctaattaatcttattctcactactaataagttgattaaaccaaactatgtggattggaaaaggaatttaaacataatactcaacttagaggagccaaaatggttaactcaggaaattgttccctctacccctaatgaaattccacttaggaggagaaggacaattatcatagtatgcagaaggcagatcaaaagagcaagcgtattatacttggatttttagataacgtgttgcaacattaacatgtatctatgctaacaacttatgatatctttattagtctccattagatgtttggtggcaagggtaggtcagttaggcaagttgctcttaaggctattatggatactaagatgttaaaaggaactcccattagagatcatataatttgtatgattagactctttaacgagatggagatccttggagataagattgatggggaaacctaggttgacatgattctaaagaccttgccaaattcttttaagcaatccaagctcaactataatatgaataagatggtaatgaacttaatcaaactaatgagggaactccaaacgattaaggggattcttaaggatccaagattcgtttagccaaaagaagaacactatagagtccaccaagtataagggaaagttcaagggcaaggggaagaagaagaaaagcaagggtcaaggtaattgtttccttcgaggtctgaaaggccacaggaagaatgaatgccctaaattcctaaagagacaatcaggtatgcatcattctcttctagccaaatcatgtttagtgttagattccactcattctctatggatagatttttgagccactgatcatgtttgtaattcattataagggtttcaactaagaaaaaggtcgaataatagggatatgtacttaacattagcttctaaagtaagagttattatacgggtagtgggtacccttatctaataatagtcttctagttttaaaagattctctttatgttcctgagtttaggaagaatttgatttttgtttctagtgtatgtaaactgaattattcattttttttatgtatagtaaacaagtttttagaaattaaatgattcatttacatgctcaagatcattgatagatagtctttattgtgtttctccgttatctattttaccaagtaatgtgagttatcatatctcatggaaaagaaaggaacctaacactaatcaaacatagctttgacacttatacccaagtcattaatttaaaaaggatctaaagatggtttaagtatggaattttaccatccttgattcaagaggatcttccattttgtaaaccttatatagaaggtaaaatgacgaagaggccctttactactaaagaatatagagctaagaaatgtttggagttagtgtatattgacatgcgttggccttttaatgtccatacacgaggagagcatgagtagttcatcatgtttacagaggagtactctaggttcaaatatgttttcctaatccgtagaaagtatgatgccttggacaaattcattgcatttaaggcaaaatcggaaaactttactactaaagaatatagagctaagaaatgtttggagttagtgtatactgacatgcgttggccttataatgtccatacacgaggagagcatgagtagttcatcatgtttacggaagagtactctaggttcagatatgttttcccaatccgtagaaagtatgatgccttggacaaattcattgcatttaaggcaaaatcggaaaaccaattgggtaaatgtatccaagcacttcaatttgatcgaggtggtgattacatgtctaattagtttgattctttcctcaaggagcatgggattatatcccaattgagtacacctagaactccataaaaaagtaaaataaaaatggagtagtataaagaagaaatcgaatattaatggacgtggtgagatctatgatgagtttctaataagttcctatatccttttgggattgtgccttagataatgttggttaccttctcaacctattaccttccaagttggtacctttaactctcacagacatgtgaaaaggtcataaacttagtttgcaacacattcacatttaagagtgcccaacacgtgggctgaaatcacagatagacaagttggaagaaaaatatgaggtatgtcagtttgtaggctattcaaaaggaatgagaggaaattaattttataatcaagtcaactagaaggtatttattaatacaaattctagatttttggaaaatgactatatgataagtaataggacaaaatgtgatatagattggaggacacttgaagacactttcacattagcacaagttactatgggtctaaaggttcctacacctatcattctagtcagttctagtatactagtgccttgtcatagtaggagggttgttatacaaccggacaggttcatgtatttgggagagtccttcgagacaattccaaaaaaacatgagaccgatcctataaattatgataaagtaataagcaattatgatgttattccttagcaaagagctatgtaggcaaagttagaatctatgtattctaatagagactaagatcttatagaagcaccaaaagggacaaaacccagagggtgtaagcgagtttacaagaatatgagaggggtagatggaaaggttgtgatgtacaaggctagattggttgtgaagggttataatcataaacctagttctaactataaagagaccttctcaacaatagccatgcctaaatacatcataatactcttatctgttctggcacatttcgattatgagatatagtaaatggatttcaagacaatgttcttgaattgtgatcttgaagagagcatttatatgatgcaaccagataaattcataacaaagggccaagaacaccttgtgtgcaatgtgcataaatccatttatggattaaagcaagcatcttgctcatggaataggtgttttgatcaggcgatcaagactcttaattttgatcaaaacaaggatgagccttatgcgtgcaagaagatacaagaaagcatggtggtgcttttggtcttgtatgttgatgacattctactaattaggaatgatatagggttattgtcatcaatcaagatttagttatctacttagttccagatgaaagatctgggtgaggcaccataaattcttgggataaaggtcttttaggattgcaagaataggaagattgtgttgtattaagccacctatattgaaaatatttttttcaagtatgtgatgcaagactccaagaagggtttgctaccttttaggcatggagtgcccctttctcaaattagtgtcttaagacaattgaggagaaagatcacataaaggcagtaccctatgcttttatattgggtagccttatgtatgtgatgttatgtgctaaaccaaatatttgatttgttgtagggatgatgagtagatattagtccaatccaagcatggagcatcagacgacaatcaagcatatattcaagtatcctcaaagaatgagggattattatatgttggtgtatcattgcaatgagttgttatcccttgggtatacaaattcaaactttcagcctaatagagactcttataagtctacctctagttttctgctcattctaggaggtgagactgctagttggagaagtgtgaagcatcttatattgcttactccactatagaagctaagtatgttgctacttttgaagcaaaaaaggaagttatttggcttcataagttcctaattggactaggggtagttttcttggttgtatcacccccaatactgttttgtgataatagtgaggtggtgaaatagtctaaagaaccaagaaaccaccaaaagggtaagcacattgagaggaagtatcacttgataaatgagatagtaatgagaagagatatgactttggagaagattgcttttgcaaagaaccttgtagatccctttatgaagactttatctactagagtctttaatggtcatagggatagctttggtatcagatgtgttcctaacatgctttaaggctagtgggagttttttaggattgagccctagaaagcatgacatgatgtaacaaatagagattcatttataaatttagttatttatgcttcttggtttcctttattatcccatttgcattaattagttatttgagcatacatgtccatataacttgtattgtacatgacttaggtgcattaggagttgcacaaaagatccgagtcatgggtaccttgtagagtgatgaattgtccacaatcggttcatggatttgaacaatccacttaagactatagtgcaatacctcttaattagagggatgacttgtcttggtcatcgggatggttttcctatggtgagtgcactactacatgtgatgtgtactagactagacccactatgaaccatgacataagactattagttgtcatgatttacctgatggaaaaatcctagatctctctatttcccatgcccaaattaaattagaaacatgcttgactatgctagacatttctaaattctatgcacaatgaaaaattgcatttttaaattttatatcaatttaaaataagtaaatgaaaatcatacctaagattcatatgttcttgagtcaactccacgtgatgaagatgaagatgggagtcataggaagtcttatgaactcagagtctttcacctaattactcgaagcttgatcttaacacacttccaatagggatgaaagagagggtaaagattgtgactctctctatttagaggtggaagacggctctctagaaaaagccatggaaaccctaacccctaaggaggttatttatagggtttctagtgggtttaagtgacttgaacccactaagggcttggattacttaatctaactcagaataagtcttaattgattaattaaaccaatagagcctattaattaaccaattaaaccaatccacagaccttgttcatttacccctatgaaaccttatgtaattaccaaaattccattatgcacaaaagtgaacctatagctaatctgaccctcataacttgtgccaataaagtatatgagcatataacggggaccactaggacctataggagtactggctccttcaaatctaatcctgaagttgattagacatcccactacaaataatcaactgaactctagtattttatgtaaataacaatgatacaccatgtgcttaagttcgtgacctactatccattgcatttagtctctccatgagctggtgtctatggtttaacaaggtgaaggcaattagcctttcaaaactacatttacaatccttgagttatggatcctcctaatatgtattcaattgacatatcttagctctctaagaacataatgtaaagtttcacttaaggaactactttagccattggtttcataaacacacccccttaggatcacccaaggggacacattgtctcaatcccatgatatatcatggtgcctttattgagaatacctattcctatcggcttccattaatggtgacccaatccataaggaatatatgatcagattatgatctcactttatgatctcacatgtagatcacaaccactcttaactttagcataaactcaatattctctcaaggttgagagacaacacaatgaagtagtttggtgaagtcatgactacttgatagccttaagttatggctcgtcgtaggtcgtatctaatgtgtaaccatacacacttatgcacataccatgggaaacttatctcgatagccaagaccaaccatccctcaaattaggaggtggtacactatagcctcttatgggttttctaaacctaaaaaactatgaactaatcatttatttgcaaaaaattcatgacttggatcttttgtgcaactcttaatgcgcctaagtcaaagatgcaaatcagagttcttataagatataatgtatggaaatagggtaaataaaagtgaactagaactttattaaataaataataaaaatccacatgtttattgcatcatgtcatgctttgaagagctttatcctaacattctcctaccagccctcaaagcatcatgcatctaaagcatactaggtacacatctaacacctatgctatcgctgtgaccatcaaagactcttcctatcaatatcttggaaaaaaaatctgctaggttatccataaaaggtatcttatcaaccactacatcacccctctgaactatctcacaaatcaagtggtacttcatctcaatgtgtttatctttttctggtttcttggttctttagactatgtcatagctccactgttatcataaaatagtatcatgggttatacaaccaagagaacaaccctaagttccatgaggaatgtcctaagccaaactacttcctttgctgctttagaagctataatgtacttaacatccatagtggagttagttgtgtaagagtgtttcacacttctccaactaatagtcacattctcaaaagtaaaagcaaaattagaggtaaactgatgaaaattcttatcaaaatggaagtttgaatttgtatattctttaggtactaactcatcactctagaacacaaacatataatccctcgttctcttaagatacttgagtatatgcttgacaattgtctagtgttctagagctggatttgactagtatctactcaccatacttattacaaagcaaatatctggcctagcacatatcatcatatacataaggttacttattgtggaggcatagggtattgcttgcatgtgctctttctcttcaggtgtcttaggacactaatcttgaaaaagagaaattccatgcctaaaaggtaacaaacctttcttagaatccagcatcacatacttgaccaaaagcttatctatgtaggtagcttgagacaactttagtttcctattcttatggtccctaaggggcttaatcccaagaatctattatgcttctcccaaatccttcatttagaactaagtagataaccaaatcttgacttatgagaatagtcctctatcattaccaattagtaaaatgtcatcaatgtataagaccataaagaccaccatgcttccctaaaccttgaaccatccttattttgattaaagtcaaaggacttgactagctaaatgaaacatttgttccatgagtgagatgatttttttaatccatatatggatttatgcaacttgcataccatataattttggtcatttgctatgaaactatctggttgcatcatatgcatgctctcatcaaaattgccattaaagaatatagtcttgacatccagtcgtcatatctcataatcgagatgtgttgcaatggataggagtattctgatggactttagcttggataccggtgagaaggttttctcatagtcgaaaccaagtttctaatttataaaccttcactacaaatcaagccttagaagtttcaacctttctatctactccccttttcctcttgtggacccacttgcaccctatgggttttatccattcagatgcttctacaagtttccagacttggttagaatacataaattctaattctacctccatcgcctttttctaaagatatgcgtccacattgctcattgcttcatcctctagaatggcctcgaaagactctcctaaatacatgaattgatctagttgtataaaaaccttcttactatgacgaggcaccaatgtactagaaacaagaatggttggtattggatccatagtattttgtgatgttatgggagtcttatcttatgttgtcaaatcaacctcactcttaaccttattacacattatatagccatcttccataaatttggcctttgtattcacaaataccttttggttgacctgactataaaagtaataacccctaggacctttaggatacctaacaaattgacaaacttttgatcttggttccaacttatctacctttggttttagcacatgtgttgggcacccccatatgcgaacagggtgtaaactagtttacatcctatccacatatccataggagtcaagggtgttgatttagatggaactaaattaagaagatatcctacagtttctaaggcatatctctaaaaggatgcaggaagtgttgaaaaactcatcataaatctcaccatatccgtaagagtttgatttcttttttctgctactctattttgttatggagttctaagggcactcaactaggatataatctcatgctctttaaggaaagaattaaactcactaaacaagtactctccatttcggccatattgaagtacctcgaagtgtttgcctaattgctttttggattttaccttaaattccttgaatttagctaagacattggatttcctatgcacaaggtaagcataaccatactagagtaatcatctgtgaaggcaacgaaatactcatacccaccacgtgcttggacattaaaaggtccacacacattagtgtccactaactccatacattctttggctctaacttctttagaagtaaagagcctcttggtcattttaccttctatgtaagattatcatactgaaagatcttctagaactaatgagggcaatgttccaaacttgaccagtctttagatcctatttaaattaatatgacctaagcgtagatgtcatagataggtctgattagtgctaggtccttttctcttaagtaagatatgattattttcaagaacatataacaatgatataggagtaatatgaaagagactgtcaaccaatatacctgagcaaataagtgaatcattctttctaatagaaacattttttttattgaaataacatttatttaaactagaaattgatcaaattatttctaaattcaaatacataaaaactaggataatatctcccacttcttgcacaactatcctagcagtagatgctaaagttaggtacatctctctctcattcaaccttctccttagttgaaacccctataatgaattacttatacggtcagtggtcttggaatctatccactaagaattggtggaatccaacactaaacacaattcaactaaaagtgagtgcgacataccttactttttctttaagaaattaggacaatccttcttcaagtggactttcttaccaaagatgaaacacttgcccttacctttgctctttcctttccttgtcttgttctttccctgtttggatttcttgaaaaatttcttcctctttttaatacaagaagaacctgaagaatctttcattgccatgtgaacacccttagaatccttaagaatcccctcaaccatatagagttccttcattagttctggcaagctcatcattaacttattcatattataattaagcttaaactgcttgatggggttcgataaggtctttaggatcatattgttaaagagtgcaatcatacaaatcatatgatttcagttccttttatcatcttggtgctcatgatggtctttagagcaactcgactagctagcttgcctttgtcactaaatatctcttgcaggctgaagagaatctcataagtagtgacaatgcccatgtgttgctattgcaaaacattattgagagacccaagtatgatacaacgagccttctcatttgtctttgccaccaggaatgatcatctttctcttcctatgtagaaaactcattgggaatgggtggagcaacctcttaagttacctatttcaactattctagtcaatataattaggttcaatcaacttattatcagtgagaataagggtgacagggttataagacatgattaagaattccatgcattgataaagaactaagcactcaaggtaaaatatagtaattaatttaacaaaactttagagctctcaaactacatatatccatgcaaggtatcctagtatcctaagaatcaaaggcagttcatgactcttattactaagtagagaccctctctaattaatcaacttgccttaaacctctaaaggttatcttaaggcattgattaacataccttcgtgttcaatccttagcacatgcaagtaggaccactttaggtgattctacactttatgtctaagttaagtgtgtaacaaagatccttgatatcaatgtcaccaattgaagagtttcaaatttaggataggctacttccactacaaacatgtatagtcttatccttttaggatagtttatatcccttgattccttgggtcacgccatctttaggatggtgatgggcccaaaatcaagattggcttgatattagaggttgtgggcttggtaactatgacccgttcccacttaatattttggaagagacactttaagatcattttggtaaacattttagaataaattatctgtcatgagaattttcaaaatttttatttaatacttgaatcagaactcctatgccaaaaagggatagctttcatatttcttatccttgaactttccttttcaaataaaacaattttctccttctctaagggagaggagagcctggaggactaatttaggtgtcttaaaaggagggaggagagcctagaggaccacttatcccaaataaagaaagttccaaaaggaatttgaaatcctaattagcaacaacctattccttaaataaataataataataaaatatctcttaagaatttattcttttaagaaaatccaaaattaccattttgaaaatattataaaatattttccaaatatttcctaacacatgcagtatataaaatataagcataatttggtaacttggggattttgttgctaatttggtaacttaataattggattaccaaaatccaaaaataccaaattgtacctacaaaaaaaaaaaatgcttagtggcatttacaaaagtccaaaatacccatactaccaaacaactgtcatgaacactcgagctactaaaatttttcaaggacgcttgaagcacttttggcacactggatatgacgtcattgttggattgatttgtgcccagctggtgtatgccctgttgattggtgttcaatcaactagtgtgctttgatttcagtcctcagacgaaagtaatcaacaaaatttataaacctatttcaccatatactagggtagcattagctagcatagcatagtagctctaggatcgtccacagggatgggttttcaaattacaactgatattagttcaaaaactgaattggtgctttttcttttcaaggttagctttaaaagaaaacataagtatgtgtgaaaaggttggttttaagtgaaacaaaaaataaagtaactgaaattacttacaaagaaaagtgcttcttggagttttagatcactaggctcaagttccttatacaaaaagggagattccggtcacttggatcttttcctcgcattggggatttaacatatagttatttcccgaaccggtgtggtacaaatgcttccccttaatggattcaaacactaaatccctgtcactgaatcatcttgcaatggttcataccttttacctggtattggccattcaaggtgatcctcaaccttggattacccgtcaaaagctcgcaagagataactaatagatgtctcccaagagtccaaaagcttaccaagtgttggttattctagataatcctacctttaaaccacctcccaaaggctcgtaagatataaactagcggatctcaatggacggagtccacttaccttaccaagtgttggcccaggtgattttaagggattttaagttaactaaaaagataaaaaccattaacgggtcacactttctcttcattaaaaattgaaacaacgaaacttccacttttgtatccggaaccttacctagcttccttcactccaagaaacaaaaagcctagccactcatcctctaggaaaacatcctcagagtttgattttctagaaataaaaataaaagagaaatcaaaatgagaaggtaaggcagagcagagctctgtgtattactttctaaaaaactatacaaagttcgtctttgagaaaaaacttcccccgagatcttttttaaaagaaaattacaatagatattatctagaaaggctattcaccccttctgctaacttcccaaccaagaaaacttgtcattggtgggttacaaggagaaaataaggatttacacacaaatatttgaagataaatatcaaatggagtcgatgcgcaactatctcagattacaggtggatttcgcaagttgaaattgtccatttcgcaaattgaaattgtggttttgcaagttgcaaaattgtcctgcaactaatcagctctctgttctacaacaattcatttcctctttctatttcgcaagttgcgaaaattttgcaagttggatcccacaacttacaaaattgctagatggttgatttcttctgtgattttcttccttgcatcctcgtttggctttggcaaagggttatgaagctccaaagcttagtttcttcatgaatttgagcttcaacttgcttttccatgaactatacaaagatctccctcattcttggattgctttggtgatcaaaaagctatgaaaaacaccaaaacttaacacaatttgattagaaacgattgcaagggtccttaacatgccaattgagttaaaaggtaataactactactcaaaaatgtttaaaagagttaattacaagctataaaatagcactttttgagtagtaatcatggatgcaacttactatcgctacatgcacaactcgattggtcctagtgttggatgcaccacttgatcgcttgaggcacttgagcattaatcctaatacttaagtgttattgcagatttccaaaactcgagagctagttcttgagttttccaacagttattttctacaaaaacttctttcttctaataggattaatgcacgatgactttgtgatgcttcagattgctttcatacttcccaggagttagaaagaatgataaaaataatggatttttacaacaaaatcctataccccaaagaattaaagtttacaaaccattctaagaacaaaaacatgatttttacacaagaacaaaaatcttatgcctcttatgaagcttacaaactacctaggaaaagagaaccaataatccaaataattattacatccccaacaaaaagcaatcacgattataatcatcatattaaaacaagatcataacatagaatgcacataagttatccttgaggtcatgggataaacaaaacaccctgtaaaactaagttagcacatcctaaaatagttctagcaagcttcctaacctatggctctaatactagttgatgagaaaatccctgatcttttcatttcctaagcttggattaggttaggaacattcttgactatccttgtcttttctaaatcctatgcatagcaaaaaaaaattgcatttctaaacttcacacagatttagaatatgctaacaaaaatcatacttaagatttaaatgttcctgaatcaattccatgcaatgaaaatgaagaatgaagtcatagaaagtgttgtaaactcgaagccttctatttgatgactcgaatcatgatcttgacacacttttgatgaggatgaaaggggagatgaaggctatggctctctctttctctctatctctctgaaggtggaagatgactctatagaaaaagttatggaaatcctaacccttatgggggtatttatagggtttctagtgggcttaagtgacttaagcccaccaagggcttggatcttttaatttagccctaaaataggtcttaattgattaattaccctataaggcctactaattgatcaattaacccaagctagagaccttgttcacttacccatgtgcaatcttatgtaattaccaaaacacacttatacacaaaagtgatcctacagtcaatccggccctcataactcgtgctaacaaggtatatgagctcaaagcgagaaccactaagacccataggagtactgactccctcgtaatccaattctaaagttgattaaacattccactatatagaatcaacttaactctagtatcctatgtaaataacaataaaacaccatatgcttaagtctgtgactagtaaatccattgcattcagtctccctatgaactagtatctgtagtctaacaaggtgaaagctattagcctttcaagactacctttataattcttgagttatagatcttcctattgtgttttcaattgacatatcttagctctctaagagtataatgttaaattctacttaagaaactactatgaccatagttttcatgaacacacctccttcggatcactcaaagggacatattgtctcaatcccttaagatatcatggtgcctctattgagaatacatattgctagcaactttcatcaatagtgacttaatccatagggaatgtatgatcagataatgatctaacccataggtcaaagccactactaactagtgcacacatcatgggaaactcatttcgatagccaagatcagtcatctctccaattaagaggtgatacactataacctcttagggttttcctagacctataaactagttgtgaactaatcatctatttgaaaggaacccgtgacttggatcttccatgcaactcctaatgcacctaagtcacatacaatgcaaaaaaaataaaaattgtaggttagagtgtttacaagatataatgcatagaaataagatagataaaagtgaactgaaactttattaaataaataataaaaatctacatgtttattacataatatcatgcttaagggctctatcctaatatcaccaagctactattttacaaggactcttaaccttgagaggacattgagcatgtgccaaagtcaataggaggctttgacctatgggtgagaccctaaggttgtcgtatatccctatagattaggtcactattgatggacgttggtgataacaagtattttcaatagaggcttcatgatatgtcatagattaagatagtgtgtccccttgggtgatccaagggacatgtgatctagaagattatggccacaacatttcctttagttgaaattttacatatgctccttagagctcgagtatgtcaattgatcatataatagatgggatctgtaacttaaggatttgagaggtaatcttgatagttgataacgctaccttgttagattatgaacactagtttatagggagtctacatgcagtggatagtaggtcataaacccaagctttgtttcattgttatttacataagatactagattgcaattgattttcttcagtggaatgttaaatcaacttcagaattggattttgagggagctagtacttctatgggtcctagtggttcctgttttgagatcatatagcatgatgacatggtttatgagagttggattggttcttggttcactcttatgcataagggtgttttggtaattgagcaaggttgtagaaaagatggtaaacaagttttttggatttgattaattgattgattagatgaccctgtatagttaattaatcaattagaacccattttaggttagattaagtgacctaagccttagtaggcccaagtcacttaagctcaatagggaaccttataaataccccttaggggttagggtttctatcactttttagtgagagttgttttccacctctagagagagagagagagagagagagaaagagagagagagagactaggattcctctcttccaaagcccacactttagagtgccatgattgtggttcaagtcattggacaaaagatcttaggtgcacaagacctccgaacttttcaagcttcatctttactaagtagaattgatttgagaacattcaaatcaaaggtaaagttttctaataacttttctctagatcctagattgttaaaaattttatttttgcttccattgtataggatctagagagctagggtaatttgaatgcacctatacaatccaggtatagaaacaaagatatcaaaggttcccaatagaagaagctaaacatttgagtaaagaaagagaacacactacaaagtttgaagaaatgtaagcacttgaaggaagagatcacactaaggaagttttacaagtcttattacttacaagccttggtattatcaaaatgaaaatgtcccctatttctagcccccaaggaatattttaaaatgcataatggagtttttagagactcgttaaaaacctcctacattttctacactatatcactatctttgtattttggagtatgttagatactcctagttgttgtcctacttaaagtattccataattttctaaagacttccacccaactctacaaaggaccacacacctttcgagaattagaaactcttttggaaaattttaaaatgtgccttcaagtaatcttccatccaacaatttgatttacttttataacttttcaaccatactatatatacaagtgaggatatcacttgtatacaatttgacattatgattacacccaaagctattagaagagtaagttctttattttataattttcaaactaggaagatttgttttatattttattttattatattataatactttataatttttttaggctacacaatttttcttaataaaaaattatttttgttttttaaaaacaaatttggatagaatcgttagtcggtagagactattgtaaaaccattagattttaacctaaaagttcaagttattaagaaatgaagtaataataatgtatatcaatactaaacctcatatgcaacctattcattcatgtatgatcaggaaaaatggaaaatatgtggatgaaaaggcttgaatctgtcacaaaatactaaagttctagtcttaaaggaaaattgtaagctaaaagaggtttttgctactttcatccatatggaagtgaagaaaaaatcgaaactattttaacaaaattcaattaaagttatttggtaattttaaaaatactaaaaggagctcaaatctttttattaagccaaaatcatggaaaatttcttagtcatgaaattcttattcttaaatggatgactttcattttcattgttgttcctgaacatggtattaattggagtgataatatttctaagtttagtttacttgtcctttaggcattaattttgaattttttctagttattcaactttcattctttctttttctaagttagtttgtatattgtttagaaatttttgttattcctcttgtaggcttactatcaaattcactatagatcattcattttctgtaaaagaaattacttttacctattctctttctatctccatacttgcaattatactattgaaatgtttcttacatgcatattaaaaagattaacaaattgggaagtaaataagatcactactttccatatctaacttttgtacctatatctatctaaatgttcatgtcagtaaatctacatgagctttaaacatgtatggtcctgagttgcttaagatatatagtgcgatcaggctcttgtggttttaatttattaaactttttacacatattagcattctttgtgagtggaaacatagagttgttaccttttaagtgtcatcataagacaatttatttaattttttttcaatgaccatcataaattttagaactacttttttctaatcaaacggtggacaagaaaattaaaattagataaatgagagtatatgttttagttattaataagttaggttcaattgatgacgacaaatgataactaaagattcattgagttgaagtgcacttcatgactcaaaacaaattgaaggttgaaggtcaaacatatgatttattaaatacatcatttttataccattatggtccaatttcatatttggataaataaataaaaaatacaatcttcttggtatgtattaaaaggaaatctgtatgttaaccaaccaagataggagcacaatgcacttgaaggatttgttgtgctagaaccatcctttgtaataagaatttgatttaagatctacctaataatcatctagcctaaacttctttggttggatcccaagagttaaaatgaaatgaatgcttcatatatcctttctattagatatgcattctttttccttaatttgtgaaagtttattgtgtgaaaaaaaaaatgacccatatattaatggcttaccatcttctttccttttttatagtgtaatgttcaaaacactatagcatggagagagtagcctattcatgtttattgcattgtaaaggattatatatataaatttactattagcctagtaaaatagttttgttagatagtgatagaactctaaattagaaatatctatataattctacatagtccatccataaaatattttcataatttaatttatattatactttgttttgatagatcaataggttaattcttaaggctaaattttagcattattcttatagatttcttcttaatatatacattcatgttctaatccattatttagttctttctatagg

SEQ ID NO: 11662 - DNA, 2326 bp, Vitis vinifera
  Intron number 1 from transcript GSVIVT01023144001 (locus G SVIVG01023144001) derived from phytozome v7.0 (chr-ID chr1 2; pos 22026946 to 22029271 reverse strand)
ccaatctctccacttacaaggatcagcttcaacaggtttttttttttttttttccttaatttgtaatattgagtgaatttttggtttttgagttctgtgctatgtttggtttctgtgaaaattgtgatggaaattagaaacggcggaaaagagaaataaaaaacaaacttggaagagcccgattgggggtttctgagttttgccttttctattcttttcctgttgtttctcggcaaccaaacgggatgggggttcagtttttttctgatactgcttcaattcggggttttttttttgtttttggtttgggtttgatttgggtgtgttttgttggaatttactgaattagggtttatttaaatacctgtttgttgaaattctgcttggttcctgtgaaacgaggggaaacgaacataaaaaaggttttttttttgtgttttttttcgcctggggggaggtgaagggagttttgatggagggagaaaagggaaaaggggatcctttcttactttttttctctctcttaaattagtttgcgtcaaaaaattcatttggttttaaacaaactaattaactaactttgagcattattggattttccacgaaaattgaattgtcaattgatgttttctctatgcttttggtgcaatacatgtgtgcaacatttaccgttaaaaaattagcagtcttctctgcaaattggagtgagatacttaatactctaatatcgtggaatgaaaaatgaaacaaaagagaggcatgaccaatcgttaaagcatttaaaaggtttgatgaagctccaagacagggagttttacaatgacataataaccgaagcagaacccatgactgggagaagcaatgacttgggcattttccttgggggtgcttgatgatctcacaagggtctgtggattctatggtggagcagaaattgatcaactttactccatgacctttgacattgaaggttagtctaatccttttggggtctcattgaggaaggagaaaaggtattcatggttttaaagggttgggttgggcgagtcttttaagttggagatatgcgggattttaaaggaagtattgatgaataacattagtgaaagaagtcatccttatcaataatcaggaatgaaacagaatagtgagggaatacttcctgcaagattcctctggaagtggaaacaatttgttagtgttttttttccctcccaagaaagtatgcatttgatgtgtgtgctttgtttctgcatgtgttttcctcttttttggatgcaaaactttaagttattggcgatatttattaactcatttagcagggtcaaatcactgttccaaaacttagagtttatattaaatgctacatgagttggtagaaaaatgagtttgggtttgcggctgaaataattggtcagtgcctaccacagtattgctaaggcatctaattaagttgataattaagccacctatcctgattggatgaatctgaatagtacttgagattttatatggctcgaaggatgagaaaactagagttattacttgtggttatgatgaccatttaaccacctttttttctttcttctgcgaatgaaatctatgagctgtttactttttcttttttttttgttggagttggggtgggggaggtgttttgttctacacacacttgtcttgtttattaatttaatatctttaatagggaaataaacatatttatcaataaaagtgccgactaaaaaggggataaaatccaagtacactggtgtatacttggtgcaccatggaataactgatttaacatgaccctagactatctacaaaatctacagaggacaggttaacatctaacaatacatgttttgatcacaagaatagaccttttataaactgatttttcaccatcaagattgatgactccacaattttgaagaatccgttttcctttctatccaaacttgtcttaagaagatgtatgtaattcggaagcagggaagactgaattctttgtatttatattggatgaggatataaggttgtacagatctgcttatagttctttgtgtgcgctttggtgtattgattagttgctttgttcttaggaaataggtggactaaacatgggatacttagagtgccaaaaaaggtgaaaattctcaacaaacaattaatcctatgactataaacacacacatcttaatcttaagtacattttctctgttgattttggtgtgtgtaaattattgcaatactgttgtctaaatgttttttatcttaaatgactccatcccacttatgtatcaggtcagaaagcttttggttg

SEQ ID NO: 11663 - DNA, 2036 bp, Vitis vinifera
  Intron number 6 from transcript GSVIVT01025672001 (locus G SVIVG01025672001) derived from phytozome v7.0 (chr-ID chr8 ; pos 13043369 to 13045404 reverse strand)
cgcgttatagtaaggtacaagtgttgatttttaatttttcatcaaaccattttatatgtgcttttgttatatgtaataatgcaaacttgtttctttctttgaatatggtacttggaattctgaacaatcaaaagcaattatggataatcaatgtttgcgggaatatgctggcatcgttgattaataatactgtcaaaaaaatgatagtgtaaactgaagaatcagcaatgcattaagtagcatagcttttcatttattcccccaaaaaatgtagttcttcttgagattggcttctagaaagttctctgtgaatgatatggggagaaaacagttggaagtgttttttcgtttcaagagtcattcatccagatcttcttatcatgaatagacacctagatttttgctgtaaaattcagacgttgcacttaatttgttgggagaattgcttatgatcaagctttttgacaaagtaagaatttattgaagagaaaatatcaaaggcttcgtatgagcattcaatagggaattttgtgtgttactgcaattgggtgcatgtgtgttgcacacagaatcaagcaattagtctctcttttcaacttcagatgaagtataaataacatattaatggctgaattttcaaatctatgaaaatagtagtcctctagctattgtctcatatcaaagtttactttcctctatatcaacaatgtagattctaagatgcactcctttgaaaacttttgttaatatatttattgttctacattatttttatctatgcttatccaagtttgcatacatatttgtttagattcttcgtacaagtttcaagcctttggacctcctgaagaaaaatgcttgcatccaaatccattccaactgtgcttcctctttgtttctatggctagaattcaatataatcctattcctatatatattcttggttttttaaaatcattaaagggtacttgtactcttgtactcttttttttcacttttaatgcattcttcttacttatcaaaaaaaggaaaaaaattaagggcacttcacttgtttaaaagtggctaatggtataatcaatatagatgcctgtacttcacttctactattgtattatattccattagtcgagggaccagctatattgtgctcaccctcaaattagcctgaggaggggagactggagagtatgcccatgaatcacttttcataaacttggtcatactagttgctagtgcttgaatctttagagtgttttaccaaggttttagcttgtgtaaatttgtatggctgagcagtcttggcttattgaatgaaacaacgtgatcgctcaaaaagatgattctctgtttgggaggtttacgtgtacagaagactaataatatctatatctacttgttacaaacttggtcttggagttcatgaaatacataaaagaggggggcaaacatggtggaggagttcaggggacatttccactttacctagtgttttttcctttgttcttgtcactttctttttttcttttctattatttttccttctttgcacattggtttgtctcaagcatgagttgtccttttcctttgtatttcattcccctttctagtaaaatcttctgtttcttatgaaacgaaaaaatgaaaagaaaataaaaagtaaactacaaaaagcatgaacatgtctcattacattatagggtttaagataagttttagtaattaaaaaatagtttaaaggttcaattaaattttttgcttcagttttttagcattggttttagttcttacaaggttaatatgtagaggcaacttgtagagaaaagggattgacatgctagagtacactttttttttcttttggttatttaccggcttgattgggctgatttggctgacattgaattttattccgttcctcctttaacttttagagatgccatatgtagaaggaaaagtactacgcctttagaatttccacctgtcctatctttgcttacatattgtcatttgatgcagagtaacccaattgccag

SEQ ID NO: 11664 - DNA, 9887 bp, Vitis vinifera
  Intron number 20 from transcript GSVIVT01015960001 (locus GSVIVG01015960001) derived from phytozome v7.0 (chr-ID chr 9; pos 16194470 to 16204356 reverse strand)
gatcatcaactataagggcatttaagtgtgaggtacacaaatgtttttgtttcgaaattacatgtcattacttcaataaatggtagtacattttttttatctccatcaagtatcagaacacatggtccctaaagatagcatgatgcagtccagctttaacttccagttgtttaaagttcaagtggaagttcaaaaatgacaatttggcatttgtgttaagcatgtggcatttgtgttaggcatacagaaaaaggcaagttggtttgttaacaataaaaccaagatcttgtttgcttctttatttaggtagttaaatgttgagagctttcattgtgatgtatgtgaactagcaaacacaagtgtacatcctttctaaccaataataaaagaagttcaaattcttttcatctaattcatagtgttatttggggtccttccactatccgtaatataactgggacacattggtttgtgtctttcattgatgagtgtggtagggtctcttggatcttcttacttaaacacaaatttgatgtgagttttgttctcttaaatttctataacatgataaaaaaaccagtttggtgtataaatcaagagattttggcctaacaacgtcaaaggttatttcaatcgagtcctaaccctataccttcaacaagaaataattcataagcgttggaaaatctgacaattggaaattctggcagattgggtggcagattatcgaatatttttcctgcccatatgagttgtaacaattgtatagctgtacatagaatctcctaggattttttcctttcttaacattcttattttatttatctttgatagcataatcataggcattatttcctaggctatttctatacaattattctgtatatcttcatatgtaatcctatacaataaaacacagtagaaagcatttcaaaaaagggttctagatctaaatcagaacaaggtatcagagctagaattttctttgtttaatcactagcaatttcaatgtcctacgcctttattgccaggaatttttttttagatcatatcccattagtttatgaccttctgtacatagaacattgctctaaattaggccttcactgccccatttttatttttttttgacctccatatctcttcttcccctcataatgtcaaatacttcagagactgattcttcaatatcaggccaagccacaatccaacaatcaacaccacttgttgaattccagaatatagtaagatccttcaaactcaatgggggaaattatttagagtggtcacagttggtaaagacttatattaagggaaaaggggagtttaagccatctcattggacccgttgtgagcaaggatgatccaaggtttttcgtgtgggatgaagaagactctcaaatcatgtcatggccttagaactctatgcaactagagataagccgcacatgcatgttcctctcaacagccgaggaaatttgggagtccatgtgtcatacctattctaagggaagggatgcagcccaaatgtttgaactaaagacaaggattcacaacaccaaacaaggtattctttccataattgagtactacactgttattaaaggtttttggcttgaactttatcaatatcaaaatttaagaatgaagtgcagcatagatgcaacaatgcattaagagttcattgaaagagagagggtgtatgatttcttagcaggtttgaatgtggaattggatcaagtaaaggtccaaattcttgggaaagagtcattgccatctataaacgaagcctttgctatcgttagaggagaagaaggaaggagaaatataatgttagaaaagggaagcaccatgtacaaatctgctttagccatctcaaaaccaaggagaaatgaaggaagtgttgtggttaatgttgcaaactctggtagaaatgaaggtaagaaaataagtgagagaagctctttatggtgcagctattgcaagaaatattgggacacatgggagacatgctggaagctccatggcaagcccctaaatttattcaagaggaatgggggtaaaggggttaattctggctataaatcacgagctaatcttgctgaaaatggaggaaaacagcaagaagaaagctttggacaagaaatgaagctcaacaaggaggaaattgacaaacttaaaaaggttcatttccaagctggaaaaaccagagggacagtcattttgctcaaatgggtaagtattccttctccttgagtgcctctaaaattcagttttctagcccttggatcattgattcaagggcttcggaccataggaccaattcttcaaaagtcttttctagttacattccacgcccagaaaatcaaaagatcaaaattgctgatggtaccttagtaactatggctggtcaaggggatgtcttgttaacatcttctctaacattaagaaatgttttacacgttccaaaactatcagtaaatttgttgtctattcctcaaattactaaggacctaaattgcttagtcaactttacacaatctaaatgttctttttaggaccttcttacaaggaaagtgattgggcatgctagagaagaagggggactttctccttgaagctgaaagtggcacaacatgtcctactcctcatatctatttatcagaacatcatactctagccgaggaacaagtttggttatcccgtttttgtcttggtcatccaccttttttattgttgaaaaaaatatttcctaatatgtttgaaaaattaaatgttcaaaacttccaatgtgatgtttatgagtatgctaaacatcatcgtgtgtcttttcctttaagtaataagaaaaaatttgttccatttagtttgatccatacggatgtttggggacctattaaagttcaaagcatttcaagagtaagccagtttgttttatttgttgatgattgcacttggtttacttgggtatatctcatgaaacaaaaatccaaggttaacataatcttccccattttccataacatactaaaaaatcagtttgatgccaaggtcctaggaataaggtcagacaatggaaaagagtgctttaatcaataccttataccttatctccaaaaagaaggaatcatttattattcctcctgtaatgatactccccaacaaaatgggatagccaagcctaaaaataggcctattagagatcactagagcgtcattttttcaaataaatgttccaaagtcattttggggagaggttgtcctaactaccacatacctcataaataggctaccctctcaaattcttaactattctagccctattgaaatactttctagattttttccaaaatttgaagatttcaaccacctttccctaaggatcattgggtgtgtggtctttgtacatatccatgctcggcaaagaactaaacttgacccaagagcccttaaatgtatctttgttggttattctcctacaaaaaaaaggattataagtgctatcacctagcttctaaaaggtgttttgtcactatggatgtattctttaatgaaaaacaacctttttttcctaatccttatcttcaggtggagccttttgcaaaagataaggaattctttcctaacctacctactcttccttaggtacctaaaaatgacactaggcaagggtttgtactttcgaaagggaataaacaagagcattgaaattttttcagatgctgatttgggctggttctatgacagacagaagagccacctctggttattgcacttttgtatagggaatctcgtttcatggcaaagtagaaagcaatctgtggttacaagaagcagtgttgaggttgaattcagggcaatggtgcatgttatatgtgaaggaatgtggctgaaaagattgcttgaagagttaaaaattcctaccaagaggacaatgaagatgttttgtgacaatcaagcaactataagtattgcaaagaacgctgtccatcatgacagaactaagcatgtggaaattaactgtcacttcatcaaagaaaaattcgaggaaggattaattaaaatgttatacactcctacaagccttcagactgcaggcattcttacaaaggctcttccaaaaaccagttttgaagctttgatcaacaagctgggaatgattgacatctatggcccagcttgaggagtgtggaattccgaatttagagccctattttgtagggcaatttgaggagatcatgtgttgtagcctattttagttaagttttttatttgtttaaagaaagagattaggataatgtctctagtttttatgataatatttccagccttctactttattaggattgtttttcccatttgggtccccatgaagagtcctaagggctggaccatggaaggttcctcagtttatcaaaaaataataataataatcaaggagatttgctgatattctgctgtcatatttcttatataagaccctttgtaatcatctggattttcataatgaattcaatagagttttctactcattctacatcttcctttattcaaacattcctgttcggctcatgctcagcatcagcatcatgtcagatttttccatatgacaaattcaggttctatattgttgagagagagagagaggagaaaaaccttattcattcattgtaatctctacttacaattgagagatatatatatacaaggctaggagtcctaactaccatacatgtgacctatattaacaaggaaagatagtatactatacatacattatattcaacactccccctcaagctggagcatatacgtcatatgcaccaagcttgttacaaatatatttaatcctaggacctcttagagatttagtgaagatgtctgctagttgatcatttgaattgacaaaacttgtagcaacacatcctgatgcgatcttctctctaatgaaatgacagtcaacttcaatatgcttggtcctttcatgaaagactggattggatgcaatatgtaatgcggcctggttatcacagatgagtttcatctgttcatcatttccaaatctcaactcctgaagaagatgtctcaaccatatgagttcacatgttgccaaagccatagctcgatactcggcttcagcgctagatctggccactacatcttgtttcttactcttccaagatattagattacctccaataaaaacacagtaccctgaagtggaacgtctatctgtgggtgagccagcccaatctgcatctgtgtaaccaacaacttgagtatgacctctgttctcgtacaatacaccttggcctggtgtacttttgatatatcgaaggatacggattacggcatcccaatggctatcacatggtgactgtaggaattgactaacaacactcacaggaaaagaaatgtctggacgagtaatggtgagatagttcaatttacctacgagccgtcgatatctcccggggtctcctaaaggctccccctgtcctggtacaagtttgacattcggatccataggtgtgtctaccggtttgcagtctaacataccggtttcttccaggatgtctaaagcatatttcctttgggaaaagaccacaccagaactagattgagctatctcaattcccaagaaatacttgagtttccccaagtctttggtctgaaagtgggtaaaaagatgttgctttagtttttgaataccatcctgatcactgcctgtaatgacgatgtcgtccacataaacaaccagataaatacactgccccaaagagttatgatgataaaaaactgaatggtctgctgtactgcgaagcatgccaaactcttgaacaacagaactaaaacggctaaaccatgctcgaggggattgtttcaagccatatagagaacggcgtaacctgcacactaaaccagactccccctgagcaacaaaaccaggaggttgctccatataaacttcctcggcaagatcaccatgaaggaaggcatttttaatatccaactgataaagaggccaagaacacatagcagccatggagagaagcaagcggacagaagcaatcttggcaacaggagagaatgtgtcaccataattagaaccataaacttgagtatagcctttagcaactaaacgggccttaaggcgatcaacctgaccatcaggaccaaccttaactgcatagacccaacgacaaccaactgtagatttaccagagggtaaaacaacaagatcccaagtgccattagagtgcagagcagccatttcatccaccattgcctgtcgccagcctggatgggaaagagcttcatgggtgctctttggaagagaaacagaggatatagcagaaacaaaagcagaatagggtgaagataatcgatgataactcaaaaaattgtaaataggatgaggattacgagtagagcgagtacctttccgaacagcaataggtaagtcattaggagaaggcagagccggggcaggtgaagccgaagggataggaagtgagtcagcaggtgcctcaggaaaagggagaggagcaacgacacgagggcgacgatgataaacctgaagtggtcgagggggcataacatcaggtggggagacaatgggaatgggcaagacttcagaaacaggaagagactcagaagtggtggaaaagaatggtgagtcctcaaagaaggtgacatcagcggagataaagtaccgatgagtctcaagggaataacaacgataacccttctgaagtctggaatatcccaagaagaggcacttcatggctttggcggaaagcttgtcctgtccaggagtgagaatatgaacaaagcaagtacaaccaaagacacgaggaggaaggaaataaagtggttggtcagggaaaagaagggagtgaggaatctgatcgtgtaagacaaaggagggcatacgattaatcaaataacaagcggtaagaacagcgtccccccaaaagcgaaaaggaacatgactatggaggaggagagtacgagctgtctcaacaagatgtcgattcttgcgttcagctaccccattttgttgaggagtatgagcacaagaagactgatgaagaatcccatgatgagacataaacgaagtaaattgggctgaaaaatattccctggcattgtcactgcgtaacacacgaatagaaatattgaactgggtttggatttcagtataaaatttctggaaaatagagaataactcagctcgattcttcattaaaaataaccaagtacatcgagaatagtcatcaatgaaagtgacaaaatactgaaatcctaaagtagacgcagtccgacaaggaccccaaacatcagtgtggacaagctcaaaaggagactttgcccgattattcaaacgctttgggaatgagacacgagtatgtttcccaagctgacatgactcacacggaagcgacgacaaagttgaaaaacgaggaaccatcttctggaacttggagagactagggtggcccagacgattgtgaatgaggagaggagcatcagtggaaatgcaaactgcaggagatgaatctgaggtgaggtgatagaggccttgagactcacgtcctatgccaatcgtcttccccgtactccggtcctgcaaggtcacaaatttatcagaaaaggtaatagagcaattaagagtacgagtgattttgctgatggaaataagattaaaaggacattcaggagtataaaggacagaagtgagaggtagagaaggcagaggaagggccaaaccaatacctttagccacagtttgagaaccattagctaaggtaacagtaggtaaatcagaggtagtagtaatagaggagaaaagatccttattaccagataggtgatcagatgctccagaatctagaatccagggtccaagagaagatgtgtgggtaaggcaggcagaggcattaccaggctgggcaacagaggcaatagaagcctgagatgtctgagatgcggaggagctcggaggctgagacagcggagaatcagaggactgggccatatgggcagtgcgaggaggtcttccatgtaactgatagcaacgatcgcgagtgtggccaagtttattgcaataggtgcaatgaggacgttggcctctacctcgggtaccactgcgtcctcctcgagaggtagtttgagaaactaacatagaagaatctgaagcgctatcagatggcaaagtctgagtggacgagatacgaaggaggcgagcaaacacatcatccaaggacggaactgatgaactaccaagaatctgatcacgaataggctcaagatccggacggaggccaataagagtaaggaccatgaagaacttgtcaagctgtgtttgttgagccccaacatcaggagtaagaggcatcacagtcaagaactgctctttaagagaggcaatctgaccaatataagtagatagatccaagtcctgttggctgagatggacaatagcagaagccaccttataaagacgctggatatcattcgtgtataatcctttggcctgagtccaaaatttaaaacaagttttataggcctgaagatgaagaagaatccggggatcaaccgattgccataatacactacacaactgtgcatctatcttcctccactgtacgcggtcaacctcagggatatctgcctcctgggtaaccaaatgatcctcatatccttgacccataaaccaaagttcaacagaggcagaccaggagagataattctcactgccaaccaatttctctgaggtaatcagaggagatccagagagaacagacgtaaagatctgatttttggtggtcatattcacgtatttggatcgaagagagccctaagatgggttcagatttcggcggagagagaaaaacagtgaaaccacggctgtgagaggtgcaatcaatggagaaaaaaaggtcgtgacgtgcctggagaggaagagaagcagcacccaagcctcggggatggagggggagccctgtcggaggtggccggaatggcaagaaggccaaaaccagggaaaaaatggagatgcagggctcggggaggactgccggagggctagaaggccaagacggcgccgaacgagcctggagaggtgtcggaagtggccggaaagtgggccacgcgccgtcacgcgccgacgcgtgggtgacaggccggaggagaagggcggcgcgtgggggcgcgtgagatgccggttgccggtggggtttccactggcgtgtagatcagcctccggcggttcggaatatgtggtcgtttcccggaaaaaatgtcgccggaaaatgtcgccggaaaaggttgccggcgtgatggagatccgacggcgatgaggttgtccggggtggttcggaaagagagtgaggggaccggagtgaaaacacggtcacgggacggttcgccggaattgagtacacgactaaaccgaaaaaaaaaattaggttttctcctttggctctgataccatgttgagagagagagagaggagaaaaaccttattcattcattgtaatctctacttacaattgagagatatatatatacaaggctaggagtcctaactaccatacatgtgacctatattaacaaggaaagatagtatactatacatacattatattcaacatatatatatatattgaaaggtccataaaagtaggtcaaatgagcaagatgttctttctcctattagatcggctgttttcactttatcttttttcaagtttttggctattaaattattttcaaatgtactcgttcttagaatgatgaatattagtagttaaatcaaaaaataaaaccacggtcacactgtcattttgagcaggacttattcttcaccagattttctgagc

SEQ ID NO: 11665 - DNA, 5440 bp, Vitis vinifera
  Intron number 2 from transcript GSVIVT01004732001 (locus G SVIVG01004732001) derived from phytozome v7.0 (chr-ID chrU n; pos 15628903 to 15634342 reverse strand)
ggtttggtcggattagtcctccaagtaataggtattgatttcttgtgggttttttctcaattgaaattttttttggcccgaatatggatacttttggatcaatttggctgataatgtgaaattggatcgttgtttgcttttcaagtgttgggtagatgctcaattggtttgatagttgaagcatacatttgtgcaaattactttggatgattttctaaccggtccggggagagtagtctctcaagtaataggtattgtttgctatgtgggtctcaactgcaggtttttgcccgaaattggatactacatcgattaagctgcttgtgctgaaatcagatttatgcttgctcttgtatgttttgggtcaattctcaattggtttgatatcagaagcacattagctatatgggtttgtttaattactagattctatgatttgctatcttttggtggaagtagtctcccaagtcatagatactgttttccatgtgatttgttcttagttgcatattttacctaaatttgggtactttttgtatccacttaatcatattttgtacttgcttcgtgcatattgtggatgtgctccatcatcttgacagctgcaacatattaacattgaatttggggtggttgtaatgttttatttagtattatatggtaatttatgttttgaagtgattttgcagggcattgcatgatatttgtatggagttgaatggggaaatccttcatttctcatatcatctagatatctgataaagtcaaaattcaacaactatgaattgttgggaaaaggagcaaaatgtcgaattttccctaccttaaaagaaggtggagtaagggaatgaagtttgatctccaaactaaatatcttctcattgatcatggaggccttcattcgccccttcatcctctaattggttatagtagcaaagctctccatggacaagcatccacttaatagtttgccatataaaaacgaagcttgcctagttaatttgtgggccataaaatcttaatcaacatgatcataggctttcttaaaaccaacctttatgactgctcctccttggattggaattttgattaagaatttcattaggctacaactctatatgtgaaagacacttcacaaaggggccataaattggagcaataattttatggattatatcaagttgagaatgcatatgaagtatgaactactcttgcatccatcttgagttttttcttttcttttttctccctaccaagactagaacccaaaacctcccacatctccatcccaactctttgcttttggagccaagcctgtagggtgatgatcttgtatattttgtgtttaggctaatggttctaaagcccttaactccatgtactcttttgttaatctgaacaattgctatgaaaagaaagttaaagcttgaattaggaacttctacgaatggaacttggaactcttaagagactcttagtatatctccttttagatgttctcctaacaatctttgatagaaagtcatgatgaatgccatctatcctcaatgccttctttctattcagttgaaagattacctccatgatgattttccttttttaggaagttatctccaatcatcatgccgtccttagcaatggttctttttatttttgttacgtacatttcaatatttcatagaagtatctatcttgaactatttgttgatgactctagttcttgatggagatataaacataatatgagttttgtgtcaaagaaagagtgtcgagaaaattggaatgctctgtgatatgagtcttcaatgaggaagctcaaggaaaacaagatggattatgatttatctatagtttctcaatgaagttaaggatcttgtattggaatactagagtggttaagaatgaggagaagaggaaggttattaaatctttgtttcatcctcaaaatgttgatttggtgtgcctataagagacaaaggtggaagctatgttgatggccttggttaaaagcataggggtgggcaggttcttggagtgtgggtgccctaaaggcaatgggagtagctggagggtggtggccttctaggataaagtgttggagctacttgagatggagatagttcttattcaatctttttttagttgagatgttgtgaggaaaagttcacttggtttttcggaatttaaggttgtaggattgggatagaactcgaaaatttttaggaggagctgggctccatgaaggatttatgggaagatccttggtgtattgagggaatttcaatgtggtcaaaatcctagaagagagaaagaattgtgtcagaatctcctagaccatgaaatgtttctcctaagttatagaggaattatccttggttgatctccccttggcaaggagctttttcatatgatgtggaggactgaataggcaattgctgtctagaattggtcgtttcctaatcacaagtgattgggaatatcaattctcaaatacattgcaacttctatggctgtagctagtgtttaatcattcccttatcttgctagagagatgggggtgagaatgggaatgccctcttttagatttggtgaagggttggtgggaagggtatcggtttactggatccttgtagctttgttttaggtttagagttgatagtgttaaacgaggactttatagcttggaataagggagtattcgaaaatgtagtggcccacaaggcttatgtgttggattagaccaattattgggatgaaaaggagagggaatggttgctttccttagaagatggcaaagctagaagtggcattagaaaaatctaaatcattgggactttgaagaaaacatcttggttttggctagggtttgttttataccccttaagtgttgagttttgtgattataagcacttcagttgtacaattacctttactttcttgggtacacaataattcttgcttttaatcagatatatgtagtggattgttgtatgagagaaggatttctcatccttctgtatactcgcttattttataataataaaaatgtttacttctggtttaaaaaaaatcctgaactaacagaagatgactaaacaaaatgccaaggaaacatgcaagttgagttggaatggataaagtgatatgactttagaaagacttgtacacatttcatgtgagatgaatgagaagtcctgtttttgtttcttctttcttcatcactgtttccctcataactagtgtttttggtgtttttcctttgtaagcttccatgcatcctttaggacaagtcatttgcttttccctaactatgagttctttgaatatcttttgattataaggacttctggtcactttatatgaagggaagacaggaaaattgcaaaagaataggaaaccaagaaaagggacaatattcatgaatcttgagaggcatgacctttttttgtgggtttttggtgtttttatttttctggtttgtgttttttttgtttgtttgtttgttgttttttgtttttaatcaaagtaatgctaatggttttctatctcattgataaccctatgtgcaccccaaataccatgatgctgatttattttacatggatgaaatgcagtattattgttatgtagtgctttttttttccctatttgtcaatgaattgcatatattctttccatgctcagttaaaataaataatctgatctgtgataaatttcagtggattggtgattactactcaaaacatgctattttgtagcttgtaattagctcttttaaacaccattgagtagtaattattaccttttaacccaattagcatgttaggagcccttgcaatcgtttctaacaattgtgttaagttttggtgctttttgatagttttatgctcaccaaagcaatttaagaatgagggagagctatttatagttcagggcaaagcttttgaaagcttaaatttatgaagaaatcaagctatggagcctcataatcctttgccttagtggttcaaagtatacaaggaagaaacaatggagaagaggaaaacaggggatgaaaacagaggacacagctgcagtctttcattgcacttttggagcacttctcgaagtccaatttttacgttctacataccatttcaaagctcagaaagtcaagaatccaacgattcaaaccacgtatgatttggagctgaaatgaggaagatatggacttcggaagacaactgcatcaagctgagggacaatttcgcacaccactgtttaaggtgcgaaatcctcagtccactgtgcgagaatttcgcacacctcaaatcaaagtgcgaaattggaactcagcgtgcgaaaattggatatttttgccgactctttttcttctgatattttttgtgtttaaatttccattttctccttgtattcaaccactcatgtaattccttagctaggaagtatccaaggaagggtaaaattaccttcctatataaattctcttgtaatcactgaaaagatatcttttggggagctttctccaggagaccaacttatgtaactttgttatacaaagatctcttttgtttattttctctcttctattttctattttcttgcaagccaaacaccctctgaggatgttttcccagaggatgagaggctaaacaatagtttcttggattaaaggaagctaggtgaaaagtccagattaaaaggtggaaagtttccgtgcattaaattcaggtagttggagtccataaatggtttttaaagccaaggctttgccttaaatcccttcggatcactttgactggccaatacatggtaagcttaaggtctctgtggatgcttattgctagatccatatcagtccattagttatcatgtacgagccattggaaagtgattcaaggtgatagcccatagtgtcttaagccattaatggaccttgactaccatctctagtgactttttatggattaaaacttcattgtcaaacctataccggttcgggaaataactataggttaaatccccaatgcgaggagaaaaatccggaattttccactttgcatctggtacttgaacctagcaacctttagctccgggagactttctttcttccactttttacttagttctatgtgagtttagtttaaatcaccactttcaaagcaattttattttcttttaaatttcaagtttgtgctaaaggaaatcatcagaatcaatttctaaattagagcctatcattggtagagtgaaaacccatccctgagttcgaccctagaactgctatactatagtagctttgctacgccagtataaggtcataggatttataaatattttttattaaaagacccgactgggcatgaatcaattggcattttaccacaatgttactctttgcacaggccgacaacggacgtcaattgggcaccaaaatcaa

SEQ ID NO: 11666 - DNA, 4257 bp, Vitis vinifera
  Intron number 1 from transcript GSVIVT01027802001 (locus G SVIVG01027802001) derived from phytozome v7.0 (chr-ID chr5 ; pos 7925235 to 7929491)
gatcatttgaagccctcatagaagttttacaccaagaattttttacctttgctgaatctgaaaggtactttcaagataggttttgagagtttgacaatcggaggttcaagattttgataaatgattatctcacaaccctaaacatcaaatatggagtttccccactttaaaacatttcaaacgcagatattttagagtcaactaaagtgggaacaccaaaaactagttgggcgttcaaatgcttgagtatttgaatgctcacccataaacctatctttctctctctttctccctctcaatttttttcgattatttccattactctatctcttttaatttagaaccatgcattagtcattctaaagttaactttactaatccaaaaagggatacttaaaaaaattattttatgatgtttttgtaaaacaagagcctatttatgaatttgaaacgtttttaatctgtttttatatttatataattatttttttaaaacaacccttaaaaaataagtaaaaacaattaaaagatattatgatatatataaaaggataaaatactattttatattttttgactggaaacatcacttagcaagaaaacttggtttttaaaacaggagatgtagaaattaaagccatgcctatcatttcatgttacgcgctttcccatgtggtgacaatggccataagccgtcgactaacttctctctttcacttcatatgattatgaagtatataagaaacattggtttattatttgacatacttccaaaaatcatctcatcatggtgccttaatactttccattttccagattcactattccctttctttgaatatcaatgcttatacatccatcatataccagaatgacatttgtcccttcgacatacttctccatctatggacatttttgttgctctcttatgcctatttgtaagtttttcttaatttgcttctaattggatttagtggcgaaacgaacaatttgattcaagggacaacttttaatgcatatccaatggtcaagacttgtcattattagggaagcattatgagtcttatgttcgaatcctcctatcccaagaagttaatttttttttttttcaaacgttttagatcatacttggcttcaccaatgattggattccttatcgaaatttaatcaaataaaagaagtgaatctcacaagaaatccatgttgaatttggaggaagaaataaatgatgactatgtgtgttttttcttacttaaatctaagctaataattaatacaaaacaattcctccttaaagtcagaaataatgactttaaatagattgcgtaagcctcttatattaatcatctgttctaaaataagacttgtaacttttttcttttttactaattatattatcccttcacaagcatcaatgcttccaaaaatttaaattccaaaccaaatctcttagtttatggaaaaaccaaatgccgcatttgacttccaaagatgtttaggtgtaattggttgatgctgaataatttgtatgctggtgtgaaacctcagcaaatatgctaaatgaaaatagttgtttatcatgcccacctcactccaacatatcaatagtcaattctttggcaagaagcttggcgtggatattatgcaatatgacaatgacaattgagtagattattgtgtcatcatcaccaagttgcgtcgtcaggccgcaatgctataccattaagcaactgggtttgttacatctcaaccgcttggattagctgaatatcctcaccatcgttaatgatggtgctttgactgcccattagtattaacatggggtgaggtcaactggttgtgtttttacgaaatatcgagccaatgacgttgagttaatgatcacaaaattggtcaaccagtgtatatatatttcgtacacaatcaatacaaagagggaaacgtttatcaataagatagataggcggggaaggtaataatattagaaaatctaaaagggagaacgacttcagaatttctgtgataaactcaggctgtccatatctcaaccgaggaacgaacgaaaccacctgtaccaaaatcagaatggattaccaaactttgagatatgttgactccagattatactaatatttgtaccttcatctttgtattcgcccgaagcggttaatgttgattaagtggaagaaaatataaacaacttccctacggccccatggtttccgaagaccattgtttgattgccccaaaggtccatatctcccgaatggagcctactgtccttgaccatgagtctccacatgagacgacaatgaaataaaacgagaacgcgttatctgtggagaaagtaagggtccccgcccctttttgtctttgtttttggaaaggattgagggggaaacacagcactttcgagccttgcaacttcggggtaacttcctatcatgtctgcccttgccgtcttcgacacaactgcaccactcaagcaatcaaagtccttaaaattaggagcaagtaacatcaatcattctcttgggtaaagttttcgtggtttcatacgggccttcccatatccttcccatgtctcagagttaccatagccatacatttggatacatgaaatgataatttttgttataataacaatctaatatggattatgaatcatatgagaaggtaggcagcatctgtgtacgtcattttcttggaatgatattggtcttacaccgcgtccttccgctatcattccggaatatctatttcattgaagtttattttgtatgatgttgagggccagaattcacaattattgctcctacagacactcattcttgcattttttatttacagttttttgactaagacatgcttgtcccaggagttaaatggttgacccagggtcttgctcattactgtgtcagcacaggcaatgtcctagggggacggcgaggaagaggaggttaaaaaaaaaatgaataattacttatttaattttttttaattagatttttttgttcgtcctaaacaaataaaattttaagttaactttttaaaaaaaatataaatttagattaattttttaatactaccttaatacttaaaataaaaattaaataataagtttaaaataaaaattaagtaaaagtttaagttcttttcttaaatataatttaatttaaagttaatttaagtcattaaataatgagtattaaattttaccgaacaaccaagtaatgatgatatttaatgatccaaatttttgtataatatatgtgttaggattttttttaaatagttttataaattttaaataaaaaataacaaaaaaaaaatattttataaaattaatttaatattcatatttaatatcaatttttttctttttatattttttattccttcaatgtattgaatataacttttcattttcttttatgtggattttattctttaaaattttgtagttagaccttttactattatttatttactaatcaaaacactatctgactactgcttaatatatattaacttctaattacaaataaaagatttaactgttacaactaatatcaatctgaaaagtcttcagatgtcgtcagggccacaacagaagcttggataactgaaaaaaaaaagagagagaaagtgaagagtgaaagattctctgggccaaagtggatagtggcataactgagaaaaaggctcccactacactttctacatcagttcttacagagccaagaggaaaaggtgtacaataattacgtggtctcctatttgtcagacattttcctccgaactcttttcaggtttgctggcatcactattccccgcgttactctgattattatttgctaagtttatctgaattatatagatatatatacatatatattgcaggacgtaaacaatggattattccgtacatgatgtatatccattacctgaagtttatggtcaacaattacgtgtcttggtcccaaattgcaaacccatctgttgtgatggatcgccaacccattctacaaagtctcagacgaaattaattaaaactagaaaaaaaaaagggaaaatgagaagaaagttgtcagataaaggcaaatagataaatacaaaaggaaagcagcaaaacctgtgaaagcgttgacccagtaagggtatatactacgatatgcgaaaatgattctgagcaatttcagggtaaggagcgcttaaatagcaggccacaatcctggtcatcctcaccacaatcac

SEQ ID NO: 11667 - DNA, 4134 bp, Vitis vinifera
  Intron number 1 from transcript GSVIVT01024258001 (locus G SVIVG01024258001) derived from phytozome v7.0 (chr-ID chr1 6; pos 275908 to 280041 reverse strand)
ggtcgctactctgccctgctctcaattcttccgaggtactaaaaggcaaaaacaagaaaaagtaaaaagcatattttcatttgttttcacttcgttgtggcttaaagcgatccaattcttctgttttcttttgttttatctggcttgagtttttctcctctctgatcttttagctgtttttttttttttttgtagtttttccttaaatattatgctgtagtcagataaattgtttttcgtctttaatatgtttggttgcccagaaaaacttaggaacacagaagaaaatagaattttgaatctcaaaatgctggggctaaggacatgaaacctctacccgccaaataggggaacgcaaaagtcatttctgtgatttttataattagttttttctttaattgaaaactaatggtcctggaaatgtatttgcaagcacatttttttgaaaattgtcttctgggaatatcaaaacattttccatgtagatttctatttccataattttttgttatagtagagaaaaaccaaacagaaactacccactgtaacatcatgtttggttcatgggaacagggacgagaatgaaatatttttatccattcctatatttttttgaatgggaatgaatttgatgatttcaatttttgtatttggatgcatatacaaatataaggttggaatgaatatttgttctgttttaatgttaagtaatgaaatgaaaatgaaaaaaagaaataaattgacaataatccgtacatattatttaaaataatattttcttttctttttaagagaaactcataaattaaaataattattttttaaatttatttatttaaagaaggaaacatctttgagatctttttctactaaataataaaaacctatttgggcttctaatttaaaaataaaattatttttaaaaattaatattattgtttggttgtttttcttaaaaaacaatttttaaaaacaaagtaataagtttaataatttttaaaaatagtattagcaattattaaataaattattattttttatttttaacaaaataaatcaattatactttgatgagaggttaatatcctattgtagaccctcatttaggcacgggtcactttttttctatttgtttttgtagatcacatttttagccagatgtcactatcccagcgggccacgtgtcacatccttagtgaccataaggaatcaacctcgctttttgaagctgcagtaggactttgacacgtggaggaactttctggaggggggtcccgcaggccattaggggggcgcggatgagagagaaggaaaggtggctgtagaaggagaggtgcagaaaaggtggctacgacagagatcgttggaaaggcaaattcggaaaaggggggaagggacaacattgggaagaaagaggatatccagagagagcattgaggaagagaaaagaggaggaggaacagaaatggggagagtttagcttgagaggactagtggaaaatagggattccttggctggttgcttgagaggaaggatagctgtccgatttcttgcccacctagttggagagagttattttgaggtacgtttattgtatattattcgtcagcttttattggtgtgcttttctactttgtttttattgattctcggatgatgattgttgattgggagtgaatacgttcatatttttgctaatggttttgtagtggtttagtttgctctggttttgatttttcatgagatatttttgtaaccacgttttacttttcatttgatactcatttaatcttacccaccatcatctaagtctgttggtatgatatgaagcatagcttatcgggctcattttctcgtatctactcttcgtgttctgttttgtcatcctcctctgctcttgatatccgtccatggtacgcatccattttctcatccctgcttgaaggagatcctaggaaatctggaatagttgtcatggcagcaaagctcacctcatcagcatccccatacccattctcgtttattattcatcgttttatccaacatgcctatgccctcatccatcactccactcctattcccatttatcttcatcatgcgtaaacccccacgcatcgcataccgggaggtgatgtctcaagatgatataggaaggaatttgtggaaagaaggggaattaatcactaccatattgtcacctttcatgcccgtttaactcatcatcaatacccatgtgtatgtgggatcctccctaaaaattgccgcgtggctccctctcccttggacatgcagacaaccccttgcgacacgtggcatcgctcgttccacccagacgaaaattctctctcattccacccgaatgtctcacatccagaattctgtccggccaacgttctaccttatccggatgtctcacatccggaattcttctccgtcggcattccatccggatgcctcacatctgaaattcttccccctcccccgacattccacccgaacatctcacatccgaaattcttctccttcgacattccacccgggtatctcacatccggaattctatctgaccgacgttccaccttcttcggatatctcacatccggaattctgtccgatcgacgttcaaccttccccggatatctcgcatccggaattctgtcccgccgacgttccaccttcttcttcatccttagagcattttcttgaggttcccaagatcccattttcaataaatttggccgccattttcttttcgatgagcaactttcgaatttttcatgattttaaaatgatttaaaataagcatgaatttaaattctgtaattctgagtgatggagtttacggaattaattcatgcaaaataaacgggctttggtgggggccctacatcaataaattttcttcaaaataaaatgaatttgaatgaaatatcatgcgcgctattggtgattttttctgtttggtgatatgagtgacatactttatgttcattactatgcactaaccctattttgtgacagtgcgttgtcgtttgctgatcaggtaggcatccacttccactttggttattctctatgcatattctgatactcatatgtgcatgatagattcgggtacccattaatttccttattagatgccatgattgcttcattttattagtagagacccgttttagggacttagaggggtgctacggtcttcactgtaccttctcgataagtaacctgacccctgaactcgatccggttttttcgtagaccgaccttttccaaaacaaagagtcacacttagagtttttctttcttattttgtttaccctttaaaaataaaacaaaaataagtggcgactccaagtcattttttttaaccgattaaatcattttttcaaaataaaaatcgagctcaccatcgagtggggaacgcatgagcacgaaatgcggggtccacacctatttataaaaatatatatataatttatgattttatcataatattattaaaaattactatttttaattcatttgtaattacaaaattgttttttgaattaaatttattttatattatataaattgaatttacaatttgttttttacaaaatcaaaataaaaaattatttttaaaaacaacttatccaaataaagtattcaatcttttaatttttggaatgcttatactaggaaatcaaaatacctcctgaaatctacttttaagtgagattttattttttagaatcattcttggttctattttcattatcacttaaattatccaaatatgagaatggaagagaaaaggaattaaatactcgttccactcctccttctcattaccaaacatggcataaaagttttctgcttttaattcttctactttttgtgttatgtagcatatttttctaaggctgtgcagtaactgccagttattccaactaataggttgagtaggatatgatcttctgacatgccatgtgcaatttttttgttaaaagcatccctggtgtgattattttgtggaataatattcaaagaccttttacgaatcatatatctacttttctgtttattcgcttcatttctttgtcctgtctgatttttatccacgttattcatacagttctcaaggaatc

SEQ ID NO: 11668 - DNA, 9269 bp, Vitis vinifera
  Intron number 5 from transcript GSVIVT01032309001 (locus G SVIVG01032309001) derived from phytozome v7.0 (chr-ID chr1 1; pos 14917707 to 14926975)
caggtatttcaaaggccttatactggttcctgccatataaactttctcaatgacttctgttgaaatttaattaaagacatctctttagtgatcctcttgtgaaagtttccaatgtacttgtttccatatcttcctaaatatatgccttgattcttttctagtctaagaactcaaatcatattttatgaaatcacaatttgcttgttaaaggagactctgatgccctgcctattttattattatttttgtatgtgttgtaacacttctggacctccttgggtcatgctgtgttcttggactgttccgagttttatgctctaccattgaggctggcctttggttcaagagatgcttatggttctgatgaggggtaatcctcgagtggttgcatacaatttaaataagatgggctagggcttcactagtttatgatgaggagcacgggaaattaaggttatgcaaatgaaaaaaataaataaataaaactgagaaaatgaaatagaagagagagagaaccttagtctcacataggccttctagaagtttcacccagaaaaataaatattaaaaataatggaggctctccattaaaggatgcaaagatgaaaaaattgttattatttaccattttgttccttaggcctcttttgtattgaataatcttatttagaagctttagaactaattgaactatctaaaaattatggtgacctattaggactcttaattctttcataaaatttcatgcttttaggaaatagtgactttttagaaatcacaaactcaattctttcataaatttatgtttttaggaaatagaaactattttgaaattgtaaacttaattctttcatagaactttgtagaaattataaattttttaaataaaactttttaggagatcgaaacttttagaaaataaaaacatattttagaaaatagaaacttttagaaatggatttttaaaaagaaaaaaagaaaaagaaaatagacaccttaaaaaattagaaacttttaaaaaatagatgttttagaaaatggaaatttaagactattagaactaatgacaagaagaaatttctagcaaaggaacatagtaaattccaaatagacatctaataattattgctaacttgtctccaaacaacctggatgagtaaaaattatctaaatgccattttaatctttttcatgaattttttattcttggaaaatataaggaaaatattcaccaaggaatctttccattttttgcttcacacacacacagaggttctttggcaggggttggtggagaggtcctctgagacttgaggttgcctatagttgcaagatatcgcttgttcttccctttgtcaaaaaaaggtaggcaaaagagagatgggagagaagaataaaaaaacgcattctcacccatcttctaagaacaatctctctatagaaggcaaggaatacaatggctccatggtgaatactattctcactcttcccataaatatatgtagtgtctcaccatttactttctgaagttggtgaaacttgaagaatagagtttcacgggaataattttctttcattgagatttttcttttatagagtttacagcatatacaaatccttcaaatcaggaaactaaatcactgattaaagggaaagaataactcctaacaattactttcctaaaaatacaaagattgacaactaatagctaatttacagctttacaaagttatttctttccatatcagttttggttttccaacactccccctcaagctggcttaaagatatcttccatagccagcttgccaactaaaaaatcgaattgcctcttgtgtagtcctttggtgaagacatcagccacttgttcctcagtagggatataggtcatacaaaccaatccgttatctatcttctctttaatgaaatgcttgtccacttccacatgtttggtgcggtcatggagaaccggattgtgaactactgaaattgctaccttgttgtcacaatacaacttcataggagatgaacctgtcatctctaactctttcagtaatcttcttatccacataatctcacaaataccatgagctacagctctaaactcagcctcaacactgcttctaacaaccacgttatgttttttacttcgccatgtaaccaagttgccacctacaaatgaacagtacccagaggtggaccttcaatccactatgcttccagcccagtctgcatcggtgtaggtttcaatttgtaggtgtcctcgtgacttaaacagaagacctctacctggtgtcccttttagataccttagaatcttgtaaacagcttcaaaatgctctggtccaggcgtatgcataaactgactaaccatactcattgagaatgctatgtcagagcgtgtataggataggtaaatcaatctcccaacaagtctctgataacgatcccggtctttcacattcttggcttttgtaggctgcagttttacattcggctctataggtgtttcaacaagcttacatcctaacatacctgtctcatcaagaacatacttccattgatttacaaagataccttctttggacctagcaaactccatcccaagaaagtattttaatgcccccaggtccttaatctcaaattcctcagcaagtttcctctttaggttctctagttcattgcaatgatccccagttaacacaatatcgtcaacatacacaattaagatggctactttaccctcatttgaatgtttgttgaacatcgtgtgatcagcttgactttgagtatatccataatgctttattactttgccaaagcgctcaaaccaagctttaggcgactgtttaagtccgtataaggacttcttcaatttgcacattttcccaactccaaaactttcttcaaaacctggtggaggactcatgaacacttcctcctctaggtctccattaagaaagacatttttaacatccaattggtgtaagggccaattggaatttactgcattggaatttactgcaagggacaacaaaactctaatcgagtttattttagctacggggccgaaagtctcttggtagtctatcccataggtttgagtaaaaccctttgccacaagtttggctttgtatctctcaacacttccatctactttactctttattgtaaacacccatttgcaccctacaacacttttttcccttggtaaatctaccacctcccaagtgccattcttttttaaggcattcatttcctcaaacactgccaatttccaactcggttcatctagtgctgcttgaatatttctaggtactacaagttttgaaatatttgtagtgaatgctctatagttgtcagaaaggttactgtaggagatagatttggcaatgggatgtttagtgcaggctcgggttccctttctaagagcaataggtagatcaaggtcaaggtcctgtccaggaacaattggggctaatcctaaaccaggttcgggtgcagatatttctggacttggaccaaagtgtgattgtaaacttagatcagtaacagaagaagaagaagcatgtataggagtaggaatagaaggagggttacctgagacatttagagagccattgcccaaggctttcagttgaccatgtgctgggatgatcagctggtctttacttcttctagggactttcttccttgaataaaccacaggctcaagattatttctattttttttcattcgtagtatttcttcttctgacagaccaatttcagattcggattctatagtcttagtttccttattttctttttcaagagagatatcaagaattacactaggcaaaggttcaacaatttcccaaaaatttggttccactaatttctccccctgaagtaaatttttggtaaaatatgggacattttccataaaggaaacatccatagttgtgtaaaaacgttttgtaaggtcacaaaccattttttttcctaaaattgtggttacttttgaaggtcccaaaacatcactgtgaaaaaaataaaatggttttgatgcatagtagggttttggaatgtaagttttacgttggctctttgccaataaacaactttcacattgaaatgataaaggatcaaccttttgaaataacactggaaataaatgttttaaataagagaaactaggatggcctaatctgcaatgccaaaccattatttgatcacgaacagaaagagaactaatactacttagtccttgagcaattttattactaggtaaattatcctcgaaataatagagaccattgatcatcctaacactgccaatcgtcttccccgagcttcagtcttgaaaaatacaatgggattcatagaagataacacaacaattagaatctctagataatttgctaacagacaagagattacaagtttaggaacatggagaacacagatttaagatctattccctcagagatttttattagaccttttcttgcaataggtgagaaattaccatcagctatccgaacctttttatttctaggacacacagaataggattcaatcatgtttgaggaattggtcatgtggtcggatgctccaaaatcgattattcatggagtagatttaaaacaacaagatagagcatataattcattacttgtgtgtgccaaagaaacactagaagtactggatgtcaagtcggatttcagcagtgcaagaagatgctccatttgctcagtggtgaaagggttggtctcagcttcattagcagtatgaataatggctcggcctggtttgtcacctgtttttcctttccaatttgcaagtttctcatggattttccaacagttctcacgagtatggcgaggtttattacaaaaatcacaccaaacccgtggtctttcatcagatttgcgctgaaacgcagtagctttattatagcctccacccgtggtaaccaaggttgaaccttcaatagcaactccaggtcccttcttgcccagcatcacattcctccgactcttctcttctaacttctgaaaaaacttcaccaattgaaggcaggggttgtcttccaatgattctcccccttacctcatcaaacttgacattaaggccagccaagaacttgaagatccgattgtcttccatggtcttcttatgatgacgtccatcctcggcagatttccactcataggtgttgaagaggtcaaggtcttgccagatccacttcaaggagttgaagtactttgtgacgttgtcctccccttgtcgtatctcaccgagtttgaggattaattcaaagatctgtgattgattccctaaatcataatacatctgatttacattctcccaaagctcgtgttgttggataacacatgtaattagagctaatgtcttcttccatagaattcacaagccatgtcatcaccatggaattctcagcatcccatatagcatagttcggatcatccactgcaggaaccttcttttcactcgtcaggtagcccatctttccacgtcctctgatgtacatccgaactgattgagaccatctcagaaagttgtcaccattcaagcaaatcgtggtgattcggacagagtgagattccgaggtggtaggattgatttttgaagaatcagtgatgatgggattgttcagagaaggttgaggaatagtagtggactcgtttgaaatatccgacatggtttcagagagaacggggattgaaagagaggaagaaggaggatttcggcaagcaaattgctagctctgataccaacttgaagaatagggttttacgggaataattttctttcattgagattattcttttatagagtttacagcatatacaaatccttaaaatcaggaaactaaatcactgattaaagggaaagaataacttctaacaattactttcctaaaaatacaaagattgacaactaatagctaatttacaactttacaaagttatttctttccatatcaatttcggttttccaacagtgaatatatatctccatttcagtatgtttagaatttagggacctcctatgacatttaggatctgtgggacttggtggtggagagaatcaaagagtgggtatttacataaggaagagggctagcttgtacttgaaggtatccttgttgaggttcctgttgtagtttacaattttcttcactgttgttgcctttgtgaggaaggggcatgtcttgcaaagtaattctctgtcaagtagattggaggtaaaaaaacaggtccactaatgtttttgtgtcaacttgttttgtgtttttttttaaattgtgttttttcttttaattttcctttttatttttttctatttttttatgggtggggctggttatatgtcttgggtttccctaataatggtaggtgatttagacatatgagtttagatgtggctgaacaaggcactctgaagaaagtgcctatgaaggtcggtggttgagaagaatagcttgtaaagtgtaggagtagggaaatgtgggaattcatgattgaaagtatagttttgagtaaaaattgtttccaaattggacttttgcataaagaagtttcatatctatctcaatgtggttcttttatgttcaactagatgctgtgtcataccaatagctaccttttcctgcaataccaagttgtaggtcaatgataaatgatctaaattccaacttttactacatgagtttgcatgcttcatttgtcatggatcaacactctagcttgatacccaccctgtcttctggttgaaaataaaatacattaaaagaaaaaggttacatacaatgtctaatgtgacacaccatgagcaacttctttatgaatactgaggaaatccatgggaaaactagtgttccaaacacaaaaaatcaatatgtaatcctttcttagctactgtactggctagactatttgcttctctgctaatataattataaagataactgtgaaatctccttagtatcatactaatatctttaataagtgcactaatgctactgggcacttgtagcttctttctttggtgcatcaatcacaatctttgtactctccatactctaccgtgttactaaatttccttcaaatcaagtttagcacccagatgtggatctcctatcctaaatagagggaacccaataagcatcttgtaatttgtctaatttgtctctccttttatgaatatggggccacatgtgagggaagttgttggcctggtatacaaggttagacaggtatacattgtgggcttttgtcagcccctcaaactaggcttggtgacactagggcttcaggggggcagcaccttggcccctgagtgacccatgagcaaagcaaggtgcaaaagtgtgggaaggttacctcggaatggtaggctggctgttggcaggcttgagcagcagcaacacacagcaatggctgacgtggcagcatgctgagactatcacacaggcgcaggcttggtgccttgatgtggtgcagcctgtggacgtaatgacactgaagggagcttagatggatgcctcggatgaagtagccagccttgctgcaataaggacgagcacagccttagcagcaagggtcttgatgcgtgagcccagcactcactgatgcatcaacacgagtcttgagcaggcagactgagtcaggcacatcttggcattgggatgagcccgaggaaggtgtgatcatctgcagcagcaagcactgtgggctagtatacagcataggagactcccattggcatgggacttctagttagagtgggagacagaaatctgatgcaagaggagagggagtcctgacacacaaagactcctaatcagattggaagactaagtcttcatgcagcaggctgtggcttgggagtttgggattgagtaggacttggagtcctactcaaggtggcatctgttgagcttggaatcagagtcagactaggactcaaatgttatttccctagtgggattaggactgcttgttgcaccctctataaaaggagagcctcatgcctcctaaaggcaagtgaactacccggtgagattgtgggagtccttgcaaagagctcttgtaatctgttggaaatcaatgagattcaagttggggagagccctgtaaatattgtgtgcgctttgtggcttaaggaaagactggtctagggcgtgcctagacgctgcacagacgcaaaaacttaacccagaaattgcgtgtgtgacagcttctatcctcatagcttgagcttttaggaaagttggtagcgaactaacacaaatgtcatgttgcctcatcaataataaacttttgtttccaccacaataaaatttgcaaagttttgttgtttctctaatcttttatcacttcggtgcaaaaatgattcacctttcagcccataaaaaagatggatcctcctctaaatcttagaagtcatcagctctaaaatacatactcacttagatatgagacttggtcaggctgggtcaggttaaaggtcaaccaaagcccaatccaacatcttttcaagcttaaggatttcggtccaagtttgcttttcgtttaatgggttccttggattataactctgcttacaaacatatataatttgctgggtatcatcaatgtccaaaatgatgaacttgctaatagatttcctcctcataataaagggttgttgcattatgagagagatgcagtaacagaacattcttcatagttatagtagtttggtaggggcttggaagcaaagtggatcccatagcccagagaagtttattttagtaccatcttataatgatgattaaggaagcttgtcagcacttggttacgtataccaatgatgaatggtccatgaatgggaaaactcacttgaaatggtttttccgagggcaaaatggacaaataggagtgacagatgcaagtgtaagaacaagggtaacgctatgtaaataacaagtgatatggtgctgtttgaagagccacaaagaaaaagtggaactacaggggtggtgataatagtgattggggcatggggttggggagcctgcttgtctttttctgttagaagtgaacttagatttgactttttgagtttaaaataaattaggaaacacattatctatcatatgctttattttttccgatccttatctttttatctttcctttatgatttttataattcatgatgctgtaaagctgttctgatgtagacatacctgcaatctatcactgtgcggcttgagga

SEQ ID NO: 11669 - DNA, 5664 bp, Vitis vinifera
  Intron number 2 from transcript GSVIVT01007599001 (locus G SVIVG01007599001) derived from phytozome v7.0 (chr-ID chr1 7; pos 11412785 to 11418448)
tggagtataagctcttatccggtttgaggaacttggtgtcaagagcctcatggattggtgcagcaaacatctgattcactctcatataagatttcaatgaaggaaaagaaaaaaggtctagctagctagaagggaatcgaattaataattaatcagcaagagcgctgttaaatgcagcattggacagaagggccagtccaagtatttattgtttgcctccattgtttagggttttctctctttaacattatctttcccacaagtttttgctgcagtttttcacacttttgccgctttcaaatattgcaaccttagactttgaactatcaaaaattagaatgtgatgttgtatatataatttatttatttattttgaatttatgacttctttgccttctttttctctagccatggaatctaaatgatacttaaaagttagtaacattgccatcacaagttggaattaaataagatatgatatgcatagatatagacatatgtatgtcctaaaatttcatttttaatgggacatgatattcttggagattatatcaacatatgattaattgggtatggactacatgagcctcaagtagtttatcgaataaattgataagttggacattctagacccaccaagtgaaacccatggtttcttgatcatgactaggtaaagttaaagttccattaaagagagtttccattgagtagaacctccttagggaatataatgttttgacgaggttgatcttgaatcgccatccaagtatgaattccttggtttaagataatatttttggtgcagaaagtctaatatatttttggtatttattaaatcatgctcatatttgatttgcataagaaaaaaataataatgaaaaatgtttatttaaattatatatattatattatacctcaatatttttttgttaaaaaagtgttaaatctctctcatgattactattaattaaaaatcatgctataatttattatttaataaaatatttttatttgttgtaaaacaaagtaagagaaaaagaaagcaagaaagagataatagaatgcacaagaaaactcaatagaatttcattagggatccttccattttatagggagttacaaaagatatttatggatgatcgttcacaagttaccataatggtacagaatctcatattttataacactccctcttggatgatcataagaatatgtctcattaaaactttactaggaaagaccctatgggaaaaaccctagtgaatgaaaaagagtacaatattcttttggattactataattgtctcgttaaaaaccttgccaataaaacctagtgggacaaaacctggacgaagggaaaaaaaaaagtatagtgtagtgatattcttatcaattagctccctctcacgttgacatgattatattttctctagtagcacaacatgaagatctttgagtcgatgtattccaatgaacttcttaagtattgcagttgataatgtctttgtgaatagatctactaaatttttacttgattttattcgtcgaataacaatttcaccactcttctagagttaatgaaagtaaaagacttgggcgagatatgcttaattctatcacccttaaagtatcatttcttattctgtacaatgcatgcaacattattaactaggtagcattacctctgatagaggatagtccacatgtttccattatttgcttgattgatctccacgatattgtcgtactaccatagataaatacatatctcatttgagattgagttttgtggaattctgaaagatagtcagcatctacatattcaagcaattaagattttgataattcagaataacatatacccatgttattgtagtacatgattgattttattccaatgtctctgagttattgtagaatcatatctcacaagtaaattaataagaaatgcaatatctagtcgtgtataatttgtaagattcattaatgcatcaataacactataacatggtacttttggaccaagtagttcttcattatcttctttaggacagaagaggtctttttttcacttcaagtgaatgaactatcatcagagaacttagtggatgtgatttatccatatgaaagtgcttcaagactttctttgtatatgctgactaataaactaatatttcgtttgaaaagtactcaatttgtaggctaaggaaaaattttgttttctagaatctttcatttcaaatttacttttcaaatagtcaactatttttataagctcttcaaaagttccaacaaaattcaatgttccacatatactataataattgcaaatattcaacataatgaatatgtatagacaaataaggtaatacatacatacttctcacttcaaatattcattgaagtgatcgaaccacatgtctttggattgcttgattgatacaaggatctttgtagtttaattgagtacatgatacaatgttttgaattagttgcttcaggcatttgaaatttttaagggattttcatatatatatatatatatatatatatatatatatatatatatatatgctattatctaaagatccatgtaaatatgcagtaatgacatccatgagacgcaaattcaatccttcaaagacttttaaacaaattagacatctaaatatggttgcatccattataggagaatatgtttcctcgtagtcaatactaggcttttgcagaaaccttgagtctgagccacgttttatatcttgttatttcattatatccaacaagtttgacaacttcaggcatctagactacaagtccgaatacttttcatttttttaatgagtctaattttttggggatctattctttccattttggtcaatcttttctatgttgacattcattcatagtttctattttgggattctcatcatttcttatgatgtcaataactatttggaaagaaaatatattgtcaatgacaagagtattttaatcctatttttctccataaataagtaaataattgagatctcatcaatatcagctatttgtacattttcatgaactaattgtaaaacatatgcttcttatagtgctacttgtttaaaatgtgcctctttaggggttgtttgagactgataagtcattttaataactcactttatatgcaacttcttcaagagtgtcacattttatatatctttccttgtgttttcctcttctatggaatgtaagcctttttagagtctatcaagcttcaagtgtgtcttagactcattatttaatcgttctttagagacatcaatcgtactggaatattataggtcagtgaaaatgattttatcactttctttacatcaatgaaagtatttggcagttgatttgcaagttcttgcaaataaataatctttgaacttccaattcacattgattagtacgaggatcaagataagtcaaaatcaatgcataatttcacattgttcttctggaactggctcttctccccctaacgacgagaaaattgtctcattaaaatgataatttgcacaacatgtcattctatctttcaagtgtataggtagactagtcactaaataaaaacttttggttttataatgtacatccatacgactttttaccccgagggaccaagttggttttacaatattcttgtggatttaacatcgtataaagtgtcttcacatggaatcaaatactattagtggcataatataagttcttttggagcctttaatcaggtttctagcacctgatgtagtattaacattgtttgtaatcaatgttgtacaattaatgagacaagagttttgtcaaaataacaagtcataaaacatgtcataaagacctcacatttatggagttaaagaaatattatcatagagaaaaagttaaaatcaatggaaaaatatcaatcatcgatgatgacttaacttaataagttgtgtaaaagcaatgaaagcatatataatacaataaaacaaatatggaaaagataatttaaagttatatatttcttaaatatctcacacatttgattttgtaagtatggagcaatttatacatgaaataactatgaagtatttcaataatcaaactaattgtagtgatagattaataattttattcaaaatattattatgatttaaatcaatgtgcaaaaattaatttataaatcaaaatttcaagataattgttgacccccattttggagacattttctctttgaattttctgcagattatttggccaggtgtcaccatcttggctagccacgtgtcgactcctgagtggatgctagggaatcagctgagcatttgaggaaccaatagaaatttgacatgtggaggaaggttctagaagaggaatatatggggagcgtattccgttatgcagaggggtgtcgtctggcagctgcagggtagtggggggggagagaaaaacggaaaaaaaggaaaaaccagagattggggagagcttgagagttgagagaggggaaggctgctaaagagggtttttcagagagttttgagctagttgcagacggtgaagctcaaaggaagacaccttagagaggtcgtctgggcagtgagagaggaacggagtgttgactggaggggagttctctctggttgaagctgttacagacagagtaaggtggagggctaagcaaggaagaagaagaagggtgatttactgagttcctgtcgatcttgttggagaaaaccattctcaggtatgcttttcttctctctatcttctcatttttgggagatatttggggattgctagtaagtatgttcagatatattcttttttatatagttcttgctgaatatcagtttgtccttatttcatcttccccatgatatatatgtactcctgctttgttttttttgtttgatactcatttgatttcacccaccctcatcaaggtccgttgataacaatatgtaatgtaccttgtatgattcccttttgtttctaccatttgtactctatttcggttatttttccctgttcctcgcacccatccatggcatacaccagatttcctatcttggcacgaaaaggtaaggcactgtgagattctcagtggaggaattttctggactagagagagaagagagtattttgtctagagattttctgggcagtggtggctatggatctgtttcctaccgggcacttggagtttatgcactttgcggacaagctggggtgtggcataggttgctaatgcttttgaggttttcccacttgggaatcagaaggaatttgcgtcggcgttgcaatctgctgttgaggctgggggccaatggaaggatttcgtcttatcagagatacgatattcagcaggctgcgaggtggattgagcaggtgcttccttccactttgctgctgttggtgattttcatccggcaatatctgcaatgattctttgttactatttggatatccgttgtaatgttcaagtccaatgaaattcttcggaagcaaacaacgtcgaaaggagagaggaaaatatctgttctagttgggatctctcttgtgttcacacttcacgttgctggtgcttactgatggtatcataatgataccttgatgaggtagacaacaatggttttcaggtgtattctattg

SEQ ID NO: 11670 - DNA, 9006 bp, Vitis vinifera
  Intron number 18 from transcript GSVIVT01013898001 (locus GSVIVG01013898001) derived from phytozome v7.0 (chr-ID chr 16; pos 6372558 to 6381563 reverse strand)
agaaagttgtcaatcgaacgctctgaccctagaaggtatgtatgccattgtgtgattttcttttatatgtctgcattttattctgaaagaccttaatgtattttccataaaaagatatcacgatttcacacacctgcgcatgtgctcatgcacatatgtgctaacattctgttacagttagttcagcagggttgaagtgttgtccaatcactgtcaggctgtctaccatctgcattaggttgtaaattgttgctggaagccaatgcaagactgaactgtccaaactacaagccaataagtgtatatggttgtcatctgggggttggaaccccagtcactttcttaagtaattacaacattctcatggaaagtgcaaacctaatggtttagaatcatctcatcgttctagattttcataattttgatgctttcctagaattaattgttattagtttgcacatctctgctctcttttcccagtgcaacaaatttggtcacctaagttgataattctttgatctactgaaagccttaaacaattggaattatagttcttaagtaacacaaaatttcatttattttatttgaatatagatgactacacatggtattttcgatgattcctttttctctatatatatttatatatttctaatattatagatattgagctttaagtgggtacaagtgttgtaaaaaccatgctaagtaccttctatttaagttaatcccttcttgtgatacacataaataatctgcatgcatatgcaagatattataaagtgtaaaactagttgtcctttttttttaataaattaaaaaagaagaagagttttttgtcttccttttttgatggtttgttctccttcattctttcaaatgttgtttttgcctaacataatacaagtatcatttcttattaaaaaaaatcagaagatacaggtggcagatagtgaatgtatgacccattctctaaagcctttcctttgcttctgtctatgggtatagattggtctatcatagtgaagaattattactagatgaggaataaaggtttctctaactaacatgtagagattacaggaaaaatagacaaaggaaacttctgtacactagcctaagaatcagttgatcataggaggttgtgggtcaactatacaagaaaggaaagttcccaatttacaacctataggtttggctacacaatttacttctcccttcaacactccccctcaaaatggtgagtagatgttcttcattcctagctttcttgcaatagtttgaactgaatgaattgcaaagtccttagtcagtatattagctagttgactacttacagaaatatagggaccgcaaatgagcccactatcccattcacttccacatgcttcatgtgaacatgttggactgtattgtgggtaatatttattactgatttattatcacaataaagttcattggtccttctcaattgattttaagatcaataaggatgatctttttccaggggagttcatgtatcctatgtgccatggctctaatctttgcttccaggcttcatctagtcaccccttattgcttcttactcctctaattaaccaatttccttcaaagaaagtgctccctaatgtttacctctaatgcatgactaaacctgcccaaccagcacctttataggctttaaggtctatttttgcaaatttctgaaggagaatacctcttccaagtgttgttttagatactaaaacacgctaaggactgctttcatgtgtatctccttgggtgagtgcataaaatgacttttcatactcaagacatgggctatatctggtctggtttgtgatatagagattaacttccctcccatgtggtaatacctactgcgatccactagtccatcctccttaccctcattcaatccatgatttggttcaattagagtttctatcagtttgtagcctagtatccctctttcttttgagaagttttagattatataatcctggaaaatgacaattctctctcttgactctgcaacttcaattcccaaacgatatgtaagccttcccaattctttaattttgaattcccttgcaagatgctccttcaatttcctattttttccaagtcatttctagtcataataatatcatcagcatatacaatgagagttgtcacctttcttgaacttgagtacttaatcaacaatgtgtgatccccttgactcaacaaagtcatatgtgtaccatactttggtgaatcttccaaaccatggtgctttcttaagtctgcaaactttatttctagtggaatctttgcttagtccaggtagcatctccatgtgaacctccttctccaagtgtccatgtagaaagacattctttacatcaaattgtttcaagggttgatcaacgtcagtagccaaggataacaagagagaaatgttattcatttttgccactgaaggaaaagttccctgatggtttgtcctttaagtttgtgtagcctaaccttgtactgctcaagtgtcacatgtactctatgcttcaccataatacccacttacatccaccaagtttctttccaataggaaaattaactacctttcatgcctttttttttcctagtgcactcattttgtccatcattgccttcctccaaatctcatccctaagtgccttctaaacctttttagatatctcaatgtagtttaatttagtaacaaaggctcagaataacaatctatctagagaaacaaaattggacacaaggtgtttggtgctgtctttccatttctaattccattaagtaaatctagatcatcaagataattaaagcttgaattagtttagatttgagtacttgtcatggagttaatggcagtttcttaggctggatgcttcctccttgaatagactctgagtggtagcatatgatctgacccttttcttccttgcagggtatttggtaaggttccataactctggacttagattcattttagttggggatttgggtgtggcctcgggcatgaactgtatgattgtttaagatgttgtaaggattttaatcggggttacaagttcttatgctcaagataaatttcttgtgatgttgaaagattaaggaaaaactccttatctttgcaacaggctctttttgaagataaagttgagagaaataatgttgattttcaagtagaatcaagtctatggatgcaaagaatttcctaggaggtgggtgatagcacctgtacccctttttgttaggataatcactaattaacatcccttttaagagcctgaagatcaaatttagttatttgattggcaggaatatgaatgcaaacaacacatccaaaacttaaggaggaatacgactaaacccatcaacatggagataaagttgggtgaggaaactcgtttgagttttttagttaaaaaacttagattttaatctgttgatgagataaatagcaaaaaaaaaacttttccccattatgattttatcatattcatctgaaatgtggggctctagcaatctccgataagtatctaattttttgttcaacacccttattttgttgtgatatatttgtataagattggtgacctccttttggaaataaggtgaaagatgttggttgaaatattctcttattattaagtctcaccatttgaatcttagaatcaaattaagtacacacaacatcttatgaaatatgataaaatagtgttaacatctgatcttatcttcataagatacacccatgtgacaatcatcaatgaaagaaacaaaccacttttctcctgaaatattatggacccaagaaggcctccaaatatctgtacagattaaactgaacagagttgaaccttttctattacctgtaggaaatgatactagattgatgtttggaaaaattcataaacttcacaaaagaaaaactttgaacatcaaggttttcaaacaacaaaaacactcttttaacaaaacaaaagatggatgtcaagatgaaaatgaaacaacctaacttggtgtttattggatacaaatttctattaaaggtgggaaagagggaacacaatcatcattgccactttcaactttaagaatcttcctttttggcatgattatcttctctgtgcctagctcctgaaacacacagtgagatggagtgaatgtcatggaacaatttaggtccttagtaatatggtgattggacaacaattaccagaaagtttagggacatgcaaaactgattttaaagacaaggaagttgtcaaagagacagtttatttacctgaaaatataaccaaggatccatcagcaatctttatttttttttaataccatgacagggactatagtggtgaaaaggttggagtaatttgtcatatgatctatggcttctgaatctgtgaactcgaaaaatagcttttgtagggacttagagctaggaagtacttacctgcatgagccaacatatacaatcctcttggtttctcaagctttgcaaggagctttttgagtttgtctatttctccttgtttacctctgtccccatttatgatagcaactacttgaaacttttcctccatattagcattgcgtttttgtaccctagatctactccttttcctccatctccctttcccaagaatgaaggttttctatgaagctttcaataattctctcaagtttcttggcccgttgcaatagttacaccatgaccatctttctctcttgatttttgccctcaaatttctttgtgttgcagcagtcccttcattattatgattttgaagcaaccagtgccgatccatcatgcatgttgatttccagcatcatcatcactctatgagtctcctctcctgttataattgtgaatgcctctctcagtggagggtaacaactccttcctaggacttggactcatgtatgatccaactaccagcaagaaactcaaatgatatctccctttccactaactttggaaagttttttgcatccttattacattctatcttgatattttgataatggtaaaattccatccgttgtcccctcatagttggtataatatttagtcccaaacaaatctccttgtttaatagcatgcattttgcaattgatttcataaatttgtgctattatgtttatctttgagtaagtttgtgatggggcttcccaaatgtctgagtaatggtgagaaatatctacgtcttactaatccttagttgcatagcatttgacaaccaagacatgaccacggaatcttcttcagcccaagagttaaacatagggtcctccttgcttagttcaggctcaagaaggtgattcaactttcctcttccttaaataaaagctttgacttgttgggaccacccaagataattactaccgttcagtctgaaaagaacttggaggctcttatgatttctgaagggatttccaacaatagttgttgatcttgtgtaaactatgggagaggaggtagcacccaattctttggatatggtgaattgagaataagcaatggaggttgaatttttggtgacaaaaaatcagatgggcctgatgttgagacctgattatgtttccatggataatatgacgatgaaggctaggaggaaaaaaaaggagagaaaaaattgtcgatgaaaactagtgaagaacatggagccatatgaaagccaaaaaatgttaattaatgaaatgtatgtctctaatatcatgaagagcaatttgaaggactattgactaatatacactaatatataatggttgtgggcaaacgaagaaaaagatactttatacaccagcctaagaatcaactatagaagaatggaaactcccaaatttatggtcgatacatctaaatatgcagtatgctttcctctttaaaacataagttctctccatttttatttttctgcttaatattttgtcaaagatagctaaatgcttttggatgtttttggattcatacagatttcagggtttaaataatctttttatatttcatagagttttcccaaatttacaatcttcaaaaatattttgatggagtatgaaatttgggaatccattttcatctcatgtcatgtttgataagttcaattttttttgggtctttattatttactttaatctatttgttgaaatatggaatttgggaattcattattatgtatgataacattaagtttcaaagagagagagagagagagagtatcaattattgtcctttatttgtagaaataaattttcttgatcttaaatacatgtttagagagagagagagaaagagggtttctatttatggtattaaatatatgttaagagaggagaggggagttattatccatggtcttaaatatttgtagagagaaaggaggagtgggggtcggggttggggagggagggagcaagatgtgaattattctacttcttttgtcaatatatggaagttgagaattcattttcatcccaagttatctttaataagtctaagtttttggtttcaaacatacgatgaaagagggaggcaatctctattggggtgttagatatatgttttgagagagagagagattgggcttaaacatacaatgaaaggagacgaaatctctattgtggtattaaatacattttttaagagagagaaatagaggagagagagatgtgaattattttatttatttgttgatatctggaatttggaaattaattttcatcccaaattatggttgataagtccaagaaagagagagagagggagagatttaaattattttactttatttgcaaatatatggaatttgggaattcatttccattgtattaacctgtccaagattttttggttttaaacagaagatgaaaaggagaggaaatcccgtgttgtagtattagatatatgttttgagagagggagaggattaatagagagtttccactttgtttgttgaatatggaacttgtgaatttatttccttctcaggtttggtttgataatttcagtttgtgtgtattaagtatatgttgcaagaatgagagagtttctatccatggtattaaatgtctgttgagagagatccctagttaaatttgataagtttaagcttttggctctttttttataggtaaattttgtccctgttggactaaatctggaacctcttacaaaagttcctcagccctttaccacttgaattggcctcaagggcaagtttaagcttttgggtcctaagtatatgttgaaaggaaaagagagatttcatctaccgtattaggtgaattttgagtgtgagagagatatgtagtgttacatgtgttgggcaaatatatattgaaagcgagagattttctatccttaaatatagattgagagagaaagggagagagagaaagtgagagagaggatatccaatattaaacatatgttgagagaatagttttatcaagagttagagtttctatttgtggtattaaatatgtggagagagagagaaaggtgtcaattattctacattatttgttgatatatggaatttgagacttcatctctatccctaatgatctttgataagtcttagtcttttttgtcttgaacatatgatgaagggagaggaaatctttaatgcgggtactaaacatatgttttgagagagtatgtgtgtttttggtgttaatcatacaatccaagggagaggaaatctctgtcatggtattagatatctgttttgggagagacaatgggtgagtgtttttggtctaaagtatacaatggaaggagtggaactctctttgtgtattaaatatatattgagagagagagagagagagagagagagagagagagagatgtgaattattatacttttgtttgttgatttatggaatttaggatccatttccatcccaagttatctttgataagtctaagaaagagaaatgcaaattattttaccttatttgttgatatatggaattggaaattcattttgatcccattgataagtaagtttgttggtcttaaacatatgatgaaaggaagagtaaatctctattatggtattgaatgtatgttttgagagagggagagggaaacagagatagagagtttctactttatttgttgactatggaagttgtgaatatttacttccatctcaagtacctgttagttgcggaatattgttgagatttctaattttttatatcatttcctttcaaccaggactgacttgttgcctaaagtggacttgattcattgtaaaggcaattgtatcattgaatttgtcaatttatacctcagtcactgcttacccatgtaatggctctctgaagatctgggttgatgcaagagccattttgaggtgatattgggagggtctaaacactctgttgtcctgtggatggattgaggctcttgacccatattgtcaacttattaaaacatcctgcctctggaaggagctagatttagattccccaccctcttgtatatggatgtgttgaattgggatttaggttcctgagccaaacagagtgttacagcctattatggagtacctcttctgcattgttaaagcaatgtgatgctgttgtgagccactacagaccaatcaatgcccatctaaggaataaacccttatgtttgcatcaggatggctgttcctacttaataaaatttgatggttgatttagatttttatatgaaactagtgtcaatggttgatatgttgatacaagtgctgagttagttggttgtcaggcaataataagggcatatattgtcagtcagtttagctattctggtttgcttgtttatcagagggcagattgcagtattcatatttgctagatttttcttgtatatcttttgatttcttttaaataaaaaattatgattctgtttcttagagaaataaattggattttatctatttattctctctttcagccgtgcactcctgcagaaacgacagttctttcact

SEQ ID NO: 11671 - DNA, 5708 bp, Vitis vinifera
  Intron number 13 from transcript GSVIVT01029933001 (locus GSVIVG01029933001) derived from phytozome v7.0 (chr-ID chr 8; pos 1645383 to 1651090 reverse strand)
ccaaacagaactctgtcagatttacgcccacacaggtgcaagacaactcttttatccataatatttacttcatatattttggagggattttgttctgtgtatatcagtgtattattatttttggtgtctttccttgcacatttcttgtagttggttggaattagctttaaattttaatctattcaaatgagtgatgccttcaactatttggggttagcatctgcagtttctcttttgaattctttgttagttaaattgttaaactttagtcatctattaagaatttcctattctctatgataccataattcccatacggtttgcttgttttctaaagtgaatattctgcacattgtatttttgtacttctatatgattagaattcataaaattttttgttcttaccaaaagagggagaagaaaaaaaatactatgctatgatttctttaaatgaattaaaatcaaactttaattttattttattgtaggtatctgactgttcttgtttaggcatcgcttctactaaatggtagattctattgaagttggagagggaaagagggtgtgaagcgcttccatgactgctacaccagaacaactcagatagtaaactggaaaccaccatgacagtcaaattggggcctagaaatacaaaccagctccttatgagagacagctaaactgaccaaaaagtgctatcttctcaatcatgataatctcctactaactcctcaaaaagattaaacataaaaacctatcaaacatgagaaaaaaattatatttgaagataagtgccttatagtttcttttaagacaatctgctaattattccttatctaatgtctgattataatttacttataaggtttaaaagttgttgttctggactctggtcactttcttcaggtttgccctctgtatgattgaacccacaagtactgtattgcgatttctttgaagaataagacccaactcattagtcctcttgtgtgttaatggtcttttacaatgtaaggaactaaagaagaacttttcagtgtgttaccagagggaacccttttttttttttttcctggttttcaatactactgattgaggttgctggatgatattgtggtttaaacattttgattagattgtactttattatgtctataatatgtagagacagttacaaatgggagatgatatattacataaatatatatttttttataagcaaataataagattgtataaacaattgctaaaagaacaatgtaccaaagtacataggacatatacaatgtactccaaaggacaataaaaaaagagagaacacaaaaaaaactccctcccttagggagaatgcaactaatcaacaaaattgattaaagacataaaacctacttctatgtacaacttcaccgacacgaaaagattacttaaaaaaggggttgtttgggggatctgagttctttttttgtatttggtgggttggcgggtgggtttcaaactttgggttgtaaggggttgggggaggcccaaggctcaaaagccttatctctttgaggcccaactcttgttgggtgtgtccgaggcccgtttggagttaggaattgaagtgggaggtttaagaagtttgggccaagcctagagtttttaagctttaaaaagggtgtggccttatggggcagggatgaagatgttgggtgctcattagggcttctctattataatgaggttcgcctgttggagttgcacaatggtgatgaaagggtggcggagagacgagtttagtccccagtgctagggtcagagctttttggcgttgcttcgacccctggatgccaacccttaatgatgatgcttcaagctggtactttttgggagctttcaaggaaggtagggtcggagcctttaggctagggatgaggaggcagtttctccttgggatgtttttttttctttttttttctggggggggggggggattggttagcctcctcggtagctttgtcatgctcaataactatttgggggtgccagtcaagggctacgagaaggagctttgttctcttcttaggaaattggaattgaggaaagggtgtggagttaaggtgttaaggggaaagagtaaacccttggcttcatcaatctagagtgctcggtcaactgcaattgctcatcgtccactggaaggaggaaggggaggggtgctagggtttaacggttcgggggcatagttggacaccttcattttttggtcctcagtagggttttttctgtgggggttgattgagcagttttttatttttattttttgttttttgtttttatgttaggatggtgggtatttgttcttcttttcttttcccttccttgccttttggccttttctatttactccgtgtgtgctttgttgctcatttcaacaaacacttttattatatcttgttgatttacctataaaaaaaaaagattactaaaagaaagaacttttcaaacccttatctgagtcctccccatgatcaaacaaagaaggatgtgattaatggattgttcttcaattttacaaagaaaacatctattaactaacaactaccctctcctttgaagttgatttagggtcaacacctttcctcaactagctcccaaggtgaagaaacttgctttaaatggcacccatggatgccaaattacacccataaaaaagggaatggaagcccctcattttatttgaagccccttactgaaaaattatcattcctcgagtctattcatgccaccttttcctccccctcattattcattgacattccttgtaacttggaaaataattcttctacaatgtccaactcccaatcattcaaatgtttagaaaaacaagagtttcaatgaccctcacttgtgtgatcccataaaactgccaccctagcccttttgatgtggtgaaggcatgtaaagatgagaaagatattcacaagggctcatctccacatcatttatctttccaaaacttcgccctccttccattactctcaaaaaggaagttctaccataaaaggtgtctcaatccttcctaataactttccatagcacgatcccatacccatctctcacttcacaagactgccaccctccatctttctcccttgcttcccactcgaaagaaccgctcactagttatggtttgttttcaaaagctccccttttacttgcatattgcgaactccacttgcacaaaagagcctaattaagcgaagaaagacatttatgcctaatcctcttgtaccattctctatgtagagaattaactacttttctaggtgcaattttttctctaaaacctcttttcctcaaaagaaatctctttgaatcttttcaagcctcaatttgactttccttggaatactaaacaaagacaaggtatatgggttgattaaacgatgtgcttctgattatgtaagctttccccctttatagatatattgtctttttcacattgacaaacttttgcgaaaccactcttccatcgcatcctaggttgctattgatctaaaaggtgcactcaaggaaagacccatgttggtagatggaagctctcctactctacaccctagttcaaaggccaactccactacattcttcactctttcaattggaatcaactcactcttttctaagttaatttttagccctaatataacttcagacaacattagcccctaacataaatggaccatttgatcttgggaagcctcatcaaatgagagtgtcattcgcaaacaacaaatgggacacctcttccctttcaccacttctcctactcatccttactctcgagaagtaatttccctttctagccctcttaaggagacaattaagggcctccatcgctactacaaataaatagggagatagaaagtccccttgcctcaaaccttagagttttggaacaaaccagaaatgttgtaattaacaatcacataaacattgcagaagaagcgcaccatttaatccatcctatttgagaaaataaagattgatcttaatagggaaaacacccaagagggggggtggattgggtttttaattttttttttcaaacaaaataaatttaagcaaaagaaggatgaatataaagagataaggttagagagagcaaactcagattttatagtgattcaacaccctttgcctacgtccactctgctcaagctcctaatcaagtgagggttttaatatacttgaagtttcaaccaagcttctaacacctttacacttggattccgacttcaatgaactcttacacaatctcttgaagtttctactcacttgaagcttctaacactcaaacaacaaatttaaatctctcaacctagctcaacaagggctcaaatacaattcaaatgttaggatgaatgacaagggtgcactaaggaatatgcaagtggagatttaatgcaccaaggaaagaatgatagcttttgagtcaagaacaagtaggtaaacaaataaatgtaagtgttcttatactcataaatgaagtgaaactctcaatttataggtttttagcctcaagagccaaaatgctaaaaagcagcctcgatgggtcgagttggggatcgaccgattgactagccattgggcaataaatgcatgacaggtaaccgttaggcttcgatcgggaaggcatagccatcgaccgggaatgaaaggctatttttgcatctcttaaccgaacctcgactgggaaggtgtagccggttgagccggttgaccagtgcctagatcggttcaccatttttggcccgaaaacctatatttttctattctttttacttctaacacttaggcaatgtctttaggtcaatgagtatgccaactttgaaacgatttgcctaaggttcatttgataaaactcaggttttaatggaaatataactttaatgtataaactaagtttttaaagatacatgaaaatatatgaaaatcctatgtgcactcatgcattcaacttacatatgtttcctatgattaaagggtcttccatatgtcttgatcttgcatatattggttcctttgatgaattttcaaagtaacgcatgaaattctttataattcaaaatgattagcaacttaaccatggtttgttatcatcaaaacaagattaggagaacccttgggataacgctatccattgttttttttaatcaaatttcatcttgttaagaactgatagcaacaacctccagttgatgtgatcataaatgtattgcataaatattgatgagatcatacttatattagtggtaattttctacttttatatgatcttgatatcctcacttggaagtcagcagcacttcagcctaaaagaaagtgtcatggaattggaaggttgtgcgcgattattccatagaaaataccacagtgctaaatgtcttgtgataaatatctttgtaaacattggaaacaaagggatgttttagttaaaactattttaattatatttctgatttctattcaacataggtgttggtgtttgtgtgaatatagctagctagctagtatatcttgtggacggcagtttatggattgtgaaagttacatttttgaatgggagggaaaatgttcattgctattgactttgtcttttttactatttaccttaatgtgtctgctatgcagattgtagcaatcaattcaggtattcagccaggctt

SEQ ID NO: 11672 - DNA, 5817 bp, Vitis vinifera
  Intron number 2 from transcript GSVIVT01026942001 (locus G SVIVG01026942001) derived from phytozome v7.0 (chr-ID chr1 5; pos 19199809 to 19205625 reverse strand)
tccctgtaagtattttccctcattgtatcatctctctgtatgtatgcatatgtgtggtttgttttatagatctaactttgtcaataggtaaagcgattgagttctgattgttcttgtttgtgatgattaagagctggtttggggtaattctgattaaatcgctttaatctgtctgataacagcacttccattacaaatgcttttaatggtaatttattaatgtttggatataaaactaagaaaaaaagtgatttgatagtgtttttttaccatgtatcatacaattgaatgtagtttttgggagaatttcttgctagtgtctcgggttcttaaaggtgatttccataaatttccctatctttagccaaagtgtttgtgggagaatctcctatcaagtacttctttagaagcactacaattgattttttaacttgttaaaagtactttttaagttttgccaaataacaggctttttttcagagaattttgtatattagaagtgtcttgtaaaaggcactgccaaaacagactcttaattttgtaaaaaagtgcatctaactattattaagctcttttaacttttttccaaatgggctctaagatgattacatgaaaatgactaggggtctccaacgggcgcgccgggctgggccgggccatgctgggccatgctaaaatgctaggccgcgggcccggcctatgagcccgcagactggcaggcgggctgggccggtgggcttcttgaattaagccaaaatggctttcaaaaaagccaagggaagggagagggggggattcaaacccctctcctcatgtttaaactttaagcttctaaccagctaaactacattctttttgtatttattaattgagttatatatatataaataaagtatattatttttaaaaaaaaaattaaaggctccaatggtctctagcccgtctaaccgttggagctaagcctccgacggtcacatgaccaattattttgaattttgaatttttttttttttaaccttcctatatgtatttttataggaaggttaaaaaaaaaaattcaaaataattggccatgtgaccgttgaaggcttagctctaacagtcacatggactggagttagtctccaacggtcaaaaaaataatatattttatttttatatatatataattaactcaattaataaacataaaaagaatgtagtttagctgattagaagcttaaagtttaaacatgaggagagggattggaatctccccttccccttccccttcccttggcttttttgaaagccattttggcttaattcaaaaagcccgtcgacccggcctagcattttagcatggcccggcccgttgaccagtcaacaggcctcctatttacggccccgcccacccattggagacccctagtattgttgcttgctctaattgcatggatgtgcatatttgtattgattctaaagtgcattcaaatcaccttttccaccaccacttttaccagcttgttgatgtgggtagaagatgaagtaaatatacttctaccattaagtgactacttgccatgtagtcacatcatcaagcgataaaaaaggttatagaaaaggtggtatgagtagcattttttttatgaaaatgttttatatatatggcttttatttcagtaagaaagtgaaatcatatgggcttcaattgcaaagtccaaatgttaaaacatttctagttatcttcaaaaatgccactgtcacattagttcaaaaagaacttgttcaaaattctccaaaaattatttttggagaatatcattgcttttcatgacaagcaagcttttggctggtgatattaatccatataccttcttttgaaattattgaaaccatgacatcatttgtgtttggaatgaaagagaaaaattgatggtcatgtgatgtccgggcaactcaaaatttggcccgtgaccccaggtcaaaggtttgaccctaagggtttctcctattccacgttggcagtcaactaaaacactctgaatttttttttttttttttcatatataagtcccactaggttctcaccaactaacaatatttcaaaccttattcaaacacatcaagatttaataaatatcattgcattccaaaataaaatttcataaaatttctaataatttttaacaatctaaaacgattaattatcaattacaaagaattccgaaaattacaaaaaaatccagaaaaaaaccccaaatcattccaaaaaattcacataacatcaaaattatatacttaactcataattatcagatttataattttgtttccaataaaaaatacattaaatttgaattttagggttagttttcccctacacaaatatgagaagttgaccgttaaaaatgaaattagtcaccgtagacttgtttctctagttgaatagagcacttcctccgaatttgggccgaaacgaatgtcgtttggccgtccaaacggtcagtcaaagatccggcgagtgaccaaatttctgcacagtgcaaggctctctcctcgcgtgctgccagtttctaattctccccttttccttttcctttttttttttttactaaccctccagccacacaagcctggcccaaagttcaaaaggccaaccaatttttttttttttcactagccacttaagcccaaaaccaaaggcccaattccatttcatttctttttaacaatccatactacctttacatggcccaagtttaatagcccattgaatattttcatttcatttcttttattttacttttcttttgtttattctatttgttttatttgattttcaattcttttttttttaacacacaaatttatttattaatagtttcttttatttattctatttgttttatttgatttccaattcatttttttttaacacacaaatttatttattaatagttttagattggtgttaataaataaatttgtgtgttaaaaaaaagaaagaattggaaatcaaataaaacaaatagaataaacaaaagaaaagtaaaaatgaaagaaaagaaatgaaaatattcaataggctatttaaacttgggccatgtaaaggtagtatggcaattaaaaagaaatgaaatggaattgggcttttggttttgggcttaagtggctggtgaaattttttttttttaaaaaaaaatatgggttgggcttttgaactttgggccaggcttgtgtggctggagggttagtaaaaaaaaaaaaaaaaggaaagaggggagaattagaaactggcaacacgcggggagagagagaggcactgtgcataaatttggttactcgtcggatctttgaccggccgtttggacggccaaacgatctccgtttcaacccaaattcggaggaaacggtcaacttctcagatttgtggtaggggaaaactaaccctaaaactcaaatttaatgtattttcattggaaaaaaattataaatctgataattatgagttaagtagataattttgatgttgtgtgaattttctggaatgatttgggatttttttgtaatttctggaattctttgtaattgataattaatcgttttaggttgttaaaaattattagaaatataggaaaattccggaattagggcaagatttcaaatcctagtgatttatgaatttttgaaatttttgaaaattgattggaatatttgcggtatttattttcaaatattgggaattattaaaattattgaaaaattctgaaaatttgttggtgtattttcgggaattttaatgtgaaaattttattttattgggttattgagaatgttggaattattggaattgtagaaattattgaggaattttggagtttgtggcattcacttgcatcatggttgcatgaaaaaaaaaaaaaaattgtgaaaagtgtatgaaatggaaaaaaataaaatagggatgaaaagtgaaagcccgtgtgaggcgaattaagaagggagagagatctctagggtgaaagacccaaaagtttacctcgagaagactccgaatggggagtatatttgggtgcggacacgtatccttcagtgaaagcctgagaacgatagtacattatatgactgtgtgtcacacattcatatgcattcatttaatgattggatgttgtgggattgagtataatgttatatgttaaattgtgtgacttgatttatattgataaactgttgtgtttggattattgaaatatagtaatcccccattaaccctttgggtgttaggcaccttactgataaagtggaaatgcaccctattgagtataatgttatatctatcaagctctgtgtctaaacaagtgcaccattttcaaactttgttggatatgcttaaattccactagtgatccgacaataagaaaataagaaagtttgtaaaaggtgcacttattgaaacacttgctttgatccaacaataaattatcttggtggcatgggtgggggtttatctcttttttgttcatatttgcaaaagttgtgttgttggaaatgtgttctgctttaaatgagtatcgtaaaatgatggttagttcagtgcatgcaccaaataccatgtccaaaatatagttcgaaggttcaaaacattcataatctatcatgtacttagatcaaagtttgttgttttcaagagcctcggacagaaggattttttgttacttttttgcacaattatgcccaatttttatgttctttggaaactaccaaaatgtagaattcaatcgaaatttattatcattggatcatgagtacaattggtgccaaatattttcttgtctctagttgtaatttgtaaaatggactaggtgtggatatcatcttgattgagaacttcatcactttatctttggggtttattagagtaaaagtttatagaaaaatgattttggactatctgatttgtttaagagaaattcccttgtctactgataaattagttggtgacatcttagatttagattaaccttgagaccttttagataaagatttcttttatactttacaacaaatcagaaagtttaaaatcattttttggtttacttttacttctaggtgagaaattttctgagtatgcttgtgtgttgccttttcagtcctgacatttaaagtgaggacttgccacatgattttggtaccaacatgtgcttggttaaaatgttttttcatgacgatcgatcgtatggtgagggcaatatgcattattcaatgtgagctcacgacaagatgaacaatttatatgaagttttaagttgttttgagcccaaaatctttacatggcagtcttgaggcgctacagtgaggttgttctatgaaaagtttggtggtggggaaccatgggtttgtttggtttacatgttcttcaaaacggttttgatggaaaatagttttctaatttacttcctacacatgtttttgacaggaaacagttttttcatgatttgttctgaaaacattttagaaactaaagcatcatatatcagtagggcacactactttcacagacagcaataggagaaaactatttttcatatttcaaaaacaattctataaaactatatggtttctgggtctgggagctggtggaaagtcatgtaatgccttttgagatcaatgactaaaaatatgtttccttaacatcgatacccattttcctctcatttttcaaccattcctgatggtatttattattgcaaatgggatctgaaaataacacgccctttatttttcctgcgttgaactgcagattttggctcctctccccattgggtttgcagtgtt

SEQ ID NO: 11673 - DNA, 12833 bp, Vitis vinifera
  Intron number 1 from transcript GSVIVT01019072001 (locus G SVIVG01019072001) derived from phytozome v7.0 (chr-ID chr4 ; pos 17079040 to 17091872)
ctctctctctctcttccagtagtctttccttcccggtcgaaggatctgccttcctaatcgaggttcctgtcaagggtaatggtcacttgtcaagcattaaatgctccaataactagtgaaccagtcaacccccagctcgacctgttgagctgtcttttatttttctttgctctcgagattagaaacctataagtaaatagctccttttcatttataagtgagagaacacctgcatttatttttttacccgcttgatcttgccttaaaagctctcattcttttcttggtgcattaaatctccatttgcatatcctttagtgcacctttgtgattcatcctagccttaagttgtatttgagcctttgttgagctaggttgagaaattcatacttgctaattgaattttaaagccttcaagtgaattaaaacttgaagagattgtgtaagagcccattagagtcggaatccaagtgtaaaagtgattagaagattggttgaagcttcaagttagtggaaccctcactcggttaggagcttgaggagagatatttatgaagaaggcttcaaggtgaaagcttccaacaacttagttcctattaggaaggataactatcaccttaaattttcccaagaaagtgagagaaaccacaaacgaagaaagaaagagggggaaggaaaagttggttattttgttttagaaaaacagttaaatgagtgtgaactatgagcaatgatgattaattatatggtaaaatacaccatttgattatgattataaactttgaattgtccgttaatttccttcaaaaccagttaaaaaagtgaagcttaatttattttatataacggtttcatgtttctttcattatttttaatccttatgaagaaaataggcttgatgtaaatgcttaattgttaaataatttatttattaggtagaacgagatttaatacactacaaacctagtatttctcattaatctcccaataaattccatttgaatcttcaaataaatcatttaccaacagtttaagtagtcttatatagattaaggtcgtgtttggttgaccggatataacatgggataggataagagagaatatattatatcttgtccaatgtttggttggtgatgggatatgataagttatctcatcacttatcatatcctatattcaactaaacataggatagcataagtggtaggatatattatccacctttttttttcatccctttcacatggaatatgttaattttatggtaaaatatgggacatacatatcccattatcaaaaattctttttttttttttttatcaatttttttgcttttttaatactcattttacaaaataaatttttaattataaattaattttatgattaaaaaagaaaaacttaaaaaatatctataaaataatattaatataatatataaattatttttatatattaaataacataatataaaaaataattctttgtaaaatttaaatattttaatcatgaatatttttaaggacgtaggtaaggaagtgtcgaaccactataaaatctgagctttaattctctaactttatatctttttatttgctcctcttgtgcttaaatttgttgtgtttaaaaagattttttttaatcccaattcaccctcccacccttcccttattgggtgttttctcttttaaagattagcctttattttctcaatatttattgacaaatttaaaatattgtaaccttaagtatatccaatcataatgagctttcaagaggataatagccttttgatggtcatttctttatttcaaactacttcaaaagatgaaagggtctagtactatgaggtattcacttttcaaacttatatcaatatgatggcaaagaaatatcattggttttgcatgattgtatgaggatacatgatttccattttcttaatggttaaactaagatcacaccatccaagtgaatctcgacatcaaggatatatccaagagaaacaatttttctcaaaatatcatagcaacaaattcaagtttcataagaactatattaaagaaattgagaataaaaaattatacaagaatttagtaattaaataatcaaataattgcatagtttttggctattgtaataacttgagcatagtttctagttagcaggaaaaaaaatattgattttcttatttttattgctttgcctatgaataattttcaaatcatattccatagcttttgagtatgaataataagttgttttctctttttcacatttataactttgggccataaatttgattttttatataaaacatacttaatatagcttgtagttatatgagcttaaaaatcattaatttttctacataatataaattatgcagaggttctcataggcaaatatatatcatgaaaacttaggcttttaggacattgttgtcaagggaaagcatgcaattattatacatttgatagttgttccaaaggtaaataattgtcaagctttcgtagaataggtcaaaggaatattttgcaacaaaaatgagtcaatcccccatgatttctacctcttccctagtttttaagaaaaattgttatgatatgaggtatgacattgattccttaatttcttacaaatcaattttttttcacattataattattttttgattgtatacatcacaaaattaagaaatatgagtaatcatcctagggtaagattaagaaacacaagcaatcacctagtattctttgggttgaaaggaagactcacatatgggttgattgttaataatattttggactataaaagtgctaagtgtcacaacctactcaaaaccctcccttgagcttatataaaggagcagaaaacttttgcaaatatttggagtcatctacactaattgatgagagtggaagattcaaggaaagtccacacatctttacacaaggttgcaagacaagggaaaagtgtgggatattctaaagagtttcatatcttgtacatagcttttgtataggaaattctagagagttttaagatagattggaacctttgtgggttccatgaagtttcataagtacctataaatggagagtggcatcatttgttcaaggcactaagcacttgagcagattcacacatcttaaggtgctctagtgaaatgaaagcttcctttcttctagtgttatctttgttgtgcattctatatttcgattagagtagtgttgcttagcatagcaagctaagtttaggaaaaagttgacttagcaccatcaaatggtgtgaattatctaagtgtaacacatgagcttaggaaatatcaacatatcaatgatgatttttttaaagatctaacaatcagatttaaataaccctttaattgaaaagataagacaccaaataggccaaattttcaaaagtcattgtagattaactgggaagagtccatatgggcatgctttcctcaaagaaagaagaaatattgtggcacataccaatgaggtttgtttgaaacattgtgtcacatagctttcctcaaattatatggacaaatccttggcccaaaacttgggttgtagatactcaaagcaagttgtcaaggatttgaagaaactatggtttgaatttttatatttgattcatgagttgcctaagggaaacgatattagtttagtcatccatgatatgtaaatttcatttttatttatattttattttaattatttacaagggataatttcattcgcattcttttctttttttactaaatatacctacctccattaatttgaaatttcatcaaataccttcctaccctttttatttgttattttcactcacctcactctctctcgaaataagagagatatttgatgaaattttaaattaacgagagtcaagtatatttagtcaaatacttaggggaagtgagtaacattaaccattatttataataaataaaaaattaattttgacttttatttatgtgtttttgtaaggtcttagtcccaaagtaggagacattcttttggcatctcatttatcagataaaaccacatttgtacttttgtaaatattctctactaaacatttgtcaagactttagttgagatgtaaatgccaaaactttttttagtcatggttttagtaagaaacagagtgatgtctctagaaacaatctttgtatatcaattttttttttggtttaaacaatgattaactactcaatactcacttgaacaattctagcacccaagaactgaagttttgctggcagttcattaaagtattacttattttataaaataaattccatattataaatataacataacataacatatcccattaagcatgctatatgcatttctcattcaatgcatttatcccgtcagcttaaggatttcattcgtttcaagtaaacttcaaatgacttactttagagttggtaattttcgaggtttgtgggaatttgaagttattagagcttaagaaatgaatatgatgtgattattaagtctatactttgtagaaagcatgaaaaacgaagttgaaaatgtgaagaaagggttaagccctaaaaccatggttttaaaaaaccaaaccggaccagccgatcacggtttctgtccagtctaatcaattggcccaaaaataggttgaaccagaatcagacccttggaatcaacggtatgaccggcgaactggatgaaccaaccaattccatccgaactgaatggttcaattaatttttatttttttttataaatttttacagaatcaaaacaacgttgttttggttccatccaaactaaacggttcaattaatatattttttttaatttttacaatatcaaaacgacgtcgttttgatgcttctgacatcaaaacaacatcgttttggaggcctccttctccatatggaccgaaggtaaagaaattgtcgcccgtgctgcgacacccatgctagctcccactggtggtctccccgaccgttacaccacctgcctacccgtttggccgccccggcgcaaaacccattgcaaccatccccccttctcttcttccctcgcgctataagactccccgttacaaagcccccactacaaagccctctcccggcgctgcaaaccccctcttccctcggcggtccaactattaaaaaatgttgttgatagaagaaactgaaatgggttcgtgaagtggggtttagggtttgccttggaagtgttagagaagcgcttggaatgtgaagaagagaagtggggttgctgagcttggttttggtaatggtggatttgaggaatgatagggttagttttgacagagaacgatagcaagacgccattggagcaaggtgaagacaactgttcagtttatatggataaagtaaaaaatgtcttttatatggatttacatgtatggtatgagatatgatttaatgcattttatatggatttacatagatggtaacctttttatatggatttacatggatggtatgagatatgatttaatggtaaaattataaacattacaattttaaataaattttttattttaaaagaagttttttatttaaaattaaattttaaaattttaaattttaaattaaaattatgattttaatttaaatttctaatttgaaactaattttctgatttttaaataaaattttaatttttaaataatatataaattattatttttatttttataattattttaaattttaataatttataaattgcatatttataacaccaccggttcaaccgcggtttgaccgccagttcgaccagtgaatcgtgaaccaataacttttatggttcaatgaaggtacataaggttcatttaccatttccttctttactttttattttcttaggaaccaaacatgcattatctttcattctttttcttgctctaaaagtgaactcccatttggaaatctcaaacaaaatacatttttttaaatgtagactcatttagaacgaatcacaaacccacgactatgggctagggtttgaattcctccatatatataaaataaaaaataaaaaaagttgacgaacaacatttttatcaaaaaatttgaagccctaaccctggtttcccccctgagtttgtgtttcgattttctttgacaaattcctctgcagaagaggaggcaacaacagtagtagtgagtgaagatgagcggcagagttccaattaccattcccttggatctgattatcgaaattctcaccaaacttcccatcaaatctctcatccgattccaatgcatctcgaagctatggcgctctatgatctctgatccatccttcattgatttgcatcgaactccgttccactactcggcccggtggccacggcctcctcctctccttctcgaagtatgttccggccagtgcacccaacactgtactggtctcaatttatcaatgttttcagaatcgaaccggtcattgaatagaaaaagttatcggttcacgtttcactagtcggaccgacagtcgaaccgcggtcaaaccggtgacgtcataaatatatattttattattttatatattataaaaaattaaaaaattaataaattcgtaaattttgacaacatctaccaatagcagggaggggtaccagccggagcagccttccaacgccgactttgccaattaacaacagcaaggagctttgccgacttccaacaccgcgtggaactaggaagagcttcgccagcttccaacgccgtaggttgccggcctgtaacggttgtcggtggacgccatctgggtgtcacgaggggcggcacgtcaggggcaagtggagaggcacgtcgggggcaagcgaagcggcacgccaacaattgctacgagaggaggattgaggcggcaagggtttccagtttccaaacttaggcaacttgtataccctccaaaacggtgtcgttttgatgctatgtaaaaataataataataattgaaccgattggttcaccagttagaccgtcagttcaagcggtccgaccccggttcgaagtcattccaatccaattggccggaccggaccagaaccatggccgatcggcggactagcctgtccggtccagttttcaaaccattgcaatttattctgaagagcagcagaagcagcagcataatcgatccttatcattcaatcgacactatttcagtcttgcgtatgcgacacagtgtgtaaatggattaatctgcttgataaatagcgagatggtccgagtctgcaatgtgagcagcagagagaccatcacccttccccaatccaagtacgatcgtttccaaaactcatctttccatctgggttttgacccttgcgccaacacccacaaaatcttcaagacatggattcaaatctatgccgaagtgaagctaaacaggaattgccaaatcctgaccttgggctcccaacaatggagggacgtcatctatgatcattccacttatcggttgtccggagaagggtattgcgtgggtggaagtctgtactggcgcagggggaagaagaacaatctggtggcgttcggtgtgggaagcgagaggtttcgatttgtttcgccgccgccatgatctcttcctctccgaccagtgtagcgggcaggcagaattctgtgagcgtctggcctggctggatttcatcggcctgctggagggaaagggcaacaacttgagcatgtgggttttggaagacgatgaaaatggggtttggagcagggagaggaggattatgtttccctctgagtgaaatattttcaaacagatggtgccccggtttcactccatggatttgaaggcaacccatgacggggagctggcgctaattccagacctgccctcggatttcgagttctatgtgttgtacaatgattttgagaggaaaagtttgaaggtgagatcattttcatctcctgggttgaggctatgtttggttcagaaaatttgaagaagaatgtaagagaaagaaaatacaaaggaaaagtagaaggaaagaaaaaatgaaggaaaataaaaaaaatagattaaaagttgataaattattttttttgttacttcaaactcattttatttattttaactcattaatataaagattaaataatttaagaatatataagcttttaattagttttaattatatttgtttttctttgatatttttcatatgacaaccaaacatgaaaaaatcattttcctttgcattttttttctttccttagtatattacgggaaccaaactgtggaccccgcatttcggctcaatacgtttcccactcgatggcgagctcgattttgatttgaaaaattgatttttatttgattaagaaaatgacttggagtcgccacttatttttgttttattttttaaaagggtaaacaaaataagaaagaaaaaccctaagtgtgactccttactttggaaaaggtggtctttgaaaaaccggatcgggttcgggggtcaggttacttatcaggaaggtacggtaaaaaccatagcacccctctaagtccctagattcgggtctctactaataaaatgaagcaatcatggcaattgatgagggaatcaatgaatactcagagtgatcatgcacatgtgagaatctaaacatgcatacagaaaatgacccgagcgggtgtggatgcgtacctgggcagtgatccataaagcgctatcaagaagtgatgttagtgcacaactaaagaatagtcacatgcatatcatagagcagaataaatcatgtatggcaaccgaatcaaccaaacaatccatcaatcataaaatctcatatgttgggcccccaccaaagcccatttctatttttgcatgaattcatctcataaattccattgtttggaattgcgaaaaattcgttcatgcttattaaaaataagaggagcagaagattgtttgaagaccataatggaattaagctatttgagagaaaattggatttttgaaattcatttgaaaaattggagtctcgaaagttatttaaagaaaattgggattttagagtttatttgaagatcggactttcaggcattaaatgcgggaatgagaatttttaaaaattaaatttgaacgaggttggaaactttgaaaatgatttgagagtttgggattttaaatgaggggatgagtggatgagcgaataagtaaagggatggaataataacgatggtgaagtaacaaagtttaggtaaataattgcgaaagatggaattttagagatttgaagatgtgaatttagagattgaaaacttaagaatttatttagagatgagatctttgatatatgaataactgaataagcgagtggatgagatagcgttaataacgagaataatcattaaacggcgatatatggacgacggagcttttgaggttagaaattagatttggaagttgggttctgatgaattgaactttaacgattagattaaatagataatatggaataataatgctacttaatggaaacaaaattttaaacgaatagaaagtgagtggtggaatttttaggattaaaaattaaatcaggacgttgaatttttgaagagttggaccttaaatgaataaaaagatagaggataagaattctagttaacgaaaataacgtttgggcgaataatagaatttcaaaggttgaaagttaaattgagatttttgaaagattggactttaaataaatatgggaggatgattctaattgatgaaaatgaaatttaaatgaattgtaggatttttttaggattgaaaaattaaattaaaatatgaattttttgaaggattagattttaaataactagatgaatatgagataataaccttaattgatgaaaatgagatttgaactaattattgaaaaattaaattaagatatggggtttttgaaggattagaatttaactttaatgagtgggattttaaaagatgataaatagatgtgtacgaagtaataataattaacaatcataatgtttaaactagtgaaattgagtagtataaatttcaagatgaaaaaaatataattaacaataataatttgccttttaattgtctttaagatgaattaaataaattggtaggaatagaataagataacaaacaagagggaatgattgaattaattaattatggatattagaggtttttaagaggattatttggatttgggcaacctaaagggctaaatggatgtgggcatgggccaatgagggtggctagcataaggggcatggggcctttcatcaacatgcttgggttgggctccaactcaagcccaaacccgtcaccaagagcttaggtctgggctccaacctaagcccaaggcaccatcactataaaagtttgggcctgggctccaacttaagcccaaatcaaggcaaacccaaggcatcctcttaacatcaacttgggctgggtgttttaacttaagcccaaatcaaggcaagcccaaggcatcatcttaatatcaacttgggctgggtgttttaacttaagcccaaatcaaggcaagcccaaggcaccattttaacatcaacttgggctgggtgttttaacttaagcccaaatcaaggcaaacccaaggcaccattttaacatcaacttgggctgggtgttttaacttaagcccaaatcaaggcaagcccaaggcatcatctccttcaacttgcccctccacctggaaacgctgcatgcttcgcgccaccggagagaagatgcatggagaggaggaggaaaaggaagaggaagggaaagaggaagagaaagagagagaaaaggtggcaacatgcatggctatcatataatttgcatgggaaccaaaacatggaccaagcaattcatgaaatgaggagcaaatttaacgagttaaataatccggaaacatctaaatatcaggaagaagtgagatatggctgaaaatagaacaaaatgaataataaaaaaaatggagaacctagggtacaaaagtaatctaacctgagcggtctcccttctccttctcttgggtttcctctcttcttttctccaggctttttttttcttcaaagaatcctccccactgctacccgtttttttttttcccccttcttctcttttttcctatcttcacccgtaagccatcagctactccactattcactgctcagcaacctcagaagctccaaccaccaccatggtgagggccacctgcctcgtcacgtgctccatgcagccgctcctccaagaagcccggtccccccttcaaatgtcatcctccaggcgcttcccaagtggcaggaaggctaaatataaatgcatatatatatatataaacaaagccaaagagggggtctacacaaacataattgaagtgttttgcctctaccacctatgttgaatctcatgcgtgattcaagacttcaaatttacagactttagattattatagttaatatttagtatttaagacgagaaaatttctagggtatcaattcatgcctaaagaacttacaatctcgattgaaaattgttgtaattgttgtggtagcaaaaactttaatgatgtaaataatattagtttagtataagagtacacagataaagcaattgatatttaatgtagctcggtcagatatgtcttcggacgagaaagaatcatccaacaatattatagataatattagaaaatacataaatcaaatataattattagattcttcaaacatctcatatttcctaattcgcatttttgtccacttcatctatttcgtatagtgttttacaagtttgcatttcataaatttttctattaagttaggatatttataaaaatattattaatattttttttatttttaagaaaatctaatattataataacacattaatttaataaatattttatacaagattttttattaaaatgaatttatattaattagatactttccaatctcatcgacaattatacaaaaatcatttcatatgaatctctaatttttttttaaaaatcaaacacatcttattataaaataaatataaaaacaaaaaacaattaatttcatttacctcctctaaagttttcattaaatacatttaagtctcattggtttaaaagttcattacatacatcccatatattttgcatttgatattttcatccatctcctctctaattcaaaataagagaggtaattgacgaattttcaaatcaatgaaatgaattgtatttagctaaaaccacgagaaaagtaaataaaactatccctaaaaaaatgtacttcatcatttttcaaataaactccaaaatttgttaaatgcgatgatgggtcttataatgcatggcagacatttgcccacataagttgtagtttgtggttcaaatccttctgggtgttaagtaactcaacattgaccaagattttgttattaggcttctttgatatatttatttattttccaaagttagtgccttcattattgatcgatttttttagctaagtaactcaacaatgagacatttgagaattttccttttttgttataaatataaattgaatttaataagattaaattatgtttttttaatataataaaattttgatgcaacaatgaattggaaaatagtattccaatttaaaattgtgccaagaacccacctgacgtggcaaggtctgattggaccatgcacaaaatctccaacctcacacaaacatcatcacagaaatcttatccgccaaagaaaaaataatcacccaaaaaagaaaaaaacagaaaaagttccatccaagtgaacccag

SEQ ID NO: 11674 - DNA, 12342 bp, Vitis vinifera
  Intron number 1 from transcript GSVIVT01009534001 (locus G SVIVG01009534001) derived from phytozome v7.0 (chr-ID chr1 8; pos 9118111 to 9130452 reverse strand)
caactatccttgcttgcctggaacctcaacttcaggtataaattatttaatattatgtggaagtagggttcttggagcgacttttctttaaaaattatcactacacaactttaaaaaacagtgaacaatttacaatccaaatgcttattcaatcccgctcacctacctacctacatcattttggaccacatcaactttttatgtggtgattaaactgataactatgataaatatttattcgatggtgtcatgattttggaaagtatttttaatttaaaaaattatttttgaaaattaaaatagaatttgataaaattaagaaaatattttaaaaatatgaaaaattaacttatagctagcactttttaaagaaacatttaataaatgataaatgattttcctaaaattactaatagaaaaaatatttatattaaatacactttaagtagaaacattgtcatatgcattaacgtatttattttagtttcttttccacaacattaaagaggaatatggaggggtttttaagagaaattatagagaatatatatatatatttataatatctctttatattccgttttttttttcccaaagattataaggagaaataaaagagaagatattttcattttttttaaaagagtatgaggcttgagaatcttgcttccataaaatactctaccagtccctttagctaagttttaggtatcttgactcctaaaggtttttttttttcttcttttttgaattcataatatatcatttaaataactcattacaattgatccctctcatcttttataattccaagtacttaaaactgtttaagcatattttgaaataattttgaaaaattttctacattttttaggttagaagtagtgttatgctagcgaaagctttataaaaataaaacagtctaccattttaatcattatgtcatagaaagtattagaggccaaaaactagatatgactattgattcccaaccattctttattatatggctattcaccacatattagtcttcatgtatatcttataacctttttcactcatgagttaaaatatttatgaaaatatttttaataactttctttattttataagaaaatctaaatattacaaaaacaaatatttgataatttaaaatagattttaagttagctttaccaaacaactttaataattttttttaaaaataactaataagtttttaagttaacaatttaagaataatttaacttagggtcaacttaagacaccctttgagtaaaagaatggttatgagacctaatatgcatcctattacaaaagaataaccatcatttgatatgcatactgaacccaaatactatgagtttaagctttttgaaaaattagtagttcaagatggtattaaagcttagtttggttggaggtcttaatttgcatatctcctgtttgtttttctaaatatgaatccaaattttgtttatctctttgcgtgcggggatgggaccgcatgtgagggaaggtgttaaggatcacatgagagtgttaaggagcatgatatgcatattgaactcaaatccttcaaacttaagttttcaagaaaattggtagttcatcaccatcttctccaacattaaggtttagttagttatgcatacaaaaatctttggaatgtactatttcaccattttttttcatggtcctcattatcagaaaagaaacttacttactattgatattcatggtgatctaggtcaaacagcacccaagcatagatgccttactctcggtgatatgcataggaacttcagctagctgctccaacttatctctcaaagattatgtcacagggagagttagaaaatttcaatcttattgatggagtagcttccaataatccggtattgtatatctattactgaaacacaaatgagtgatgaattgttgtaataattgtgacctactattgatccctttcaggctttaatttccagtggcaaagtgactaacgagatttgtgggggaaatcctcatttcttttctataaagccaactgattgtggtatcaaatttggagccttcaagtgaacagacaaatgaagaggctctcatgaggtatcaaattagtcttagattcagttctcattgtaaatctgtttactgtataaaattctgtccactaattattgaatcaaaactacatagtaatttcatttcagatgagaacgcatgtgatcataaacatcaatatgccggattaataaacaagcccctctacatatgccacctgttcttctatcattcattaatactgatcgaattgctctcaatgtcacaggtttgcagaagtactgtcacaagagaaacgccttcatgatgccaagtcccagatggatgtgcagcaaattaatcagaaataatcttaaattgaagtttgtcagttccagttcaattaattagtatattattaaataaatgccatgtagtgtgataacttgatgtgttgtgtgccttgtttgaaagacaacaatatttaagtgatgttgcattccttaattaacatttaaagtagtttaggataggatacctagatcagtttaggatatatatgctagcatcttccacgattatcttattttatttgttagggcaagtgtggaaaatttgagtagtatgccttaatattcaagttatatatagtcccagttgcaattatcacgataatcttcttcttcttcgtacatcagttgtatcttctttttcttccttttagccttcctcttcccagaaaagacctagagctcatggacctaaccattctcagttttctatgacagtaaaaggacttcttcttcttcttcctcttcctcccaacaaagcccttgagcttatggacaactaaccattctcagttcaccatgacagtaaaaggataagcataccccaactctcaaccccatttgtcacacaaggagcagtaactgcatatggaagttgttatgcatatgaaatgcaaatcttgctcaaaacagaattactactttgaatgcatggtgcagtgattaaggggaaaaaggaataggatttttcttttaaatttcgaaattatgaaacatgctgaaagagatgcaactgaaaaacatctagtggtattttattgtcatgcatgctgtttaattagaattaatgtgtgaacaagccaatgtttttagcataaaaaatttactgaaaataagaaagaaaatataaactattggacaaggaaaaagttaggctaaaacgagatggaagcttagacttctacagtctaagttgtcaaaaccaacctattctcccattcagcgttgaaagttttatggaagaataacagaatggtataccttaatttgttgaattctctagtactaatcattcttgatgcacaaggttgccctgcaatcagcgccaccctgattgacgctttcatggtcattagtattattggctgttggcatgtggaaatgccattacctactaatcgccgcaccaattgactcctccgcaaccagataaggcaccacctctcacaaaaaattaatgataataaagtatgttcagaatgccaattaccaattcttgatcgcaacaaccaggtatgtcccccttatcatgtcgctagacacttgaaccacagttatttatgaacaaagtatggcctttgtcgcatagtgtttttgactggttaggataatccatctcatgttcagcttgatcacttcacctaactattcttacctacaattctttgagagtcctcttacctaaagttcccacactatctctatgagatcatcttcttgccaaagaaaatggatactgttaaatttgagatcatacattattgtattcctccaaagatggccatatccaactgagaccatatccaagaacccaaattcaaagcaaatacacatcattgaaattaagcggaccagaaagatctccataaggttatatatgtacatgcctcgtattattatatcaatatacaacttctttatttgcttaacgttcaagacttcaatgcccatacatacttcatcaaaagagtacagggagtcctctaacttcttctttacacactgaaaacatcaaatagcttcatactatcacaaaacctagtatcctccctagaaaccaacttgtttaatctgaaaaatgaaaaaagttgtatatgtttgacactcgcaaaacaaatgaaacaaattagacatgatgcttaaacacaatttaatgcaagagcccacaccatcacggattgtgatactttatcaaaaagagaagaggcaagttgggtgaaatattatcttaggtttgatggtgggtaatattgtgaaagtttcagaaggactatatctcctgcacagcctgacaagattgtcaatgtgatgtatttcttcatcattttcaaggcaatgttaatattgaagagatattttgttgaattcataaatttttcaaaagttgttgatcaaatatccctatcaaaaaattgaagcacggtagatatagcccacaaccacagtttgaatttcaccctggttaaaattcttttctggtgcacacacgaacacatattatcttgcacttccctgttgcttgtatctagctaatggtaaaatccacactacatagatataaacacattgtgcactacctcattccaaaaatttcatgaatcacataatagtagtctcagattaacaaatgatataaacacattgtggcggaagaaataggcgctgaaagtccaagaataaagacatgagagagagcttgaatcagaatttaagcatttcaatccccacctacaacacaatagtgccacaccaaccccactacaccacccacctacatccaccagcctcagagcgcttgtgacaaacaactcaccaaaacgccaccaccatcaaaatgacatagcgtacccaagtactggctgctgttccaaccatgggaactggagagaacataatttgaagggaatagaggaatttgaagagagaaatctcctaagaaactaaggtgccgaaattttttattcgacattataataaaaaatataaaaaaaaaatttaatataatttttaaatttgaaattataataaaaaaatactaaaaaattgaaatatttttaaaattagttaaaattttaaagaaatatataaaaataattaattaattttaaaatttttatttatttttcttcatattttcttttcttctattaatttccttcttcattttctttttacacttttttcctcaaatgttacacgagtcaaaaatgttaatacaagagtctatgaacgtatgtaaaaatctatgaatgtcttatttttctgtggtttccctaggactctattaaccattactggccagcgttcccggacagcaaggtctggtgttcaaggcaggggttaaggtcgtggcagtgtagaactgactaggattgtatttatcaatggacataaactgttggtgggtggtgctcctggttaattagctgggcctaaggattcaataagctaaagtaagagaaccctaactccaattgaatctaccttatattggctgatttctcttcttccttcatcttagctgaagcaaaatggatgggttacaaaggaaattaacttcaagcactcttccttcagccccatcttcatccagagtaaataaaaatgctagttaattaagggtttcaatattgttagttgtttctgaagaaaaagggaaagggtttacaacgaaaatctgttattcattcatgttttctgaagatcagttcaaaatacccaaaagcatgcctatatatagagcctagagaactacacccataactgactcactagattacaaaacagaaaatacaacggatttattaccaatacaaaaataccctgctattctaatactccccctcaagatggagaatgaatattgtgaattcccatcttgttgagaagaaatttaaactgtgttggtaagagagccttggtaaggagatctgcaatttgatgttgagaagatacatgcattgttttgagacaacctgtttgtatcatctcacaaacaagatggcaatcaatttcgatgtgtttggtctgttcgtgaaacacaagattggcagcaatgtgaagtgctgcctcattgtcacagaataatatagttggttgtttgtgttcaatgcaaaaatcaggaaggaaagacatcaaccagactagttcacaagtggtattttccattgcttgatattctgcctcagctaacgagcgtggaactgtactttgtttcctaaacttccatgaaatcaatgattctccaagaaaaatgcaaaacccattgatggatcttcttatatctttacaagcacagcaccccaatctgagtcagtaaaggctttgagttgggttgttgaagaaaaaggaaagtacataccttggccaattgtacctttaatatattgtaaaattcgatgaacagcttgcaagtgagtagatcttgggttggcaagatactgactaagtcgattaactgagtaagatagatcaggttgcatgattgtgagatataggagcttgctaatcaatcacctatacaatccagcatcttcaagaatctccccatcatcttgagaaagttggatattagcttccattcgtgtacttgtaggtttacatcccaaaaaacctatatcagatagcaattgaagagcgtgatgtatttggctaactgaaatccccttacttgtcctaggaacttcgagaccaaggaaatatttaagttatccaaggtctttgagcttaaattggttgtcaagaaaccttttgagatcttcaatatggttggaattgttgatcacaatgacaacgtcatcaacatatgccaataaggcaatatgggagtcaccatcatatttggtaaacaaggaatgatccacaattgattgtgtgaaacctttagctaacagaataccataaaattttgcaaaccactatccagaagcttgtttcaacccataaattgacttgtagagcttgcaaacaacattggaaggtgaggactccccctcacagtgataccttggaggaagggacatgtaaactccttaggtcatatcaccatgaaggaatgcattgtcaacatcaagttgagtgagaaaccagccatgaatcacaacaagagccaaaaaaaaaaaacttgacaatgactaattttgctatgggagagaaggtgtcaagataatctacaccctcttgttgagtatatccctttgcaacaagacaagctttgtgacgctcaagagaaccatcagctcaaaatttgagcttgtagacctatttacatcccacgggatgtttgacaggaggaagagatgtcaaagaccatgtaccattttgtttaagagcttgaagtttagcctgcatagcttggtaccactctggaatcacaacaacttgagagaaggaagttggttcaatgtgggaagaaatggcatgaacaagagcatgatgagaagaggagagcttaccatagccaagaacactagaaagaggatatgttacagaagatgtggattaaactgtggaataacaatgataatcttggagatataatggtggtttagggaggcaaacaggacgagaagtggaagggacagcaagtttggtaaagactgtagggggtgagataagttttggaacattagaaacagaaaaaaaaaattgtgaatggaagaaggaagaactcgattaaaaaaaaatcacaagaggaaaagtttgaatcaatggaccgaaaaggaaatagaaattcatggaaaactacatcacggctaatgcatatggcattggtggagagattcaacaacttgtaacctttataaccaggtgggtaaccaagaaacactaaaggaatggctcgtggagagaattttgtgctatggtgagtaaggctagaacgataatacaagtaaccaaaagctcaaaagtgagtatagaaggaaactttattgtatagaacttcacatggagttttgttagataagataggtgttggagtcttattaataaggtatgtggcaattaatacacaatcaccccaatatcctaatgggacattggattgcaacaatagtgctcttgcaacatttaaaatatgttggtgcttatgctcaactcctgaattttgttgaggcatgtcaacgcaagaatgaaaagataaaatccttttttctcgaaagaaatttgaaaaagaaagcttaggagcattgtcacaatgcactgattttattttaataccaaatgcagtatgaacaagattataaaatgtcggaaagacatcaaggacatcaaatttagcatgcggcaagtatatccaagtaaatcaagaaaaaagcatcaacaatggtaaggaagtaacgaaaaccttcatgtgtggggtgatgaaaagaaccccatatatcaaggtgtagtaattcaaaaggagatgattactactcaaaaagtgctatttgatagcttgtaattaactcttttaaacacttttgagtagtaattattgccttttaacccaattaacatattaaggacctttgcaatcacttctaatcactttgtgtaagttttggtgtttttgttagtaatttgatcaccaaagcaatccaagatggaggagagttatttggaatccatggcaaagcaatggaaagctcagaaacatgaagaatcagagctttgaagccttaaagtcctttgccataaccaatccggaatgcaaggaggagaagtaaagagagaatctaccttgaagcattttttatgacagtcatttcagccacttttggagtactttctgaagtccaatttatgcatactttatgtcgtttcgaagattgggaagccaacaatccaatgcttcaaacggttcgcaaatcaaagttgaaatgaagaagttagagccaatggaagcagatcactccaagctgaaggccaatttcgcagggctgcgaaatcagcctttggctgcgaaatcagccttcggctgcgaaatgatttcgcagccatcttgttcgtctgcgaaatttcgcagccattttgtgcgcctgcgaaattctcctgagtgcttccagatatttgcgaccgacgttttttgatattttacttcaaatatttgttgtctaaatcccaattctctccttgtaatccaccaattagatgattccttagttgttaagcaagaatacaggggtaaacaacctgatatatattgttttgtaattttcatttttaaagggtcggggaactttccccaggagaccaacttatgtaaattttacacttagctaaatacagagtatcttttgctttctttttctctctactattttctattttcttagtagccaaacatccttggaggatgaaatccccaaggatgagaggctaaaaccttttagtttcttgaagtaatggatgtcatgtgaagctcctgtgtcaggatggagatttccaagccatgaatgtaagtagttgagcatcataaatgttttcattcaaagtaaagcttttaatccctctgacttgctttgaatggccaatacttgataaccttttggtctcagtggattcttattgttagatccactgacgttcattagttatctcctacgagccattgtattgcaagtcgaggagatgacctatatcattaaaagagcatttatgaggttcagctaccctttttgtaagttttgaaggactaaaactcagttgttaaacacataccggttcgggaagtaagcatcaccttagttgcttccccaactcgaggtgaaaagttccaaaatctccatttttacacagtgagttaaacatggttatccaaagctttgagaaacttctttttccatcttttaacctattttcatgttagtttagtacaacaccttcatctttttatgttttcatcttaacctaatttttattaagaaaagttcactccatcctccgaacttcaccagttaaagtaaaaacccttcccagtgttcgatcctagagccactatgctatagtagctttgctactttagtgtaaggaccttaggtataaattttgttgatacccttacatgccaagctaccaagagtcgggttgtcaggagacgatgaaattgtgtctgaaattggaaatgtcaaacgcttttgtttagctaaatgaaaatttgaacaatgagaagggtggccaacaaatagtttgagatttaatacatctttcaatgaattgagcctattataaaagggatgacccagatggtaatgccaaagctcgtgttccgtctttgaggcattattacaaatagttgtgacactagaaggtataggaaaaaggttggtaggattcaaaacatagagattgccacggcatctacccatctcaatcatcttcccttgcatacggtcctggataaaacaagattcagatacaaaatgcactgagcaatgatgatattgagtaagggcactaacagaaagaagattgaaatgaaactgtgggacatataaaacattttcgataatgaaacaatcaaacaattcaacagaccctactctagtgacagcaacagaatgttcatttggaagagtgacagtggaattatggagataaaatgggctacctgaatcctccattggtgacaagtcgaaaaatctaaccacagcacgcacgttggattgattacctctagccatcagacagaaagatgaatacgaacagaggcgagtagaaggaaaagctctgataccatgttagttgtttttgaagaaaaagggagagggtctacaaagaaaatctgcttttcattcatgttttctgaagatcaattcagaatacccaaaagcatgcctatatatagagcctagagaactacacccgtaactgactcaccagatcacaaaacagaacaaaacagaaaatacaacggatttattaccaatacaaaaatgccctgctattctaataaataccttcagattttcaacattcgctcattttctcagttcatcccagcctttaaatcatactccacattgtgaacttctttggtagaaagttgtgcagactatgaggacaagaaaaccctatctcatatatgaattgcagcagatatataagttgagatcaaagctacatataataaaacaaaactttttagtagacgtaggttcattaatcttgaagtaaattgcatagaatccttccgttatttatttccatgatcatatcaattctatgtaagtaatcaatgtaagcaaatggacttcggaggttataaattaagcatcacaaagaatcaggaatggattgatggcattacagcatagatagctagcttccatgaaatagaaacaaagggatggctttggaacggtggaatggtcaagggcactgattgaaaagataaaatctatactgttttcaattaagttatatatggcttggatcaaatttgggatttgaaatacaggcaatagacttatcagaatttctgaatattaatgcccagctaagcccagcagctaagattaacatgcaaagaccataaggaacaaagtatttacagcatcaattcccaactctttagagctgttctaattaggctgtagtagtattatttttgttctagattaagcacaagatgaaagtgaataggccatgctgtgtccgaaatttgaaccttcctgtgaattgttcacaaattcaatagggcaaccaacagattttcttagttgaccagtcctttctttttttcacttcacggatgcattgcatctttgcctaaccatgataaacaaacatgattttttcgttcatggatgtgaagttaatcattaaatacaaattgaccacgataggtcgacataaagtgaagtccattaaggatgctgccacccctcatacttccaaccttgctaaataagtgcctaacacagattgataaagacaaaagtactgaaaactatttgtagtttaatataatacaacctatttttagttagctataatctgctatcttacctccaaatatgattctgcaacaggtgcttcttaggcaataatttcatcattttaacatttgggagatgtgggaaaacctcagtaactaacagtcaaccaagtctttgcactgcacatcatctaaaattcacaggacttagaactgtaattataaaaaatattgaataaccatgtagttttctacaaactatagaagccaatgatggtgtgtacaattttacagatattaagt

SEQ ID NO: 11675 - DNA, 7492 bp, Vitis vinifera
  Intron number 3 from transcript GSVIVT01013790001 (locus G SVIVG01013790001) derived from phytozome v7.0 (chr-ID chr1 ; pos 7553641 to 7561132 reverse strand)
catccatacgaagccttcccggtaagtttttcttccgtcggatgctttaatcgtgggattttattttattttttatttatgttttcacacacatattattgatttttgagctgtataagcaactcatgtgaaaatcaccataaatcttttcactgtaatcgcttagacagatgggctgttcatgaaacacgatagcgtgagttgccggctcaagctagcataatgaacaccatggagggctggccattgccctcctactcctcctagtcccagtcctagtcctaatgtctatcctcttgctgtttgtacaatgaacccacctattgagaacaccaataatgctcagagaatactcctgtttttggatatggcaataataaaaaagaaaccaacaacaaaaaaccctagaaatgaaagagacccatgtcttagcttaatgaaggttgtctcacttcactgcttctggtttgaaaaaaaaagaagaataatctgtgagttttatttgtttgtggttatatcatttattaagggaaaattttgatcaaataaataaaataataaacaaataataaagttaaatggcactgcagcaatggaccttataacagtattggggctgtgccttttcagttcagtggtatatggggctaggtttacttgcaattcccagttcatatcgtttgttgtgttcgttttctcttcaattcccttttctttttatttttttccgtgtcagagaaaatgaagctagaaagtattagagattctgattttgacgtttcagatttcattgatgacatactgaatagtagtttgatagtttaaatacattgaagatgaatggtttcttttaaaacgagttaaaacttttgaggcataggtgttggtttgcaattagccagaactgtaaatctgacttaattgcctctcttccagtccttttcctcttctaattttagattagcaatggattttctcatttatgatattgtcagattataattttatattttgttttaatccatgtcactgtaactagcatacctttttatgacaagactggtttgaaatttaagttttgataaaatgtaaaagtagtgctaaagactccaaacaggtgtccctatttttcctgctgatggacacatagcacaagtaattgaactttaggctaaacataactatgagtgtgggaggaaccaaaccaaagaaactgtaaacaccctcattgtttcatttttgcatgctacaaattttttttgagagaccccttttttttttttactttctctatttgatcaatttattgaatttgaatggaaccattattatacatgaaaactcctgtctagaaaaatgcctttaatatagttttaggggaaataagatcattggtgttccatttgtttctttattcttcttatttgatatgatattgtatgaccttacacagtatcatctttcctcaaaataagagttaccacctttctagttttcttaaaaagtggggatagagtgttggcttatccataaatgatattaccttgcttttgtggtttttatttgaagtcataggatatgagattctaaggtgaagagaatatatgaaattctaatataaggaaaatttgtatacttctgtaatagaaagttccatgatggagaaagatttgcaaggtctctaggtagggcaggatgaaaaaaaaaatttatgtatttgatttcacatgggagttaaaattgctttccatttccttggcatgtgttggggaaaagggggaggttgtctttgtttgctccataggaaatcctttccaagtgctgatttaaagttatttaatttaattaatagtgtgagattctttttcttgattgttgtggtggagatatttcccatgttaagagttgttgggctagttaaatagcatgcatatgtgtgtgtgcgttgtattcacaaaattctatcattttaaagttatcctaaaagctagaataatacataaaaaattctaacctaattgtatgtgcattttctagtttacatttcatgtatgttatcctttttaattaattggattgtgctctttctatgggtgaaaaacagttagaagctttgaaaatcaaaacatggatgtagtcttcatgctgtattgcatctatttttaagttgtctgttgtaaaataaaagggcctgcttattctttaaatggtgatggtaatggcctgtaatgatctggtctggtaactttatagaatttcaagttccaatagagcatgcataagttgtgcatagagtatgtgggagaatttaaatgggcattgggaattgtctaataggtaaaagtaatatttgctcccatagagatatcttcttgaaggttgtattggataattttaaaaaatcatgcatatttattgaaccaaagccaagtttagttcattattacccttaatcatcctcatcatcaatgataatagattgaaataggaatctcactactcacgtgataacattgatctctgcaactttctaaaaggactgatgttttggggcttgatgatgtgcttccgcacttttgcttctttgacatctaattcttctttttatttttgttgaattcttgaatctccttttaatctgtgttaccgtctctatcattaaataatggttgaaacaataaacaagtaaacaaagtacacttagcctacaatcagcctttgtcattgatactgttgatttagtaatttctttattggtttaaactacaaatcttagcttggcgtgaagttggtgcaattttaagaatctatatcagagaaaagctgttgttgtttccatttacaaggagtggatgtcatgcaattggcatgtgtaaaacagccttagatgttcaaaaggtactgaacgaaataacttaatgcactttttgcataaagaattgatttaaaaaaggatgtagtcttgtatatcactgtaatgaggttggttatggttggcaactattattgtttttgtttcaaactacggattagtttttccagtaatgttattactacaattgttagttggcctcgtgttctctttgtcttctcggatgcctcactggctctttcttatcccagtctctttagcagatctaatatttctttagacgtgccaccaatgcagatgtccacataggacattttgttggcatatattcacatgcttccattgaataaggtggtgatctgccaggctgctggtctttgcttctctttctggtctgttgtgcagccatcttctatgtttgtttaactctccatcagatgcattcttcgacaagtgctttaacaaaactgttctcctcaggattgttaattgttagtctattgcttttgcccttcaacttttgaagcatgataattttttaacatagggttcaaagttactgtgatcttgttaagtcctcagatcttggggaattgctgcaatgattttaggaaaaagaagagaatccctgaaacttatcattttcaaggactgattgtgtggatctcgtattatttagtcctagcatttctgctgctatagtcaattaaaagtctgcagctgtcgacaggaacattattgaattcgaaatgaataacaaggatccaggatttggcattacattaaattacaaaaatgtaccattaaatgttaggtcctatgttcatccgttccttctggaatggtgacaagcaaggtttgctcatcctagttggtctgagggctggcagttcaataactggatctctttgcttcttactcattcctttggtcttcaatttttcccaatttatttttttgggaataattgactgggttggttcggagctgcgtcaatttattttcattgttttccatatcaaacatgatgcttctttagttgcattgcatttcaagtttttttaaggccacaacgggaaaagctcttgccctgtgcattttctctttgctgcataaagagtctattgctgagtttaaattacaggcaagaataattatcgagtccttaggccagatttgcttgacaagaatcagttgataagagaaatgagaatgaataatgctagatgaattttcacgagcatttcgaagcgccatgtcattgcttgcctttagagatgctttctccagttataataggcttgcatttagaggaccattgagtgaaagaaaagaagcttgtccaagagtctcgtaaatgcttttagggtctttattctcccgagtgatacaacacaacaagattggaatgggcgttgtgatggtttcccaagaaaagtttcagagaagaagcctggactatagatacactgaagcatgtgatgggagagggagggagaaaagaactggtctccgtcttgtgaaacccttccaaagcgcgttatggggccaccgggttattagatgtggggtggagagtgagaggaggttgtatggaacgtcaaggaaaagggcgttatgggggtagtgtaggccaactttacgaggcccactccgcttagagcgggtgttcggatttcacatggactcccgctgtgaatcagctttaggggcctcatcaacaccatctctctcccacccaccccagcttctgccgctgcgtagtgcttgtcatttccatggacatttgttcacttctgggtctttgtgccggatgatgtatgtgaacgtgtttactttctagttgcgaactggagttttctgtgggtccctctaacccccacttgtttctttccctatattcattttcggcagcttgggcgtagagtctttttctaattgttttgttcttttctctgtaatccttaggcagcgtagagcgtagagaatcaaatttgtgaggggaaagtgtaaattttctttttaaaattatttttatagtgactgacatttttgaaaatttacagaacgttccatctctataatgataatacgtggtggcctataatttctgtattattttaattctattctttttctcttttgggtcttgaaatatttgaataaaaatagatgtaaaattagtaagttatttttacacgtattttttaaaaatttattttatttacatttttcaataaaagtaaatagtttaaaataaataaaactttaattaattttgacttttttttagcaacttacaataatcgaatgtgcctttttataattctttccgaaacaagaaaaaaaaatgagcgctattatcattaattttggagtagtgcaattcgttctatgtgtacctacttaccataaagttactactagctagcatttctaggagcttgtcagctaaagttccaagattttattccacccatgcaaggtgcctctggaataaattttggggtttggtgacagtatgataatttttttttttttttgtcaatatcttatggaaaaaggtcgtcatcaatccaaagaaaattgacgtgtttttagaaaggtatattattttatatttggaaatggttttattaccttttgattttatctaggttctaagtccatacattttatggttagtccttagttttatattttaataaatggtaaattattttgatgggtctgtagacatatttaatattataataattattctcatttaataatagttcagattttatgatgcaattcagaggtccagaatccagatcatgtggatggtatcatggcagtttcctaaattttaatggaaaaagatgtaatataatttaaaggcttgcactcgtgtcaaaccgattcatctgctctgatcacacctaatgccactgggagtatgggctgggttgaagagtggccagtgccacagtggtcgtgttacctagattgccgagtttgtcacagtgctagtctgggctttctgccactttgatttgatggccgtaccgtctcgtcaataatgtagacactgactcagaaacgacggagcaatatctcctccttttctttctttttaaataattataattttaatctttgcaactggtttggcggtcagagagctatgtggccttccatcttcgtcctccatgtttggttttgtgttctgtgagtcaaaccacgcatgctaagcttttttatttttttatttttctttgcttattattataataattattattattattttctttcagatattatcatttatgcaagtttaggtataaccctccatgttattttgctgaaggttatttgctgtgatttcttcagtgctattcatggtaaattgaagatggattaattgaatattaaagtaatcaaccttttcgatttcctcttcaaataggctctcttttggcttaattttttaatcccaatacgaagtttacatcatcagaatttaggcaccctaatcgaatttgtgactgattactttctcacgtgtgccaattattttaatgtcctttccactgcccaagttcccatccattattaaccgttggactggctggaaacactgatggaaggattcatgcatccttaacatgcaatagaatgattcacacatcattaacatggaagatcgagatgctggctgtatagggtagtggcagctattatcataagctttacttttgatgctttaccataaatctacatttagtacaatagccacatactacacagcttcacaaagactcgtccatccattagaagttatgtgaatgattggtataagagctaaggacactaaataaatcaaaaccttacctgtctctactgtatcagaaaatgtcatgtagatgattgatgcaagcgacttctttgaatgtgatttgagggatatggtgggtttgagtgggtgcttgcttcttttcaatgacaaaagtagctgcaatacttttttttgtttaatggaaacttgttcataacccattttggatctacttaggtaaacttcaaatggaaacaggaaagctaaaactgaattaattcagttactattttcattgattcgtttatgctagtttgtattctaaaataatatatcatatttgataaatggtagcacataaataccagtgatataatttgttgatataatcttgacgtgtcctcttttaatacatgtgtttatgaaaaaactatagtcaattttaaactatatgagaaacataagcattactcatgaaactagagatgaaaagccacttgaaattaatttgctttgagaatatgatgtccaagtgcagcgtgcatgattgccttctagaaaattaaactggtctttaaatcccttcttaaagctcaaagatgattccctgctagtctatggaattttggcgagtttaattgtttatcttgagacatcattcaaattgggtcataggtgtagctctgtgttgggtggatgagggtattgccatttttttaaagtttaagctttttctgcagtttctccaggttattaagttgttttcattatgtttacttgtgcaatgatctggccag

SEQ ID NO: 11676 - DNA, 8564 bp, Vitis vinifera
  Intron number 2 from transcript GSVIVT01009969001 (locus G SVIVG01009969001) derived from phytozome v7.0 (chr-ID chr1 8; pos 12914691 to 12923254 reverse strand)
tccactttcattcgacatcgttgatctgatcgaaggtaaccctctgttcttttcttcttcttcttttttttttaaaatgtctgattgtcttgaaatgttagttagggttttgggttttaggattgtttggttaggaggaaagtatgagaaaatgaaatggtttcattgagtgatattaacaaggtctatcaagtatcaataaaatctggaaatcctcaaatgtttttaaaggaattacttccaagccttaacagttttagatctattttgcaatagagcggtcgagtctcatttcacagtacttctctctttgaaactctgattctctattctggttcacatatgcaattgctctgtttagggtttttgagttcacgtgttgcaggtccgtttcttttttgaggaagaaaaactttgtttggtgatatcttgttatttagagcccgtttgatatggttgttgtctcattgctgtttatttgtctttaattttgtgatttttattcttcacattattattattattattaaattttttttccatatgggtactggagaatcatctccaagataaagatccactgctagcatttttatttatttatttgcatttagcattttagaaatgaaaaatgtaggaataggtcccgccataattcaagcttgtcctttcatcttgggatggcagtcctgctcatgaatcctattgttcatttctatttatgtttttacttggtgaccttagtggccttctccatgtctctgtaccttcatttaacttgaatcatatctaccaagggagtacacaagaaaggaaagacatgtaaatgaaaaggaaaaatatatatattcctttgaaaatttaattctttcacaatgggcgaactttggctgcaactcatcttgttttatttgtattgactccaaccatgtgtctttgctgccatcaccttgcttaaactagcgctactagttcactgggctaaaataaggtctgaaataatttcttgagtcaattttcaattcaaagatgacgagtcctgaaattagccaagtcaatcttgttcccaagtgaacatagtttatatgcgatcctgagaaaaagtattagcctagaactagagaattcgagctctgaaccatgtgggttgatcatgcccggtgatggtaaaaaatggggaaccctctcctgtacactttgcctaacttacctaagagagcttcaataatttcactttatcaagggttgtgcaaattagagagccaaatctaatttaagctatttgataataggttaaactagtagaaaagtaaatatgcagaaaagtaaagaaactagaatagtgtgcaggaatttgaagtgtataaaaaattaaaataattggaaatggatgattgacaagcaattaaaagttacttccagtgaagttgcttctagcgatttgaaaaaagtttggagtttgtaattgaagtcctagacctttctggtataacctctaatcatatctatggcctttgaagagtcttgactttaataagttgcctaataggaagttgccccctttctttggtgttctagaccatgaagagtcttatttgagcctgaccatgagttctatgcctattttattgtggtctgctatttgccggtaggggtcagctcaggtcttagactcatttcccaaagaaacaagatctcaattctattgtcaaaaataatataaagttctgctcacgtttgggaggagaggagtgcacaaaaaggcttacaagtttaggacttgagtatgttgccaagcatacacatgatagtttactcttcaatcattatgagatttggtttgagttcaagaggtcaaaagcttagagttatttcaatttagtctttttgggtttagttattagcgatattgaagcaagcaatgcagctgtcagctgaaagtgggtacattgtgttgctctttgttggaatggtgacattttttggaatgttggattttcaatgccctgttgatatttgtacatggaagaaagaaggcttactcacttgcagattttcttagatgaattgtaaatctggcaggaaacagaggccctgctttgtatttttgacatgaaaatgattgtgtaactattatttaggtatttgagattgagtgcaaaagagggggctttgtgttatttgagactgacacaccatgtaatgagtagtatatatttgggatttatttaattagctgcagtgcagacattttatcttgccatttcattcacacttccaaaggcttagttacctattcctctacttagctaagtgtaaattgactattgcatagagagggttaatttcattcacacctcctaaagtttagtgtaaatatactaagctaccattagcttcaagtcatcagataacacccctatagatgtattccgtatataaatttattcattagagaattattaaatacacttgtctaaaatctttttacctgaaatccttttaaaaaataaattttataaaaaagatacatcaataaaggtgtcaattgatgaaattttaaattaatgatggctaagtgtatttacaccaaactcaagggatgtgaattcactcacgaaaacaagaaatgcatgataaggagtagggtgtgcatttttaacatttaatatctcgtaagaaaatgcttctctggataattcaccggacagcctaaggaagagagcgtcatgtcagtcactctgggtgtgacagatagttgcagaagtccattagaagttgatgcctgcatcattttcaagaagttcactacagaggaacaactgacaccagaacaaatcctcaacagggataatcatggaactattgccgttttaggaaccaatatctgcacctatgtgattttagatattatccagtccttcccatcttacgtttggatgctaaaattcatcattatccaacttctggagtttctcttacaaacagaagcaacaagaagatgtaaacagtaccccattatttttctttacactacaggcttgaccatactctatgaaattttgggttaggtctacctcatgaggaaccacagaaaagggcatcgcaacatcacacaagtgacaccacatcaccagagcaaacatccacctccattgccaatttcaggtcaatgtgaggcaaatcagactgacttaagcttccactcctagttgcgccacgatgaacagaacggatttggtttctaaagcctaaactaatcctatttcagctattacttctccattatatattctcatctgcaggaatatccccattagccaggtcatggctttctaggcactatgtggaaacttcttgctatttcttgggtaatttggagagtgaggaattggcagagatttcaaactgcctaaggtgcctataagtccaatccaggaaatccaaacacatgagaatctcaacctttccagtggatgctgtgccaggacatcaaattttagtatcaatcttagcaaagagaattaatgagagtttttgaaaggaatggttctgaattcagatgttaagtaggaaattatcacaaaagaaaaaattggaaaaatctaatggcaatgagaaaccttagaagaactacaaaaatctcagggaaccaagaagggattcaagtattacaagagcaatacatattttgcgaactaacatattctactggttctgaattgcatcagaatagtttgctagtcttgtgaataataatacaaaggattcatgatatgcatgatgtagttgggaatcatgcttttctcagctttttgaagtttgttcctttcatttctctcatgtttctcatggactaaatagagggctactaatacggaataacatccatccatccctattaaaacagtactttagtaaccaagggctattacttcaaaatttcaaagaagtttatcactgtagaagggtaaggaacaaaacggattcaatcatccattcactatcactccacaatggagctaatatgattggaacacatctatatggggtgttattggatgaaatttgaaactaatggtaccttagggtatttacattaaattttaggatgtgtgaatgaaattaacccttgttatgcaatagttaatttacacttagctaagtagaggaataggtagaagtcatgtcctcagtcccctcagtcactatgtatcaataacatgtctttaatgaaaaccaaacattggaatctcagtttgattttgggggattctttaactgtagttggccaaccatttgagaaaatgaagtgttgagagtttgaaaaaagagtgaagcatagtgagaggtgataacaggttagaaagggtgacaataggatctaagggggaattctagcagattttctttcttatagtgctccaaaatataagtctcatattaaatgtccaagtatgttttgggagcctttggaaatgaaatgtgtcagaaagcaacaatggtcctctctccctatcattctatagttgaaacaggcttgatacatgtcaatcccatcttggagagtctccaactctaaccaccaaaccatgatcctcaatgtaacaccctatgccctgaggctaggggtaatcttgtcaattttgaatatttaacataaaggtgaaatatgcaaaaatgactaaataataaaaaagaacaaaagtcagattctccttaagagtgcattcatagagctaaaactatctttccaagatcgaagtttcatgtttcacatattggaatactaaattagttcaaattaacttgataattaaaaacataacacatgatccaaatcaacatgtctaaacaaaggctttaaagctaaacataaattaaactaacaagaacccttcctatccccaacgtcacttatatccttctacatttggggacttgaaaggggttttcaaaagcaaaagtagtgagctttagctcaataaggaacattctaataatttatgttataaaaagaaaaacataatataatcttcaagcaaattttcttttcccaaattttcttttcccaaactagttggaccttcagaaatagatgacccttcaattcggaagggactagtcaatcagatggtaccattgggtcaatgattaccccactaactaggttttccaatccttgtacaattaggcaatgagggttagtgactactccactaactaggttttccaatccttatacaattaggtaaatgagggtcaacaacataactcctattaactagggccaaatatcaaaatatataatgaaagtgatattttttacaatataaaatattcttcatatgggaaaaatatgctactaatttattcctataataattaaatttaaaatttaaaaaaaaaattattttcttcttcatacattatcaacaacatatatttttattcttattttcaattaaccttcaattatcctaattaatatttttttttctctactatatattgcatattttatttttcctattttcctttattattcaaattttattcacattaaatatctattttgcattgcattatgttattgaacaactaaaatgaatattattttatttatttatttatctttatgtttttcttcaaaattttagaatctttcttcaaaatacttatctttatttcaaaattgcattatatataaatttttcttctaaataataataaaaactctcatactcatagagactttgattctttctagggtcaaattagagaccacattcatcatactactattaatatatatatatatatatatatatatatatttgtttcttacttattagatgaacgataagaatttctctcctttatttttaacatctaatttagaaaatatcttatcattaacatatatctaaaaaaattcgaaacagaacaacaataaattccttgaaagacttaccttattttttattttgtagagaataaaaataattgtaaatatctctcaacttcatctccttattcttctctcgtttatctcttcgtgtatcttggtttttcttttttctcttttccagattcttcagatttgttacattaaaactcttcgaaagtggtttaaaaaaaattgtaacacatgatttaaaaaaaatttgtaactccttagtcgtgatttaaaattgtaacttctttctttgttttttttgtaaaaatgtgatccttatctcgatccttatccatattattattattacactcaaactattatttttatttcgtgataactaaattagggatgttacactcaaactcatctcaaaatgccattatttcgtgataattaaattagggatattatactcaaactattattgttattattattattatttcgtgataactaaatttggaatattatactcaaactcttctcaaaatgccattattattatattatttcgtgataacaaaattagggatattacactcaaattattattattattttgtgacaactaaattaaggatattacactcacactcatctcaaaatgccattgttattattatttcgtgataaataagtaaactcatctcaaaatgccattattgttattattttgtgataaataagtaaattagggatattattattattattattatcatctcaaaatgccattattattattatattatttttcgtgataactcaaaaggaccgcatgccgaatgtcggccttaagttcctctgctaggcaactactaatccttttttccttccttctcgcccttattccataaaagtcttttttttgccttcggctattatcggctggcaacgcttggcccaacatttgatttgtttgaaaacaaccaagagtgttcattcaatcaaatcttttatgtcatcccaaactaatcactatctttggaaagtaaggaatgttaggatatattatttttcgtgataactcaaaatatcattattatcatcaagcccaaactaattactatctttggaaaggaaggaatgcggggatatattattttgagttatcatgcagggatatattatttttcgtgatactcaaaatgctattattattattattattattattgttattattattattattcttttcttcttcttattattattatcattatattatttttcatgataactcaaaataccattattattattattatattattattattttgtgataactaaattagggatattacactcaaactattattattatttcatgattactatctttggaaaggaagtagtgcaaggatatattatttttcgtgataactcaaaataccattattattattattatattattttgtgataactaaattagggatattacactcaaactattattattataattatttcatgataactaaattggggatattacactcaaactactactactaatattattattattagtattattattattttgtgattactaaattaaggatattacactcaaactcatctcaaaatgcctcatgacgggcaagatcaactccaccatcgagatttgctaaatccattttggaccccttaagccatgctcttgacttgaacaaccatattagcatcgggatactgggtataaggtgataagagataggcattcatatccaaatattacaatagtttggcatatggatagatgcatagaaagagatggacctattcatgcagctcctgttaatagagaactgccttagacatatgacactgactcccaagacacatgacacttgtaattggttggagcccacctgttcccagttgaatacatggcatgcaatgattggtccatgtaaactttgtgaaataagagaccattagagttttaagtacaaatttgtccttgcattgtaaatgaaatctagaaatttctattatgattttcttgaaatttctttcacatattggaaaatctttataggactgagttgaatattttggatgtcagtgtgtgaaaaatatttttgtagatggatcaacatttgaaatggacagtttattcatttctttaacatttactgtctggcttgagagaagaaacgtgcttaaaatcaatcagctgttcacttgtgtaatggaggttcaaccatttgattttgttgccttcagttttgtgttaaacatgctgtgcctcttggtaggcgacctacttaagagctgacaaaagggaatggaaaaatgagcaggtttaagagttgaagtgttttattaccaaatacgttggtggatgctggatagaagagattttctttctttttctttttctatttacccataatttattgatggaacacattattcacttgtattcctttgtttcttgcttgtgtcttaagcacctttcactgtctcaatctgatgaaatttggaagggagttaattaacttatttgatttaggatctatagggaaccttgaatgatcaaacaatggcagggaaagcagcaaaatctgtagtgaaagcaattggg

SEQ ID NO: 11677 - DNA, 10314 bp, Vitis vinifera
  Intron number 9 from transcript GSVIVT01029958001 (locus G SVIVG01029958001) derived from phytozome v7.0 (chr-ID chr8 ; pos 2243353 to 2253666 reverse strand)
ttgaagtatgtctccaccttctatttttattaatccttttatatttggatttattgaattagtatttggttttgtagtcctttttagaattttattattttgcttccatttttaatgcaagggtgtagtttttattcattatcttcttctgggcatatgggcatgttgaagatgcctctatgttctcttttcattgaacaatcctttatttttggattgattgaatttgccttcactgtgtagtctcttgaaattccattattattattattttgattgaaaacaaacattttatatcatggatttagcaagtacaaagcaggatgagaaatccttcccccgagcatgactacatagctatggttaaaaacagaaaacactatctactctagatattgtttgaggtgcacattaaaaaatggttacagatatgaactcaaaaactttagaaaatctcatacaaaagaatctattttttagctcctcattttgttaacatatccactgcttgattagctgccccaggactgcagcagaatgaacatcctaactcaagagtaatgtattaaatttgacaacttaagagtaatgtacaaaatttgacttagccatgcatcaaacctccttgagctttgctccttattttccctatataggactgttgcagaatcccgttctagtagaaggttggatgaaccctcaactttagcaagctttaatccttccatcactgctaaaatattagtgtcaattgctggacccacttcaacatacttagaattcatttattctgttccactacttaatgctagggcaatctatgttcattttaaaaaaaatctttataatgtagttgttaaatgtcacaattattgctgaagctggtacaaggaccagccatatctgatgcagtgaataattgttttaagatttatgagaaggagagagactatacttggtggttcaaaagggatttcaaaggcagcagttgtggcatgctgtacttcaagggaagatctagagtagatcaatgccattttataggtctggtaaagtacttcagacaatgaccttagagtacagtgaagtttatctattagagttaataggatattagatgagtctagagtcaatgtggtcaggtattttaatggtcatattttaaaatacattttcgtagtcatacttggaaaatgaatttagttgtggtattagtagttttaaggtgcgtaggaattagaaaagtgaaggacataataatttcttgctcttgattctcaaaaaggatgagtacaatgtatatggatacaaggttcactaggctatagctaatttaggactaaatcaaggaacctaattacagtagatttctaggactaaatccaaatcactattagtatcaagactaggattaacatttctattacctgtaatagtttcaaagattggagtatgtgcaggtattgtggatctttttctcctagaatacacattgaaatttggtgcttcaggtctcttgtgctcggtctcaagtgactgaatttgcaatgtaggttttgaggaatttgagctctgatcaagacttggaacttggactctgttcagtttcaatggacagaccttcaagttgatttttttaggactggagtaggattagaaggagaatgatcataaagattagacaaatgataagatgtagcacttggtaaaatgtgatgtaaaaagggaccagaatcatgctctacaacctaaccagaatcaaaatcctgctctaaaacctgaccagaatcccaccgtctatcttccacgatcttgttactcttccctctgaagataggtttcagagaaataaggtttgttttcaataaaggtaacatccatggtgatgtatttccttttgatgggaggatggtagcattgatatcccttttgtgtgtgacaataccgtgaaaatgcatttgagagccttcggatgaagttttcttctcaaggggttatgaacatgaataaatgaaactctaaaagagtatttataggagatttgaatgcaagaaccggagatgacatatgttgatcaagtaggtggttgttagcatttatatccaatttttacaaacaaattatagccattcagatctgaacataatttgtcaaatcttccaacaaaaagtctggtttctagaaaagttgatgtatgtctataaaagggttaacataggatgtctaaggtggagaacttgggtgaagaagtgatctggtgtagcagctaggagcgagtgaagtgcctcattttgcattggacctttttttttttaaaaaaaatgttttttattactttgtcatcttttaatttttcatttacaagaggaagggattttctttatttaagagaaggcaatttatcccttctttataggttttgtttgtgctgtgctcgggtattattatttccaggttttattacaaataaacaaataaaaattctgtaattgaaaaatggaaaaagaaaaaggccctcttgtgaatcattgagtccatcgaccttgtgattggttagcatgggatgcttgaggattgatgcttatacattgtagaaacaaggactttaacttattgagagcagggtttgaagaatgatttcatcttgctattgaaatttctgcctgtaacagtacaatcagtcacagaccaatctgttagcttactgatgactggttagctgatgttaatttccatagaggggagcatccatgtcttttgaaaagattagtgtttggtgcttccagtgaacatatctccaagaccatctttcagctcaaggtgcacaaaaatacagcaacccgtttccctccaccttgatatttattgtccctaccagacaagtctttttaagactttccaggaaagctaagaacttggcctcatgtccaaaacaatagcttctagctagttcacagaagtagtgaagaatctcaacactatggtctctgaatgagcctctaatttgcatccagttaagggtgtctgagcaagcgtccatcgttgagcttgaggcagtctgtgggggggaaagcacactgagtgggatggctgaggaggtctggtccagatcatgaagataacatcaatatgaccaaacatgaatcttctaggaatagaaacccaaaaggttgtttaataatgagcactatcttgcatctcatctactgatttctctttatccttgaatatatcttggcattaaaccagagtgttgttaggacaatgcaatacaatgacgttttgctcctaggtttgcttccaatttggaaagaaataatcaatatatctaaaacttttttttcggacacccacttaatattttttgataggtaaagataattcattaaaaagaggcgtcagaaaagcgactcaaggtatacagaactatgcaaggtatacaaacctaaacaccctccaccaaaaagctaagaaaaataaagaggcccaaaaagtcacctagcccaacaacgaccttaataggatcccaatcaatcaataaaattaactatagttataggacattcaactataaacaatttagcctcagaccaaagagagaaaagaaaagaatatttcaatctttggattgacaactcgtcatctttaaatgccaatctatttatcgtcttccacaccgtccaaaatatatgcagaggagccgctctccacaccttcttgcgctttttgcccacaaaagaaccatgccaactaagaagagtctctctaactaaggaggacaacacccaagacaccccaaacaaagtaaagagtagctcccataaggcccttgtttttgaacaatgaagaagcaaatgatctattgtctcctctttctctagacacataaagcatctatttgccaaggaccatccccttttctaaacaaggtctagggttaaagctttatcccatgctgccttccacgcaaagaaactgattttgggttgtacccacccattccaaatacagctagaaggaaacaaaacagggtagtccgcttctagagcaaggtagagaaactttgctgaaaattttccgctctttgtttcggtccaaaccaccatatcctctacatctccaagcactctcttcccgtgaaggtgctccaaaaatctttccgcctcttccacctcccaatcatttagagctcttgaaagacaggggctccaaaccccctcggccaagggatcccaaacatccgccacccaagcttccttttcagcagacaaggcaaagagggaaggaaaagactcacataagggggaatccccacaccatctatccctctaaaagctcaccctcctcccattgccaactctaaaagagattcgagcgcccaccaactcccaattcatccttattcctttccaaagccccacaccgtgtgcctctctcacttcctgagagctccaaccccctctatcttccccatactttcttctaatcacttgattccacaaaacatctctcttatttgcgaatcgccgattccatttggaaaggagagccttattgagaatggaaagacatttgaccctcaatcccccattctttttacttaagcacaccaccttccatcttactaagtgtggttttctctccaagttgccaccaccccaaaggaagtccctttggatttgctctagtcttcgtctaactaaacttggtaacttcaacaaggatataaagtaaatagggagattcgacaaagtgcttcgaattagagttgctctccccccctttgataagtattgtctcttccacatggccaatcttttacggaaccgctctttctctccatcccacactaatactgtcttaaatggagcacccaaggggaggcccagataagtggacgggagactacccactctacaaccaaagtccaaggcaatatcatcgatattctctaccctccttactggaatgagttcactcttctccaagttaattctcaaacctgatacggcctcaaaccacataagcaaccagcttaggtaagtcagctggtcttgggaagcttggcaaaataccaaggtgtcatcagcaaacaacaagtgtgaaatttgaaccccttctctattccttcccttcactttacaacccaacataaaacctccatccacagccctttcaagaaatgagctaaaaacgtccatggctatcacaaaaagataaggcgatagagggtcaccttgcctcaatccccttgagctttggaagaaacccttagacgttccattaatcaacacagagaaacttgcagtggatatgcaccacttaatccaccctatccatttctccccaaagcccattttctgcataactgtgagaaggaaagaccagtccacattgtcatatgccttctctatgtcaagtttgcacataaaaccattctcattattcttcaaaatcgagtcaatgacttcattcgctattaacactacatctaaaatttgtttgccctccacaaaggccccttgagccttagaaaccacctttccaaccaactttttaagtctattagctaaaacctttgccaaccacttgtataggcttcccactaagcttatgggcctaaaatccctcaaatcttcaggccccactttttttgggattaaaaccagaaaagtagtgtttaaacttttaacaaatttgttgtgatcatggaactccctgaagaaactcatcacatcctccttcacaaagtcccaagcgaattgccagaaagccatagtgaagccatcaggcccctgtgcttcatccccactacaacccaacagcgcaccatgcacctcctcctctgtgaactgcgcctcctcctccgtgaattgcgcctccaaagcatcaacatccaaattctacaacgtttcgctctaaagcccgaataaggagggcgccagtcccccggattagacagcaaagatctgaaggcattcactattccttcactaatcccattctcctccgaatgccaaacaccattaatcctaatttggtccacattgtttcttcttctgtgagcgtttgccatcctgtggaaaaatcccgtatttctgtccccctctttcaaccacacttccctagatttttgtctccaattcatctcttctaataaaacccattttttgtattcttccctcgcttctcttctagcatccatctcttccaaggacagtctgttagtcttctcctttgcatcccaaaactgcagctaatccaaagccatattcttcctatattccaccctcccaaagacatctttgttccactcctttagtttagactttacaacctttagtttttcggccagaatgaagcttgcagaaccattataattgtccccctcccaccaagccttcaacagctccttaaacccctccactttgagccacatattctcaaatctgaagggagatggtcctcttctcaacccccctccttctaacataattgggaagtggtcagacactggtctcgggaggacacattgccttgaaccactaaaatgataatcccacccctcattgaccaaaaatcgatctatccttgagaaagactggttattcacccctccactccaagtaaaaggaccccctatcaggggcaaatcctttagctgtaaatcttctattacatctaagaatcttctcatgtctgaattcaagcttcctcctctactgcgctcttcagggcttaagatggcattaaagtcaccagctacacaccacggcccattccaaaaaccgtagatggcccccaactcattccacaaacattccttgtctctcctcatggttggaccataaacccctataaaagtttacataaaatcatcctcaaagtttttaaaatgataggaaattgaatgttctcccttttctaactctatcaaatccagcactctattatcccagaacaccactatagcactcgctgagccccttgaatccacagttccccaatctaagaatcttcccactcccaagctcctaattagaccccttgacatctcctggatttttgtttcctgcaagcaaaccatgtccactctattcttcttaatcaaggccttgatcaccttcctcttatcacaattattagcccctctaacattccaagaaagaagacgtatcttcatctaaacttagagcagttgcccccccattctcttcctccaagataattcacaatccattctagctttctcaactccctttcaaacttagaagattccaattttctctttttcataccttccagcttcctcttcttccgcttctgaactttcctttctttcattcttctgagcagaaacaggatctccccttcaaagccctccgtcggcattccgaggcatcggctaaacttagccaaacaactcgactgccaactcagcccaccccctttgtccccttcctccatcatctcttgaggagccttgtccaaaacaacctccgtcccctcctcggtcctctcgttttccaaacccgacaccctggagacctccgcctccctaccaaccgccaaaatcattctaagaggacccaactctaatcccccagctatttccgatccacaatcccgattgcaaccttcctctgtggcttcaaacaacccatccaacccagaaagagaagaagaagaagagagaacccccttccctaacgagaaaaaaggccgagaaagagaacctatgtacttggacgcctcctccatcaaagctttgttggtgagccttctagtctttggcatcggaggagacaaagcctgctggagtcccaaatcagcctcgtctggacacccccatatctcctctcggcaaccctcgcaagccctagcctcaagagggtcttcgacagtgtgtcgtcccacaactgggcctttatgagattccagagtgggtcggcccacttccacgcaactctttaagtgcgtgtttggtaatgggcctgattggggcagcccaccatcctccatggaacttgaatggtcctccttaatgggcctcgtctagagatttgtctccaacctgaaagatattgggcttaagtgtgatggcccacaagcttctttgcatcaaatcaggccctccacaatgggcctcctctccacttccagctccacgccccaacccaaaattgccttggctttagctgcaggcccagtttttgaattaatcccccaatcagactgttgccatcttttggtcttgtctgcctctgcccctcttgtcgacattaagttagaaagaggagcctccatgtctgtcctacagagattttcaccatcttcagacggcacaacccctttttcaggctgttcatttggctgcatctgcttccccactctgccggtgcgtgaagtccccccttcttcttccctagcctcttgttccttccccgacccatttctaatcgccggaagcacttcagacactcttggcagcacctcccaccacagttgcaaagcaaaacaaggattgccgattaccacttgtagggagcttggccattccgtcccctccgacttcaatagcaatctggcccattggagctccttgaaagcaatagtgctttcatccactgcaacaaaaccctcacagcagtctccaatcttcttaaaaacttcctggctccaaagatgcaatggtaatcccatcactctcacccaaacttccttaagatgttcacaactttgagaacaacccacttttgggtcccacatttccaagtgcagaaccgaatccttaaaacatcggaaacctcttgataacactttgtctgcctctgttttattctcaaactcaatcaaaataaaggggccccccattctcgcgaactttactcctcctttgagtttccaatgactttttccccatctttccagatcacacaggtgtggaactgaaaccaacgtttctccccatctcccaacaagacatcagtccagcagctcccttcctcttgacacgtcttcttctccaagttgtagccatgctgcttcccttagccttctcactcttgaaactcctcttgtattcaccgcatcaacgtaggatttttctttcttccccttcgaatccccatctctactctcagtcttaaaagattcagaaacttccctaggctcatcacatgtcaatattccgagtgaacaaagtttttcagccaacaaagcccaaccttccaagaaaccttttccttctgggaacactaaacaatgtctctttgcatccgagtcaatcactgaacacaataaaaatctgccagcctcatttgctcgacattctagtttgtacctccttcctccatctttccagcttttgacgaatctctgcccaaactcccccctacagtttgcctccactgcctccaacagccagcacaaactggaccttccaaaccttatccacgaggtgaaacctctacttctttccacaataatcccctttagtttcttcccaaacacatccacagatatttcaaaagacttggagtccactgcaaaccagcaactccctcctcttttccccatttccagaaacacttttcattatctactcaacaaaaaatggttagatgttcaccagtaacaaaaatctcatttggaaacagttgggttttcaaagttgcatccatgagggctatattcagcaacgtgtatgataatgaaagaagtagggctcatttgagacagcgcattgtttttagcttcagctgaaagctcggacacccacttaatatcaacatagagtgcagtctttgccatagctttaaagctgtagagcaatgagtaacaaagatggttagttgacatattccagtgaaatgtggactaaagtgttaactttgttagagtttgatttattttggtatgttatgtttaagagctattttatttattagttgttaggtattcgttattcagagtatttttgcaatcatttagagggtcagtcctatttatcagtaataatttctattactaataatataaataaataagaaggtatatatgaagcaatgatactatagtatggcaatatctgcaatataaaattcacacgactatttaatatggaagtttcgtgctctgaaatccttgatcatagttcaccatgctatatcttgtgattccaactatggaaactcctatttccctgttgagctttattcttagtgatctcatcttctctggaataatggtaagtggtaaaatcttttatcatgtacaggaaattgcagggcagcagttgggtaaggtgcttca

SEQ ID NO: 11678 - DNA, 10187 bp, Vitis vinifera
  Intron number 8 from transcript GSVIVT01035014001 (locus G SVIVG01035014001) derived from phytozome v7.0 (chr-ID chr5 ; pos 908122 to 918308)
agtcctagaccaagctctgtataccaactattatcgtaaggctgattcttttggtttttgttccatgtagtttccattttgctgggcctgtgaaattttggtcttgtgcttagcttcattattacatattttttgctttaatctgtgcttattagtttgcattctttcatagatttgctcagtttttaaggaaaatcaaattagaaattttttttcctgaaaaattcattagattaattgtttaaagtgtatttaaggttagaaatcgatgataaaatggaattatagaagaggagggaaaaaattattatattaattgtttagagtgtatcaattgttgtcaaaagcatgcatgaaacatcggtacttaaataaaatttagaattgcaataaatattgggcattgttatttgagttatttgaatgttttttttttttataagtgaaaaggaagtatattaataaaaaagaggaaacaccaaaaatcagtaccctcaaagtatatagggagtatactcaccgccttcccttactaagagcctatctagtctaaaaaacttataagagaagaagagctcaaaactaaggaaaccctgacccaagaccaaagattatatacaaaagaatatttcaatctttgaagcgaaaactcctcattcccgaaagctaatttattcctctccttccagactgaccataataaacataaaggagccatttgccaagccctcttgcacattttccccacaaacactccattccatctaagaagagtttcattcactgtacacgaaagagtataagacacaccaaaaagggagaagagaaggttccacaagacccgcgtcttaacacaatgaagtaagaggtgatccaccgtttctgcttcagatagacaaagaaagcacctatttgccaaagagaaccccctcctttgaagttgctccaaagttaagactttaccccaggatgcctcccaagcaaagaaagctacctttggaggcactcttaccctccaaatactttcgctagggaacatagaagaacccccacgctccaaaatagaataaagagacttaactgagaaagcgccaccatttgaagctgtctagaccactctatcttcctcctccctttgtacctgaaaggtttggatcttatgcaacaaaagttccaccatctcaatctcccaatcattaaacgcccttgcaaagagagaagttcaaccatccccatctcccgcggggtaccaaacctccgaaacccaagcattcttagacaatgagatggagaaaagagaggagaaggactcacaaagtggctcatttccacaccacttgtccgtccagaatctcactctctgcccactacccatatggtaggctaacctactatctaaaagcgaccacttcttcttaattgctttccacaacccaacaccgtttctcccatttacttcccgagtgcgtcatcccctctcctcttcgccatacttgtgacttatgacacacctttaaaacgcctctctttcatatgcataccgccaattccacttacacaagagaacactattcatcagagctaaatttctcacacctaacccatctttctttttatccaagcaaaccaagttccacctaacaaggtgtggcttttggacgagagctcccccactccacagaaaatccctctgaatcttctccaatctcaacctcacttttcttggcaaatagaatagagacaaagtatataggcatgctagaaagagtgttttggattagggtgagtctccctcctttagatatatactgcctcttccacatagcaagccttctatgaaaatgctcttcaatcccatcttacatagccattgaattgaaaggtgccctagaggtaaacccagataacaggaagggagcccacccactttacaacccaactccaaggccaaaccctctatatcattcaccctacccaccgggatcaactcactcttctctaagttgatcttcaaccacatgagacgccaacttggataagtcatctgatctaaagacttctcacaaaaaaccaacgtgtcatccgcaaataacaaatgcgagatttgaaccccctcaccactcctacctctcaccctccgcccagataagaagcccccactaataacccttctcaacatataactaaaaacctccatggctatcacaaacaaataaggggagagaggatctccttgtctcaaccccctcgagctttggaaaaaaccggaaggagaaccattaattaaaacagaaaatttcacagtagagatgcaccaatccatccactttatctatctttccccaaaacccatcttcttaagaaatgcctatagaaagctctaactaacatgatcataagccttctctacatccagtttacataacacacttccaacattgtctttcagccttgagtgcacaacctcgtttgcaatcaaagttgcatccaaaatctgtctatcctcaacaaaagcattttgggactccgagatcactttccccatcacctttttaattctattagccaacaccttggccaacaacttgtagaggctgcctacaaggttaattggtctaaagtctttcagatcttctgcacctcccttctttagaactaaaaccaggaaagttgcatttagagatttaacaaatttgcctctctcatgaaattctctaaaaaaacccatgatctcaatcttcactacgtcccaacaaaatagccaaaaagccatggtaaagccattcggaccgggagccttgtccttgcctagatctgaaagtgttgaaaacacctctccttccgaaagaggaatctccagcccctcagcctcattgctagctaacctcatgaaagacaacccctcaacacaaggacgccaccctccttcttcagaatacagtttttgaaacgtcctcaccaccctattctttaaatcattctcctccgtatgccaacaaccaatttcttctgccgtgggcattcgccatcctgtgaaagaatttggtgttattgtccccctccttcaaccatagttccctagacttttgtctcctagaaatttcttccctcaacacccaagtcttataagactcctttgcctcattccttgcttcacaatcttccagactcagagttgaatgtttctccaattcatcctagtactccacctgtctgagagcttcactctttttagtgtcaattaaaccaaaaacttctttattccaattctttaaaatatcttttaaggctctcagttttgcatccaaaacaaagctgaaagacccaatataagataaactcccccaccacttcttcatctgatccttgaacccccattcctccagctacatgttctcaaatctgaacggtgaaggacctctcttcaaacctccaccttctaggaggatgggaaagtgatcagagactggtctaggaaagatcctttcacggccccattgaacatactgtcccaattatttgtcgctaaaaacctgtcaatcctagactgggactgattatttaacccgcctcgccatataaaaggacccccttgtaaaggaaagtcccttagctccaaattctccaccacttctgaaaatctcctattgaagcagaaaacccatcttccctactacgctcctttggatatctgaccatattgaaatcctccccccacacaccaggggtctttccataaaccttttattgacccaagctcctctcagaaatcctctctatccctactgcacatcggcctatacattccagtgaacacccatatcagcccattcacacaattcttaaaccaacatgatactgaaaacatcccttcttccacctccaacaattcaaccaatctgttgtcccagaacaccagaacacctccagctgcccccctagaattgattgctctctagtctagatgccttcccaccctcagactacagacaagccccgttctcatttccttgattttagtttcctgcaggaaaaccacatccactttattggattttatgactgacttaaggacttttctcttatcactgtcgtttgcctctctgacattccatgataaaatccttatcttcatttacaccccgatccagaaaaccctctagacatgcctgtagccaccttagctcttttatagcttactttccactccagcttctttaattccctactggattttgaagccgcaaacttcatctttctatgcaccccgtcttggctcttttgttcaattctccccttcattctcctcaaaaggtacaaaatttcctcctcgaacccttctatcggcatacctagacaactattgaacttcgcaaggcagctggaactccatccttcatctctctccacctcttccatctgaagggccattctttccgctaatggactctcaaaaccttatccgaatgggataatagctagttcagacacacttgcaccgccaagcgcagcccgcggagacttgtttcgccattcacgggccgaaaaatcttccatcaactcattatgcaacggaaccctactcctcgccccttccgttgacccaaataacccactggaagccccctccgtccccatctcaacaacatcgggccccaagaaaggagtagaagaagaagaaacctcaggccccagagagagaagagagagtttgtggctaaggggatacctgaatgcttcatccgatagtgcctcgtcagtgagcttcaaacggccaagagacgaacccccaacgtcggcaccttccacagccaggagctcctgctccagccccgcagagtcctcgacgtggtcagcgggagccctagatgggaagggctccccaaaaagactcggttgggcctcagggatcaaaggcccaagaggcctctttgaaaccttttcccagcccgaaaccctaggacttaaggaaaaaaggccctcagcccagctcgttgcacctcttaaatccatttcatttgccccttttaaagactcccagcaaacaaacttgggcccaggcccactcactaaagagcccgctgcaggagctagagttgacctaccccctacatcgtttgcattcctttgtcttctgccacactccacctgcacatctgaccccctgttttgaatttcaaaatgaagctcccatacactaactccagcgcatgtattgcccccaccttcatccccaacctcacacccttttctcttctgcagccaggaacttgactctacctgagacacccgcggggaagcttcccaccacaggctaagctcccaactagtatttccagccaccacctgtagagaccctggccatttcttccccgaagctttaaccaaaatctgagcccactgtaattggtaaaagaaagcagtttcctcatccacaactacaaaaccccccacaacactctccaattctcttaaaaacctctctactccaaagatgaagaggaagtcctacaatcctcacccaaacttccttagcatggctctctttccaagtacatcccacttctggtcctcacctttgcaagataaactctttattcttgaatcgtttgctccctcttaaaagcaccatatcaacttcccatttattttcaaactcaaataacacaagggccccacccaacctggaaattcttaaatcccccttaagcaatcaactttcaaccgctcacctcttcaaggaaggcagaggaggaacggactcaagactaccaccaaaacagccaaccagacaacgccctagctgctcctccctgcaaagcaattcccggtcccctaggtgcacccttaaggaatcccctaactctcctgtctttcttttcactacttctgcaaacgaacccgactctttctctaaacctttgacactactcctcaccttatcagaggttggaacagccgggaagttattcctcacagctggagtggagaccctaagagcccttaacttcttagccaacagtaaccaaccccctaccaaaccttttccttctggaaatacaagacagaacttcttagcttccacatctctgactgagtagagtaaaaacctaccagcctcattagaacgacaatccaacctaaactttcttcctccttcttcccaaacttttaaacgccttgaacttgactcgcctctaagcttccacaccttccagcagtagacttaagctcttttcaccaaatcttatccaagaggaaaagcctttgctcctttccaaaatagtttctctcagtttacctcggaccacttcaatggagatttcgaatgtcttggattctactgcaagccaacactttccacctttcgaaactccttttgactcctccatcccactttggatgtttgtatgtctgacttgcctctacaccaagcttccatcatcacatagctataaagtagtccaaaacaaaaacactcatcatgtagaaagaaactttttccgaaactttttttcctctttgggtgagggatttgatgagcttgtaaagttagaactctaaaattggcacacaaacacatgcataccaaatatatatgctagtacatgactggttgaaccttggagctaaaacttatagttaaaaatctcagtatgtgcagcctcatcctcctagacaacaacagaggctctattttgatctagggatgcctttggatagtacttttaggaagctctgagatataagattattggtaactatagtgctcaagcctctcctaagtcctttacccccccacatttttggataaatgtaactttcactagataagcaggttatgatattttttgttgcattgccttgcacaatgccatccaggatttgattaataatggggtagtccgccttcccatatcaaatgtgatcaataattctctcccgacacactctacatatactattccttctcctcttggccttaatcagattgttgtagatcttggcgattctgacatccacatgacattttgagatctttggttgtgagttagaaagttcatagatgggaattccatatctttgttaaatttaattgattggtttttgttttgattgattggttggactttgggagttcctcttagcagttcttaagaaagataggtgctggtgaattgtgcccttgtttggtttttttcatggttcaatgcgggtataataaaacaacaaacaataaatactaagagtcgctgacttgataaaaaaatggtttatggaaggtgcaaagccctacaattctcgtatcgctttctttgtgttggtgaatggtacccttgtttgtttctttttcatagttccaggggatcaagacaagttaatcctctttctccctatttatttattttggcaatggaggcccttagggatgggcagtgagggggtagaggtgacccaccttttgtttgcaaatgatatcctcatcttttgtgatgcttcttaagagtaaatgaggcgtttttgttggatccttatgtgctttgaggcagtttcagggctaaaaattaatttgacaaaaagtgagctcattctagtagaggaggttcctaatgggaaggatttggcctttattgagatgcaaaatgaggaagctccctacttcatatttggggcttctgctaggagcttcttttaatgctcaagcaattgggcaggttgtggaagaaagatttattagaaagcttgctatgtggaagagataatatatttcaaagggtggaagactataattgattaaaattactttgtttagtttgccaatatattatatgtccttttgtatcatccaaaaaaaaaaagaagtgcgcgagacttgaaaaaattcagagaaacttccgttagggtgggggatctcaggagaaaaaatctcatttggtgaaatagtcaattacatgttgaagaagaaaggcagtttgggggagaattttgtctcctattcagttaaaaagaagggggtgacccttggtgaacagatgcaaactttgtaaagtagaggaggaattggttggtcatgtcctgaaatgggaatattatggcccctattattctcattgtttaaagtagagtggatgatgatttctacagttagagaaacgttatcaagttggcatgggactttcaaggggaagaagcgcatgaaggtttggagggtggcagctttatgcgtactttagaccatctagaaggaaatgaatagtacaacatttgtcaatgaagaacaatcagttcaatctctcagaaaccccttcctatgctctctttggctttgggcaagaaaacctttaaaggatacttgtatgtctattctaaattttgttgattggttggacttttgttgatgtaacaggggtgtcttttgtcaatctctccatctaaaagcgcctttttgacacctttatatactccctgtttactttggtgatccctcttttgattaggtgctgttgctgttgctatttttcacctaaaaagaaaattttgaattgattggttgggttcaagttaaaggggagaagtttttactttgttttccttttctcctttttcttggttgttttggtgccctttgtatattacctatgtatttcagtttctttttgtcagacactgttaataatatttttgttttcctatcaagaaaaaaaaattctatgccaacctatcctgaaccctagcatgaactacaatagatgaaaacaactccaccaacttttcagtttccattcgtgccaccttcctcacctcacacagtagctggcccagcgttttgaatgtcagcaataacaaacatgtatgggaatcaatctttcaatacagtccctcctcactattcatcaaattaaaattcaactattacccactgatatactagatgtcatttggaagacatcacatcttctcccaataattttctctagaaccatctgataagccttccccccttttcccttgaacaccaacttccctcctttaacttacaataactttcctctccccaaactatcctactctagcaatttcctagtgaacccttgttgggaacaaactgggttttaacagaagccatccttttactgccttcgtaggaagttacgctgaattttgttcaggctcagttgaactgcctatagaattatgaaataggtgataaactagataagtagggtagagggggtgcttttaatgctgtgtgtcttctccatggctggcatttccttttccaagatgcaaaccttgcattgagccactcctctacagtgccccaaaccaaacctaccctaaacaaagcccccaatgaaatgcccccaaataggtagtcaacaatgtacccactttatgacctagcataatatcaacatatcgacattcaacgcattaacagtgaagatacagtacaactatttacaatatgtaggattagaattcttgcatttgagtattaataatcttgtacctcgtctgtgtatcgatatgtacaatttccagtgatagtcttgaatctttttaagctatagagctgaaggcaagtatcattttttaaattgaatctttatttctgttttactttctgatttcctgcatttttttttttttctttttcctttttgtttttaaataattttgtagggtagcagatcaaattcacttgtaatgaaatttgtattaacaagctaatgttatcttctctattaactcaagttttggcctttcaaaaatcaggttgctaattgttaaaatgccaaaacttgaggcgtgcaacttctgtcttagtcctaagtgatctagcaactttgcagccatattccaaaattgggtggctctcattttccagttaacatgttccaatagaaaaaaaggtttcctgtaaacatatggtccttgtactactttacattattagagttttgcaatcctggttgattaggcgtattcaggtgcttttacatcacttctgctgttttgaagtatttggattttggaacttgaattccctaataaatccacccattccatgcttctttgttcagttgaaagcatgaattctgtgaccttcataacatggattctgtgggcaacgattatgtgtttttctctgtaacatttccttttcctctgcaggtcatctg

SEQ ID NO: 11679 - DNA, 5109 bp, Vitis vinifera
  Intron number 2 from transcript GSVIVT01019090001 (locus G SVIVG01019090001) derived from phytozome v7.0 (chr-ID chr4 ; pos 16788745 to 16793853 reverse strand)
ctccgacagtctacagttggagagttcgccggaaggtaaaatttcagccgtcgaatcaccttccgtcggtcctgattgatcggtcgatttctcgggaagatatcacaaaagatttattattttttaaaatccagattattgtcttcattctttgttctggtttggatctggagctccttttgtctctgttttggttgccgagaaaatggagaagaaaggaaaaatgtttttttgaaatttgtgttttgcgttggacagctcaattagagtttgagtgttttttttccttggcgctttcgatctctgtttgatttccgagaaaatggagaagaaaataatttgaatttcctggaatagtggtttttttttttcgttggacactgaattaaatttctagcgaaaatatcttttccttttgtgatttaggcttctgtttgcttgccgagaaaatggagaagaaaataaatcaagtttttttgaatcttatggttttgcgtttgacagctcaattaaagttctagtgaaattttctgttcttttgtgattttggactctgtttggttgccgacaaaatcgagaagaaaataaatcaagattttttttaatcttatcttatggcgttgtacagctcagttgagtttgagtgaattttctttcaagagtttactctacattttctcgggccccaacggtcgtcgagaaagtgatgtgtagctttctggtaagattgattggaaacttgtagtcgtttggacggtcttggatcttgatgatgcatatatttgaagttgaaatttctagttcctctgttgttatgtgtacattgtaatgctgattggaggtttctctcctaactgatatcaaccatagagaataattggttgatcggaaattgaattctgtataccatgttttgatctttttcacaactcaccttcagccccttttttctttttaaatatgtcttgggaaccaaacggagagtgaggatcccgtgttttgaactttttcacaactcaacttcagtttttttaaaacttttcttgggaaccaaatggagagtgaggatattatttatttgttttttctgatgagtaagagtgaggatattaatctttggcatcttattaggattgattggaaagctggtttttttggacagatttggatcttgaggatgaaagatattgaaatttgagattcttggtttctattttttttttttgcccataaattaatttgtagcttaatctcagtcggctaagaacagctgatcttgatcttttgtgagggtatggatcagacgccattgattagactttattggacctttgaatttaaattagatttgttgaattttggtgagatttggggagagtgtgaaatcttacttgttagtagttaaaatttagagaaaataatgataagttctgttttatgaaaatgtcttatgtatgccaatttcatgaacacataaaggaaaaggtacagaactatccgatccataaaaaagtgaaggtgctgagtttgtgactagttcaaagtaagtttttattcatttttcagtgcaaaaggacaaagcttcatcctcaactattaatttaccattatgccatattaggttttctcttactactttatcatacacttttttttagcttccccttgtctttacaggccccttctgattgattcagattcattccttcttactcatgcaggccagttgcatgttaatgctgcacagtgagtcagtgactagaaaaattgagtgtataggattttctttgtattgggatttgatagtccattagtgggtggctttagtagatttacatattttgatatatagtttggagggtttggtatgttccttgttggcgttaagttgggtcttatttataatttgttgaaggttaactctttatgaacttgtggttttccttatcatatttgataaactccattcattcaaggtacttcatggttgtttttctttcatgaagctaagctagaccttttgaaagtttgagagcatttcgaaggagattaagcaccattttgggaagttatttgccaagcctttagatggttcttggaggattgaaggtttggattggtctcctatttcagcaaagagtgctgagtggttggattgccctttttcggaagaggagattcacaatgctgtgtgacatttaaataaggaaaaggcccttggaccaaatggtttcaccattgcttcttattaggagtgttgggagacgattaaggatgatcttttaagagtgttcttatagtttcacaataatggaataatcaatcaaagcacaaacgctaccttcattgctctagtgctaaaaaagagtcaaacaaatatgatctcagattatagacccattagtttggttactagcttgtacaaaatcatagccaaagttctattagggcgattgcgtaaagtcctccaagacaccatctttttaactcaaggtgcttttgttgaggggagacaaattctggatgctgttttgattgctaatgagttgatggatgagaaaaggagatcaagggaggaaggggtagtcttcaaaattgattttgaaaaggcatatgatcatgttgattgagactttttggaccatgtacttgaaagaaaagggtttagttcaagatggaggtcctcgatgaggggatgcttattttcggcgacatttgcagtcttagtaaatggaaatgctaaggggtgggttaagacatacaaaggcctaagacaaggagattccctctctccttttctcttcaccttggtggttgatgctttaagcagattgattgtgagagcggaggagagaggtttatttgaggggtttctagtgggtagaaataggaccaaggtgtctcatttacaatttgcggatgacaccatctttttttctaaagcatcatttgaagagttgcattctctcaagctaattttgttggtgtttgggcggttatcaaggttaaggatcaatctaaataagagcactctctcggcaatcaacattagtcaagaccaaaccacaaggttggcttctctgcttgagtgtgtagtctctgattgaccttaacgtatttgggtctccctttaggggagaacccaaattcgctctccttttgggatccagtgttggataaagtctctaggaggttggaaaaaagtctttttgtccttaggaggtagaatcaccctaattcagttttgtctgtcgcacatcccaagctattttctttctctttttaaggtttcagcttcaatagttttgaggattgagaaattacaaagtgattttttatggtcaagttctggggagggtaaaagagatcatttggcggtttagggtttgagaaaatctctctaaggaacaaagctttattagggaagtggctttggaggtaccttaaggaaggttctgccctttggcatcatgttatcttgagtatctatgggacatatcctaataaatgagatgccagcaatataatcagatggtcacatcgttgcccctgaaaggccattgctcatattcttcaagtcttttctacatacattcgctttgtggtaggtgatgagactagaatttgtttttggaaagatctatggtgccgactaacctctttgtttacaatttccaagacttttcaaaatcaccactactaaaacttgtcctatttaagctattctgggtaataacacttcattttcttgggatctagtcttcagacgcaatctaactgatgaggagattgtggatcttgaaagactaaagtccttacttttccttgttcatttgactccttcaattccagatgcgaaagcttggataccgtcctcttcgggaattttcttagttaaataattttttttagccttatccattgtctcaaattttgttcctttctacccaactaatcttttgtggaaatcaaaagtctcctctaaggtcagggcttttgctcagttagtggcacataaaaagataaataccaatgacatactgcagttgtgaaggcttttcaaagcccttagccttgattggtgcatcctttgtaagaggagcagagagacgattgatgatttcttcttgcattgtccgattactttgggattgtggcataaaagtttttcataggctgggatggagtaagttcagcctagtagtatttgcgatatgttggtgatttctttcaagtgttttgagaattctatcagaggcaagattctttggaggatcatgtgtctctctctgttgtggattgtgtggtgagagagaggaatgttaggatttttgagaacatttagaagacgtcggagatgatgtgggatcaactttattttaatgtttcttttttgggcttattgtacaaacatttttaaaccttatcctttgagtataatctagcttagttggctttcgttatgtacaccctagggttgggtttatcatctttttatacttttatcatcttttcctacctggtcactcaaaacctctttcttcagaaaggctctgtttcctactgtctcttctgccaagggtcatgcaccaaattgtttctgtactgggggaaaaaacaccgtagaaataaggaccgtagcataaacagaaaccgtcaaagagttctaatttgcaatttttttgggtggtgagtttctggagacagcagtggtggtaatgcatgtggattagtggtggtagattagaactagattaaggttaggattatgaagagatttgttattttgaatattgaaagttccttgttattaattgatttttaaaatggtgagatattatccaatagggaataataagttaatagctttttctttgctggatgtttgctcaaatctccctttctaaaaactgactgatgtgatggttatttataatttctggtttaactatcacaacaggaaagctaaaaaatgtttgaaacattatggtagattctctgaaatgtttgtgtttaatatttttatggtaaaactgaatctttatcattttcctgtttgaatcttaataaattcaatgtgtgtcctcccctgaaggtacttggaataga

SEQ ID NO: 11680 - DNA, 3721 bp, Vitis vinifera
  Intron number 3 from transcript GSVIVT01021057001 (locus G SVIVG01021057001) derived from phytozome v7.0 (chr-ID chr5 ; pos 14370154 to 14373874)
tttttctcctcgggtaatcaatcgttttcaaacttttgttctgtcaattcccggccaagtgttgttgctcatgaagttgcattaatacacatgattttcatttgttatcatgatgatattattgtttgttgtcacttttaattaaagctatatattttaccattagactattgaactttttcatctcaaagtatgatctaatatgcttttgttggctcctaatcttttcttcataccttccatataatgtcaaatagcttggattgttgattaaatacattatctctctctttttgttgcttttctatgttctcatgcaaaattttttcttatgcgacattcttttttaacaaatcgagtctgggtggatactacaaagagtagatcattgttcttaatgtaagcaaagatgatttacatacctataggacattaatcaagtgaggaatcattctagaaaattttcaatgctaatcacaaccagtttgaacttcaaagtctagttgattggggattcatcaatacgggagagaagagctaaagcaaccaaacttgttggggttgattgtacagaataaaaaattatcatccttatctaacttctatgttagatcattttcacttctttccttggtcatctaatggaggaagctgatttttctattacttcttaaatgaatcactggttggaatttaatttgatcataaaacctttctaacttaaacaaatatttcccaatgtagtctcgatctacccatttcttttctgttatgcttttggaatgggaaaaaggaaaaacaatagtatgcattcaaggattttcagatgtaaaagcttgctgttgattcttcctgtgaaaaaaaaaaaaaacaaggaaaaatattacaataatagaagggttgcaaatgaggtcattgattggagattgaaagatagttctaatagcgttttatgcaagcttgacattgagaaggcatattataatgtatattaaggtttccttcttgtggttttgaagaaaatgaattttggtcaaaaatggtttggataagttaaatggtgtatctctacatttagatacttagtgcttgttgatagtactcttgttggcatttttcaaagttctaaggggccaaaagaccctctttctccttataattcgtgaatatgatgaacgctcttagctgttttattaagacaacaggggaggggggtttcatcttgggctataagatgggtggtagaggtggtgagggggtggacaaagtgtctcaccttttatttgctaatgacaccctgattttttgtcaagcatgcaaagattagatgatgtatcttagttggattttaaagtggtttgagaccatttttgggttcaagataactttggaaaagagtgagttgattcttgttgggggtgtttctgatgtggaggctttactgaccgtaagtggggatgctcccacccatgtatttgcttctccctttgagaatatcctacaaattgaaggtggtctgggacatatggcagagaggtttcagagaagacttgcaatgtggaagctacaatatctgacaaaagggggggtggttaactctgattaatagtaccttgtggagtcacctcatttgtctcatgttgctgcttattgttcaaagaagggtgggcataagattagaaaacatccaaagggaatttcttttgggggaggggtaattctttaagaaaagcctcacttggtgaattagtcaaatgtttgtatgcaaaaaaaggaaaggggagatgggcatttgtgatctttctgctttgaacaaggctttcctagtgagtggtattggaggtttatgtctaaaagggaatctctttggaagcaaattcttatatggaagttttagggaagaaacgtgagggttatggactaaaattttaggacaaaatataatgtggggatcttctttgagggtttctttattgttgttgtatgttatagctccttcaaagaatactccttgactaggaggtggatgattttgaagcattccttctaagattgcaagggaattctataagaagagatgttaaggagggcggtgtgaatggcctctaagagtgacaacttttcagttaaatcctaatactcttagttggagcatgggagatcagagcttttccagtgactgttacttggtatccttgggttgcaacaaaattaagcctttttgcttaggaagtagtttggaaaggaaccttgacaatgaataaattaaagaggagagggtggactttggtgaatggatgttttatgtgcaaatatgaggaagaatctgttgagcatatactccttcattgttatgaggcaagaattctatggcagttagcctattccttgtttggaattgtatggatgctaaattcatcaattaaaacaactctactcagttggcatcgacttttcatcagcatgaaataaagcatgaaagccactcctttgtgctttttgtttttgtttcttttttttttcctttttgggtggggggtggggcgtgtggctatttagaaaaagaaaaataggagggcttttgacaatgtagagcttatgcagtgggtcaaagagtatagaggatgtgccacatttacagtagattttttcaattggttaggatgcaagtaaggggagggagtgttttgtgttttccctcatcttgttgtttgccttatggtgcccttgtttacatcttgtctgctttgtgcaccttttttgggtgttactaatctattgcttttcttgcctttaaataagtaaataagtggggttgaagatgattggagaaaaagggagagattttgatccaactgtcatctaggggatgagattacaaagactagcatttatagtttgtctctgatataatcaggcttaaattattttgcggttctcttgagaaagaaaaacattggagccacctccttctagtagcagctcaaattccttggtaagaatccggagcttttggaagaaacaagaccaaaacattcatcattcttagaaatactatgacatacatattgacctggacttaaataggatggttcttggttacctaggtctattcatgatggatgtcatatttacaatatctattgtaataaacttctattgccagtgtttaaatttctgactacttctcgttgatgtgtgttaaataggaacattcatcattcttagaaatactatgacacgcatatcgaccgggacttaaataggatggttcttggttacctaggtctaatcatgatggatgtcatatttacagtatctattgtaataaacttctattgccagtgtttaaatttctgaatatttctcgttgatgtgtgttatggatacaatagtatggaggaaaaaagaataactgtgtaagaactaatctaacagggatggcagatggggacattctctttttattttattttttattatttttttctttgtacttattaatgcagtatagttccatgggatctacattcacttgtctgataatatcagattaatttcttagagaagtatatgccttgctggtagaaatttccgaagtccttaaggagacactgcctgtcactactgccactgtcattaccaccatgtatgctaacattggcatcattgtgcccttgaatcaggattatcagagtcctaatattaaagagaagacaag

SEQ ID NO: 11681 - DNA, 3649 bp, Vitis vinifera
  Intron number 2 from transcript GSVIVT01008452001 (locus G SVIVG01008452001) derived from phytozome v7.0 (chr-ID chr1 7; pos 1879038 to 1882686 reverse strand)
ctcccagaaagcgacaactccatctcttccaccaggtagtctctcccaacacttcttccagcttctctttctccattttattttaatttttgtgtaattgcttacaaactctgagattaatacatttcggtttttttttttgaatttacaaactctggattttttcatgggatacggtttttggagttctttgtttgatgctaaattatgtttctgagctttttttcctgatttttttgggggtcttttaggttatggcgtttttttgattatggtatgtttatttatttttcttctggaattatttaatgaaattcttcattaaactactgaatgttctttatgcagaaaattaggaaaaaaaaatgttgggacgagagaagtaagatgtttttgattgggaatcatctgccaaggatcaatagttattcaaaaactatgttgccctctgatggggttggatgtatctttaagtaaagtaaaatgtcatctaaaacattggatttgttccttctaattcataggtttcatcttcttatgtggaaggtagattcacaagttcttgcgtttattttctgatccaatctcgcaatagtgaatgtaattacataaaactaaagattatgatatatgccagctacgtaaggaagagatttcctcaatcatggttggttgtgtgaacagtgtgtcctagaattatatggcgatgattctaatatccaagattctctacttcacaaacggcttgtcgatgaacctaggaatcaaggaagtggctgtgaatgtcgttgcctacttgccaagtggcattggaattctagcaatcaccacctagtagcgctaggtgggcgagggttaaggactgcatcatgattgaagcatagctctttatcgcttagtgcttgcatttctatggttgatatttgttatactaggggtatgtcggagttggaattggttttaagactgaccatatggtcatggtggtctttgggttgatgatagaatgagaaataattccaaaccatgaaataacactattagtaggaggaaggtgttacaaagttcaatgggattttgctttgaagaggctagtttgccctcttgaatgatagcaaaaaaggaaaaagaaaaaagaagaagaatttgtttggcaaaggataaccagtttagtgggatttcaccattaaaactttcaagtttcaatgaatttggacttgcttaggtgactctatcattaatcttgctagatttatttaaaatctaggattaggaacttttgtgatggatacatctttaagtaagggcaagaatcatctaaaatcgttggaggtgtccgtctgagtcatatctttgacctgctaatttggaaggtagtttctcgagatcttgagttgattctctaaattgatgtaacaattctaggatattattatataaaatgaactattgtgtaaggaagtttttattaatcatggttggtcatgcaatctctgaaggcaaagcatatctttatgctcattgtatgctacaaatgataatacaataataatgataattgcaaacttccaaccaaaaaattatttctttgttatgtaaattatgttgtattagctatttcaagtcttttcccctttgtggataattgcatgaatattgatctttgatacatttgataattattgcttaaatagagtttgagggttcaaattctagaaaggatttggggtggaaaaattcctatttagattgccagttttgtggaaaattgactaaaaaagcattactgcatgtccaaatttgcaatattaattttttttttatcataaatagaaatgtattaaatatggataaaaagtacatgagaaggataaggagtcctccccatagttacaaaaagttgataaaaaataatgctaaactcttccattatacaaggagacctaaccatacggatcagtccaaaagaaagtacaatagtatcttcttaaacccaatcaaaactcctttcattgcttttcaaatccttttgttttgtacattgaggaccaatcaagctgaacaacattgagaggaatgccttttaaagcagctatacaagaggcttagaaagaggaataaaagtgcattagattccatagtgtctctatcatgtccccctatgcaatccacatcaatgcgatacaagcgatttggcaaaggatcttgcttctaacggtactccctaaaaccctatatgaaatggtcattgtgtcatcatgtcatatatgctcctaggtggaaccctattctttgtagcttgtttgaatagattgtgccataaccccaaaattgtctgaaaatgtaaaaaaagatgataaattgtttctcccctccccatgcatagaatgcaccagctagggctagaggatttgtaaggtcttctcaattgtaacatattattggtatttgccttcttatgtgccattagccaaacaaaggccttaaccttagatgggtttagacttccatacaactttggtcaaagaaaagggacttgtatttgatagatgagacaagaccacaaccaaggattatattgagaacaaacctaaggaggataatgaccaggctgttgcatctgggatagttgaagacaaatgcatgtgattgagagaggacataaatctttcaaggtcctcaatctccaaatcagtgaggttattcattaattgctcattaaattatttaaaattccttacgtacattagattggtctggtcttttttcaggtgtacgtcttgtgttttgctttgtttgtaggctctaggaggccttcttgccttagataagtgttggcttggctttgtgccttggctctacactaggagacatttgctttaatgttcaaactagtggccttaggctctctgcatgagattgaggccatgacatggtcctgctggtcttaaatttgagtcaggggttggttgctttgtgtactaatcaatttggaattaaatttaaattccttataatactggttttcaaatttaacagaattggaattccaaatcaaatccatttctgcactactaaggagcaaccttaggcaattcactaacaaaagctcatcagtatgatctctatgaaaagaaaataattgcagcatggattgaaagagagctaatcaataggctagttgaaaccagagaaacttgtctatgaatatcaggagagtaaaatgtgtgatgcttatagcatatggaaaaatgttgatcatgagggttgcagcacattggagaagaagttgaactcaagggaatcaatcatttgaacattttcccttggatgattcttggtttctgaatctcaggttcttagctagaatttaaataatttcaaatccatagatatgtaaagcaactaaacctaagactggaatttgatatggaattttcaacctgaatcttaattccaaattttaggcaattaagtatggcctaagtcttttcaagagattgccctctaattgttttaggattcttttatgatgtaagtgaattttaggatactatttagttatgtgaatcagaatgttattttaattcattttggcaggaattgcttgacagactctagcaaaaagaagcatcagaagtcggggtct

SEQ ID NO: 11682 - DNA, 1048 bp, Vitis vinifera
  Intron number 2 from transcript GSVIVT01033509001 (locus G SVIVG01033509001) derived from phytozome v7.0 (chr-ID chr8 ; pos 20179616 to 20180663 reverse strand)
tttctctgtatcccaagctttagcgccgaagagaggtgggttcccttatatttcgcttcatgtttctcaaaaaaaagttgggctgtcaagctccatttctattgtgatcgtgttctgaatatggtttaaagtgggcgcattcattgtgcttagagaaatgggattgtttttggagttctggacttgttatttccagatttattctctgtttggtttcccagaaaaatgctcgggaaaagggggtaaaattttgaatccggtgattcagttgatctatggcgcaccagctaagccaagtcgtgagagtcccatgacgcatacttttaatttctttgtattttccacatttcctttggaaccagacttgctgtttgtgatggtgatcttgatttcttatattgttttttttaaaaggtataatttctttggtatttacagtgtccatatctcctatatcatttccgacagaaagtctttttttcttcttcttttttttcgtagaaaatttattttctattaaagatcagctatctttagatttaggatattatttccgagttgaattagtgttgtttgtttgattatttggatttaggggtaatttgacagcagttttggggttttctgtataagtttaaaaactatttgttgtatttaacctttagattcatctccatggaagattctatagagggtaaaatgactttagtgcatcttttagtgttttggcttatctttgttagattattttttggcgaggttgcataacacctccacatactgttactgggtctatgtgttgattatatttatttgttgtttattgattatcttgtgaccttcttaatcttgtttatttatctattcgtttataaaacttataagatccagtttttgttatttgaatgaacctgtgcgtggaaaggaaaaatgcttcaaaatggcttcctttcttaggcattttcctttcattcttcccatttaaatttgttttgtcatggtttcttttgcaggtatatttattcttgtttcgtgattaggctactga

SEQ ID NO: 11683 - DNA, 1467 bp, Vitis vinifera
  Intron number 2 from transcript GSVIVT01032057001 (locus G SVIVG01032057001) derived from phytozome v7.0 (chr-ID chr1 3; pos 23139052 to 23140518 reverse strand)
acaggcttcttcaggtggttttggtttctcctcaggtaatgatatcgaaaatctggtaattggttttgtttcaattgggttttctgagtggcaagtgatattattggtgattgaagtggggttttggtactgaattatgtttttcagatgatctcttacgtatacatagtagaaattaagatccttcatagcagaattgtttgagggtatgttgttagtgtgttgttatatttatgcttaagcgtgtttatgtatgtattcaaaattatgatttttgtagaagatgtgactaggtgtttatgagaatttgcgcatctatatatctgaaaccaggtgtgttgggtggaaaaggttatacgttttttctggaaatcgagacccgttatagcagaattgttatggatggttatagtgttttgttgatgtgttatatgtgtgttacatgagtgtgcagtgtgcatctgtccgaaatttcaaatcttttgatgaatatgaaacatgaacatggataagattaggacttttggtgtagcacttcatggagcagaaaattggtatctaagaacggggaaatgatgggaaaaaaatgagtgattataaatttttaaggaaacagtaggtaacatagtttgctttagaaatggtgttggcaacaaaccctggaaaactcccattctggagcaataccatgtaggctattgtgatgagagagctggacttttttgaagtgatggaaaatggtttatcttatattttttggggttccattttccaggaaagaggctggacttatccttatttcagatcaggttgatggatttcttaaacaatatagcttagcagtttcagagtcttgatgataactagtcccattcaacctcatggacacatttctttcacattaggaacctgtgtccttaaacttaatttgtctccttttagattgtctcctgtccataatggcaaaaggcatcaaatctccatgaaccattggatgtagtgttaaacacgtcttctctggacaatgcaagcaactgatttgataaaaggaatggtaccactgtaaaaaagaacaagaatattaactagaaatgccacttggttggatttttggtgattagtgtacccaatttgttggggtttgtgtccatgcctttgtcaattctgtttggtacattggaagtaaacaatcgaataggttattacttaaatttttaaagaatgaagtttgtgcgtttttcccacttttgtaacttcctctttctcacaattcttcttaatttaatttattattttttccaattttacacaacaatcatgtggtaaattctaaaactctgcgactccacaagtgacaatacttttctttttcttttgggttgccaacagcttcaatttcttgaggctggctctgagattttcttgttccttgcagattcctgggaacacaggaaccattgccagaac

SEQ ID NO: 11684 - DNA, 3745 bp, Vitis vinifera
  Intron number 2 from transcript GSVIVT01034457001 (locus G SVIVG01034457001) derived from phytozome v7.0 (chr-ID chr1 8; pos 20989570 to 20993314 reverse strand)
aaggtgtggtactgaaaattacggactagtgtagttttgagacttttgagcaatttgaaggtgaataagactggaaaacatcgtcccaccactccagttgccgtgaaaaatagtgtatttcagtaaaggaaacgtgggagactggaataattatccggatgaattggtgcagtgtgtggtccagattactgaacacaaatttagtggcactggcttgatgtttctgcagccatgaaaggtccgcataacgatgtgggttgataatttccaagtctagaataatagtttggagggacttggtccacctgaggtaccacttattcgttttctgtactgtaagatgctcgaattcaaggttgtcttttttatgtttaccttttaatgggtggctacgaataaagtgtcaagtcaatggagtgagtcctttctgttgtttggtgaccctagaggatccaaaattcttacatccctctctcatacactactattaaggcagcggatccaatatactccatctagagaacttaatggaacaaataatgcatggcaccttcaacatgtactgaaaacactacttcctcttcttgattagccttctttatctaaacataaatatgattttctgtgttccatgcctaaaatagtttttgtagtcgtatgaatgagaaagtgtccgaccataaattaagatgcattacttcaaagaagtttataagcaatcggtaaacaaagaatcctcaaatgtattgtattgtttgtgtaattattccaccatggatcaacctttttgtagaattttcctctattgaaaattatagtcaatcttaattaataaagttacaaattgtaattaggcgctataataatagagacactacaagaaggcgggtttatggtgagggccaccaactgcagctaaagggaagacttagtgcgactataagatatgattgtagacaaaatagaacgcaacaaggtgtaaccataagaggcacagataaaggctatagttgtggttacgtgtaagactattactataaatattaaaaccatggccacaaccagatctttcccatgactaaaggtaatgtatagctgtggccaacagtggccccaactataaggttgttaatatataaaaaaattagagattgtagtgggagttatcttttatcacaatcatatgtactgatattgggatgaatatgcttttgttgttattataggtcttgatatggatatagattttttttggttgctacattaggttatgatgtggacaagttaatggctaggtgcaactataggtgcatcttttatgaatcatttttattttttattttttataatttggatccacattttgattcatctaatatgtactaaacaataaaataattttccaggcacactaacattttatacctgtcttattaaattacacatttgacttgaaaatttaaattataaaagtgaatcttgaaatgacttacttgtctataccaataaagagtagtgaaactaattaaattcataagagtgcaatagggaaagatcaaatggaaatatcagtagatgcttgtagattgtgatgccattaccaaatggagcttgagatatttcaatgtgagcatcagatgtcagtatttttttgaatttgatggcatgcttccaccaagttttcctgtcctctagagccagtagtggatcagccttcactagtttcatcaacttctcatgataatctcgaaaactcccttcattcccttgctgcaaaagcaatcatacaacattttaaaattaacttcaattgattccaaaattgtactaaagttacaccaacagtataaatgatgatcaatgtcaaaaaatgcaatactagagtgttggtgcgatattagcagtggttggaagtttgtactatgcacttttagcttcaaaggtaggaatcgaatcacaaaccttcaaccccaacattgaggatgcctttagacatgaacttgctggtggaaacctctaataattctttaattaaacactttcccaagtgtcgaattaaactcataatctcttcaccattaaatttactaacagaaggtgtgaatatcacatcatcaagatttatataaataagagacattcaatttactaattacatgagaactctaggattaaaacttataaaagcctaccaactaaagctagaagggcatgtttagataggcaaggagatagaatttctcttattattctatgtataattagagtgcatttgacactgattttaagaagtgtttttaacttttctaatacttgaaaatttttatctttcaagaattaaaaaaaaatgctagaaacacttttatgatcactaccaaaaccactcttagtgttgaaacacaatatagagattgaggcaggaccattattacagtatgtcaattaatcacataataagtaagatttataactcaaggattggagaggtaacttgataggtaataatactaccttgttagattacgaacatcaattcatagcgggtttgcatgtagtggatagtaggtcacaggtctagcttcatctcgttatctatttacatgtggtacaagagtgtagttgattctctttagtggaatattgaattaacttcaaaattggattctgagggagttattattcctatgggtcctagtagtccctgtactaagttcatacaccatgatgacatggtttatgagggttggattgactctaggttcactcttgtgcatatagggcatcttagtaataatgtaaggttgcacaagggatagtgaacaaagtatctagatttggctaattaattaactagatgactctgtatggttaattaatcaattcgaactcattttgagttaaattaagtgactcaagccttaataggttcaaatcacttaagcctagtaaggcaactctataaataccctcttaagagttagagtttccttcaccttttgtgagacagtcaccttccacctctagggagagagaacctaggtttcctctcttccaaagcccacacattgaagtgtcaagatcgtgatttgagttattagacaaaagatcttaggtgtacaaaacctccaaactattcaaccatgtttttcatgatgaggaattgatttagaaacatctagatccaagtatgatcactattttctctagtttattattctaaatgatttttaaagccattatttttgttagaatagtttctaaagaagcctagggtaaatttgcatgtacctatacaatccaaggtttgagaatggagagatataaggttgccattaataaataaataaaaactcgaattcaacaccaccgctcaggaaaaatttcaaaggaataaaaaaattatacttcaatctattctttcccactttgcttaaactatacctccttttgtccactctcttcaattgtctttctctccaccctactttgattcacaataagcaacccaaatgaattctaacatgaatggaatgagagggagaggggttacttgaaggaatcgatgatgggatcttgagtgtgaagcaagggcaattgagagagaagaacatcgaaaccttccacccaattgacgttttggggggcttatgaaagggtcattccatatttggcaaggacatgggtgccctaaaagtaggacatgtgggggaggggttgagtgaagacaaaccaactctttttgaca

SEQ ID NO: 11685 - DNA, 4242 bp, Vitis vinifera
  Intron number 1 from transcript GSVIVT01017468001 (locus G SVIVG01017468001) derived from phytozome v7.0 (chr-ID chr9 ; pos 8852041 to 8856282 reverse strand)
tacttggagtaggaggctttgatttggagaggttatttctctatcttccctttgttgtagggcgtaaacatttccattgtctataagctaacttatttattaggttgcggttgatttagtgtattttcatttctagccacttctgataaaaaaatttatctttgatttgtgcgttatctatttacatgctactggtgatatgcttagttgttttacattgatagctttagtttgttctcctcctcctcctcctccttctcctcctccccctctccccttttttttttttccatttctttgtgtttcatttttcttaatacgcttttgtgcttccatttgatttcctcctttagtaatgcatgaaatctgtagttgttaaaagaaagtctaggagcaaaaaaagcccagggtacagggaggtgtgtgtgaaatgctttgtgttgcctcaagcaaggtgcttataagcaagtgtcacttgatacccaaggcatttttgcaaggacgacacaccttttattttatgctatttattattcatttcatggataaacaagatagttgagagttcagaattaacatcaacaactaatatcataagtccacctctgaaagttctagaatccaattactaatatagacatcccaaaatcaaaattatgggtagcacaaatcctttttatgagcagctcccaagtcctatcatagaagcccgctcagtgaccaaccctaactcctcatcatatcacttcttgcccgattgctctttactacaaaataatttcaggggtgggctcgcaacccatgttacaaacaataatccaatagggtagagcaaacaacaattcaagatggtgtctctaaaataatctaataggtgagggaagtatacggggtagggttgtggaaagccattaaaaaggagggggatgtgttaagctacaaagtttcctttttggtgggggatagtagaaaggtgaggttttggaaggacaagtggtatggtgatgagcctttgtgcatctcttttccttctttatttgttgtagcttcttccaaggaggtgtgggtagagttggtttggagtcattcttctgagggagggtgttgtgctccttacttttttaggcattttgatgactgggagatggagagcttggagcatttccttctgagattgcatgggaggagggtgtccaaggacaaagaggatgatattatgtggactgagtccaaggatgggactttctctgtcaaatccttattcagggcgtgggagctaggaagacagagcgttttcctaacaaaggtgattgatctcatgggtgccaccgagggtggtcttttttgcttgggaagctacttggaggaaggttctaaatctagatcatattcaaaggagagggtggtatttggcgaatagatgttttctttgccttaaagaggaagaatccgtgaatcatattctccttcattgtgctaaaacaagagttttatgacatcttttgttctccctttttggtgtggcatgagtgctcctctcatcggttagagaggcattgttaggatggtagggttctttcgtgggaaagaaaaggaagaagacgtggtgggttgctcctttataccttttttggactgtttggaatgaaagaaatagtaggatgtttgatagtgagggttggtcaattcaagggttgaaatcctcatttgcttgtaatctttgggcttggtgcaagatgcacatagttcttaggtctcattcctttgtagattttgtggagtgtatgggttcgggctaagggggttgttgttgatgttttttttatgtttttgtgttactttgaggtgttttttagtatacttcctatgtactttggagcgctttctctggtgttactttttattaattgattttgattacctataaaaaaaaaattgtgtctaaagtaagacatgcccttttgtagaagtagaacctgttagccagacataagattttcaaagcatatgtcacaggcattttggcaatttaacaaattctcattgagtttaaagttcatataattccaaaaatcatgttttctcaaattctcgagtttttaagacagatacccataaaaaggtcttaactacaattcatcgagtcctaacagatgtaaaaggccaagaaaatagcatcttgttggctagggccaaatagtgtagctagcttagtgtttgataacaaatggtgcctgaacggatcatggcatggtgccttaggtcaataatttaccacctattggttaggcacaatgtatggtaacccccattaagagatgtaaaggtcggcagcttgcccctttctcccctcgcccattaaagtgaaacaagtaatccacacagcacattcaagtgattctgacactatttgttcaaataaacattttctcagaaaccaagaatgcatactcaaagaagtagcttgttgtacattttcagcgttattaaaagtccatatgtaataaaatgggctaaactatatgatttccttcacagggttctcaaagaaaagttcttaccaaaataacaagctatactataaccccttacccttcactgtagttgactcttttcttttatctctgggcgacccttcccttaaagttagacacaattaatttagttcacaaatgctttcacaatttctgatctcaggtactcattttggtaatggtggattttttccatgtcgattaatcgaggcattggttcaatctattgaaattctgccttgatatcaggtcatcatcccattcaatcgaactggacaaaattctagatcaccaaacaaattacaattccaagaatctgatttcttgtcctatgtgttcaaaatcaagttattttcatctcacatatatatctaaagattttggtgtcttattaacatggattaacactgaataaatgatttgaggcctatgtctagggactgaatacaacttattttcttacgttttagacatatgagtttcctacctttttctatggttgctttcatccacccaagacctctagatctctggattatgaagaaggaattagtttacttaccatgtctcaaattcctttgggaatgctcaaggaaatagagttctctttttctgaacagatttatgaaagcgttctctctgtctgtctgtctgtctctccctctctctctttctctctccacagaacaattgtctttaaggaggttaaagaccctatttttgcttaagctcattttaggttttctatacattcctacagatttgccaaagtacctcttgagttttattgaatttattcttagccttgatctaagagaatttctgtgataacgttgaataattcagggtagaaataaccccttctttatggccccgtagttacatagtacgcacattcttcattattagcataacccaaagtaattaattaaccgtgaaatccagaaattagggttaaggtattgcatcatcttgtcactttgattttatagttgatgctgaccaaaccttctgcaaggtaaaggggatgcttgtcatctaaaatttgtgcattatggtgagaagtgaggttggttaacgtcgttttcatctacaatgtatttggcagatggatgcagactctagttactctgttcctcagaatagttttgtgccgatctctagaaggtaaaagctgttgggcaggggtgggagcttgaaaggaacaaaaacacgtctctcttggacaactatatccaatgggctcacttgtgtctaccaaagcagaaggattgcctagtcaaatccttattgctatggatctcatcctcatcagtagcccacagagttcccttttaggtttttatttctggcctgttctgtgcagaagcagcttgacctcacattttactgttttattttagttcctctgctggtgtcagtgtttgtttgtttgtgtgcttgttttcgttttgtttatcttttctgtgtctacttatggcctcctttatttaccttctgcattaggatttactgcccatgaaaaagagacaatgaaacaacaaagaagaaacagttctatgctcttgacagatggagtacttcattgtttggcttcatgaagactttgctatctttctggctttttgggcatctttttgtgatttggggttgtaagcaaacatctgttggaaccttgctaggattgagagtgctgtcaatccagaag

SEQ ID NO: 11686 - DNA, 2362 bp, Vitis vinifera
  Intron number 2 from transcript GSVIVT01031257001 (locus G SVIVG01031257001) derived from phytozome v7.0 (chr-ID chr1 4; pos 743815 to 746176)
tcaggcttaagaaactcggcattccttgcaaacatgtgagtatttctctattctgcatatctgtatgctgctgatttttccatatcaagtttaactgggcctcatgtgatttgtaaaaaattaatgatgttctttaattgtaatctgatcatgattcaaagcagtagcatcttttatgggcccaattgatcaatgttctttacttatacacttatcacgactctttcagtatgatactacttctagttgttcttccagcatgtgttgtttttaggcaatatgaaggtcttgagttataaaatggagctagtatatggcctaaaggcgatattcatattggttttggcagagtaatttttctttgttagcaaatgattatatgggttactcatacatggcctttttcgaagttatgtatataatgctagaaaggcatgagtatccttgcttcttagaggggaaaattgcagacctggaccaatattattcaaattgctgttggattgcaaccaaatgatcacgttatgactggtggttccttttgaatctgtagtttgttgaagttgcatttctactagttgctttattttctttgtttttgagagtccaatgaaaaaatgatatgcattatttaaatttgttaggcaaggaaaactggtagatttcccttgaggcggccgaacattagatgcattattgaagttttttattcaggtgtaagggtctttggttttttccccttttatttttgagagattcttgtacgcatcccttcaacatgggatgtgctccctttaggtgtttgtttctatataatcttatttatttataaacaaaaggtttttttcaagtgctgaaagtctttgtacaagttgagttaaaataaataaataaataaataaataaataaaataaaataaaaaaatcctatttttccattcctgaaactttatggcttttggcttggccttcatgttgcagcctcttcgacctgaatcaaatattcttcttgattacaacatcttcaaccagaatcacatctatccttagtgataaacttacagatcttcagaaaatgacaaaacaatttctttgcctcattccatctacaatttactatgctattcttcatgactgagatagcttaattgggaacctaacacatgggtcacaaggacaacccttttttcccccttggtttagagtagggcatggtctctttattttggacatcaacaccctatttgcctgaatgtttggaagttctacacaatgagacagggtagatagtgataataaggctaaaaatgtccaagtggggatagaacaggatacttgaaagttaaggatctgtttgagaactgttattgaaaacagttttttgttcttttaaacaatttctaacttacaaaacatgtttgataatttttttactgaaaaacaggtttttgagaatttgttctgaaaacaagttgtgttttagagcaattttgagacgttttaaggtgtttttttgtaaagtattgtaaaaaacaattaaaaatgtggagaataatttgaaaattttggcatcgtacacaagtacatggtactttcatggagaataagttgagaaaactattttttatatttgaattctcaaacaaaattctgtttttgataacaatcaagagctgtttttgagaacatcaaacaagcctaaatctctcagatatgtaagagactagtttggtgttgcatgattcatgttgcccatcatgcccatcatgaacaatggcattgtctagaaactcccatggtcacacacaagcaataaacttaagcaaatttattagctgcaatattagattcctcattctccaaaaaaagatcatacttaatcagtaaaataattgtgtgcttctccacataactatgggatatgcctgaatggaagctatgtcctgacggaaaatcaggtctcttatggttacttttgtaaactagtggaatttacatttctcttgtcacagctaacactcagtttcataaaataatttccattctaaagaaaaatatttgttaaaaaaatggggtggattttacactggacatgtctggaactgaaaaaagcccatgtatggttactatggtactattgccttaaattactgttgccctgccaaattttccaaagaaacgacctcccctgccactgataaggcctttacactaaatcttttgtggtttgtggcttaatttgttgatgccaatgaattaattagaaaatgtgaagtttcttgctctttattaaatcaattctaatgatgcgttttgtggtaatgcagaggaagctgatcttgagacacacccacaagtacag

SEQ ID NO: 11687 - DNA, 10435 bp, Vitis vinifera
  Intron number 18 from transcript GSVIVT01018506001 (locus GSVIVG01018506001) derived from phytozome v7.0 (chr-ID chr 16; pos 14186858 to 14197292)
tggttttcagggaacgaatccgtgttcatccacaggtcagagaattttctcttcgtaataataggaaatgattaaaaaggaatccatcttatgctttttatttcactttatagaactatctaaagctggtttgcctaatagaatgaatttgattcgctttttaattttgtgtgtaataaaacgaagttttgacttaagtctggactttatgaagatcacaagaaattgttcaaggtttttctaaaaattaaaatatgatcaagagaagtatctacgggttggataatattgataaagcattggtatttgaaacatgttgaaagaaaggatgaaaatttgcaagcaggagcaaatataaaatctgtctagatttgtagaagctgtacagattcatagaatctggtttagacagtattttgtgtatatttggtaggaagtaggtcatagagtaattctagggattgaagagctgtatattatactttttttcctcttaatagtttttttttttttttttgttgataggtaaaggaaattgtattaaaagaaaaggtatacacgacatatacaaagcaaccaaagagatgtgaatacaaaaaaactagcaaccacaccgctctctaataagaacctaaccaatccacaaaaactagcaactgcaccgcactctaaaaggtgtatccacatatcatggctgtgatgatgaaactcatttgacatgaaagcttagcacttaaaatagtttaagagagtgctaactctgttgctactgttagaacaaacaaaggacaaaagaacctggggaaaaagatattaggtggtgtgactactgcaacaaacaaagacatacaagcgaaacgtgctggaaactacttgaaaaacctttttctcttggtgacaaaggaggcagacaaccctttaagaaggcacctataagaaggcgaatcaaagtgtgaccactgagaattctgaacctaaaaatggcatccctggtgtgatagcttgacactcggataatgcccctttcactaaaagtcaactggaggccttgttcaaaattttgggataggttggaaacttaaactctaataattttgcttaatcaggtagtacctattcaactttgagtgcctttgataatgtctcatctagttcttgggtcattgattcaggggaaaccgatgatatgactagtgattcacatgcctttttaacctatattccatgttcagaaaaaagataaagtcaaggttgccagtgacacttttattctgattcatgagaagagttgaatttctctgtcatcttctttaaagctaccatctgcacttcatgtcccaaatgttgcttgtaatttgttattcgttaggaaagttacaaaaggaaaaaattgttctgtaactttctttcccacgcaatgtgtttttcaggacctagctataggggtgaggattgataatgttgaagagagagaagggttgtattacctacgtcctgaagtcacaaaagtgctaatttcatgtcactaaggcacgtaagactaaagaagagttttttgctgctacagtattggctaggacattcaaactttgtttcccttaaacttttatatctcgaagttttgtctgttctaaacccttccaaattccagtgtgaaatttgtgagttatctgagagtcattgtgttccatttgaaataaaaaatctgaaatcttgttttctatcattcatagtgatatgtggggaccatctcatgttactaacccttccaaattccaatgtgaaatttgtgagttgtacaagagtcattgtgtttcatttcctgtgcaaaataaaaaatttgaaatcttgttttctatcattaatagtgatgtgttgagaccatctcatgttacttcttatagttttagatggtttgtaagcttcattgatgattgcacccacataacttggatgtaccttctcaaaatgaaatttgaagctgtcgcaattttcaaatcattctatgcaatgattcaaaatcagtttcatacaaaaatgaaagtttttctgacaaataatgggaaagaattgtttaacaatattttgggatcatattttcttcaaaatggattgtttcctattcctcatgtttcgatacacctaacaaaatggagcaatggagaaataaaacatacattttctagaagttgctagagccttacagtttacccaccatgtccctaaaatttactgaagtgatactctcttaatcactgcttgtttaataaatcacatgccttccaaggctctaaactccaaaactcctgtttgggttctaaaaactctttcagtgttaatctctttgaatcacttcctcttaaggtttttgggtgtgcatcctttgctcatcttccgagtaggatacaatctaaattagatcctagagccatcaagtttatatttctaggctcacctacacaaaggggtacacttgttttcactgtcctaccaagaaaatttttgtcattatgtatgtaaaaatctttaaacatctgtcgtactttttcaggatagatctttagggggagaaaaacagtataaaagatctaacatatcccctgtcctgtcctttatgtccttcaaatcagactaagctgttctactcggttccaaacacttctctgatggatcctatacttgtctttgactagcccaacaacatccaaattgaaaccaaacaacaagggaacatgaagggaactgaactgcaaaatgagccagtaaatgttgaaactacgaaggacagtttagaaatggagtgggttaaaaatgtatcaaatcctttaggtccttaggtttagtcaagaaaacaggacaaggtaagggatcctatctttgactctcatgactaatcttcaaacctgtaggcatgtaactctgatactctttttctgttgaaactaattactccttttctgttgaaacccatctttggtactaatcttgatgttcctattgctataaggatggggtgttagaagctatacaaaacattctctttccaattttgtgttgtaccattgccttaatcctaatttgagatcttttagtactaggctatcgtttgagtctattccaaaaaatttaaagtggaaggaagcaatatttgagaagatgagagcttaacataaacatgaaacatgggaaatagttgaattaccaaagggaaggaaaacaatggactgtaattctcaaactaatggccttgactattaggtaacatttggccttcttgtaaaaatgaattcttttagggtcctattatctttggcagttaatttatattggccattacaccaatttgaagttaaaaaatgcttttctacttataaagttagaggaggttcacatgtgtctttctacttggtttcaaggattgttcaaattgtagaaaagtatgcaaattaaagaaatctctgtatgagcttaaacaattcccaagagcgttgcttgaaagatttgcttaatttttgcatactgatgactactctcaaagtcaaggggatcatactctattctttaaacactcactagttatgaaaatcattgtgcttattgcctatgtagatgatatgattgttataggttgacatggaagaaattaaaggtttgaagagtcagctagcaaatgagtttgagataaaggacttggggaacctaagatacttttttaaaattgaagtggaatgatctaagagtggtatagttgcatgtcaatgaaggtacatcctgggcttacaagaagaaactggaatgattggttttaaaccaacagagatactcattgatcccaaccacaaattgatgttcattatagaggaaattatgttgacaaaggaaaatcctagaggttgtgggagaactgctttacttatcctatacaaggctagatataattatgcagttagttagccagtttatgcattcaccattggattgtaagatggaagcagtttaaaaaaaatcttaaaattatttaaaggcatcttggaaaggaacttttttgtttttttcctccaaacatggtcacctccaaatagaagtctatacaaatgctgattgggctgactctcttatggatagaggatcaatgatgggatattgcacccttgtaggaagcaatcttgttactttgagaactaagatattgatggttgtgacaagatatagtgctgaagctgaattttgggttatagctcaaggattatgtgaagtcttatagattaaaggactactcagagtttaaattggagcctaaaggaccaatgaagatttattatgatgataaagttgtgattagtattgcacatattcaagtacaaagtgattgtaccaaacatgttgagctgggcaaaagcttaatgaaagaaaaaattgagactgaatagatttccacatcttttgtagcaactaagcttctcgaaaaggaatctcaacaatcatgattggatttatggtcggcaagcttgaaatgcatgacatctatgcaccaacctgagggaaagtgttagcaggagcaacataatatttgtccaaattcatagaatctggtttcgtaaatgtttagtgtatgtttggtaggaagtagatcatggaataatcctagggattaaatagctgtatattagactctttttttccctctagtggctgtacaaattgtatatttatacattgtaaaacttttcttgtctaattaattgagaaataattttattctctcttctttacgttcactcacaaaattatcttatgaaatatgatggagattattaccaaaattttagaatttaaatgaagtttgatgaattgctagcagaaagaatattgcattagttgcagtcaaaacattatcaaaataatccatgcatgggaaattttcagccactatttaataggaattatatgagtgaaataagggtggattggtaaagagatgatcatatttctcattttttcattactttgacattgcaatataatatattaaaaaagtgttcttatccttaaaatgttatcattgttattactaatgcccatcatgcaagaagtagcccttgggcctgactcaagtggcaagggtttagggtggggatgtggggcattttaggtttgaatcttaatgggatgatgaaaagtagtagtagtagtaataataataataataatgcaagcattgaaactttgactttgaatcaactttctgcgcttcaaatcaagctgaagaatcaccttccacaaatcgttccatttagttacaaactttcatggccatctcatagttcaatgcttgtgttgatttttgattggaaacgacacagatatattgatagaaaaaagaagtacaataagaaggatgagaaatcctcccgccaaagaaaactaaattacaagaaaatacacagaaaacaaacgaactctctataaaggaccattccttatggagtacacacctctaaccaatcaagttgtaacacattaaggggagtccccttaaacgccttggaacagaaagcctaaagagaagcaaggaaaacaatagtcccaaagaaactctgaattcctcgctttatccttgaaattcctcgcgtttctttcccaccacacaacccgaattagagagatgctcgcagcttgccacaaaactatccccctcttagaagtaccaaaaccattaatttgatggacatcatgtcaaagatgttcctcggagggacccaatccatcttagctaactgaaataacctgtgccacaacccaatcgtcaaggaacaatgaagaaaaagatgatttgttgattccccatgcttcatgcacaaaatacaaatatcaggactaagggctttgtagggtcttctcacttgtagcatgtcattagtattcaccttcttgtgtgccactaaccagacaaaggacttcactttgaaaggaacttgagaattccaaatgaacttagaagggaaaacctgaggagatccagaaaattgagataatggtagaaagaaggatttgactaaaaaaagccttgaagaggataatggccaaaatctggcatctgggaccaaaggagatagatgcaatccatcaagtgaccacatgaggccttctaaatcctctatctcagaatctaacaggttacggcggaaatttaaattccaagagaaatgacgagtaggaccgagaactgaagaaataggaatgtttttatccacgactactctaaatagttttggatattgggttcccaaaggttggtccccccaccacaaatcttcccagaatcgaattctttccccatttcctactacaaaccgagtaaacaaggaaaactcctgaaagacttgtgcaatagccttccaaggacaacgatgtgaccatctgactaaagtgttagcatcccaaccattggagtgtaaaccataaatgcttaatatgacctgatgccatagagctaaaccctctctaggatacctccataaccatttccctaaaagagcgagattcctcaaagaaatattcccaaaacccaaaccccctattgccttcggtttacacacaacatcccacctcactaaatgatctcttttgccttccccaatccctgaccataaaaaatccctttgcaacctctcgatttttgcagccactgaagcgggtaacttaaataaggaaaggaagtaacagggcatatgggtaaggcaagattggataagagttatcattcccctgaagaataagtaggtcttttgccacccatctaatctacttgagattctctcaatcactagatcccaaaagccacacgccttagggttcctacccaaaggaagacctagatagagtataggccagctggaagccttgcaatcaagcatctcagccaatcttgaaagatgaacctgatcaagattgatgccataaatactactcttgtcaaggttgaccttgagcccagaaatgtgcccaaacactaacaaaagactcttgagagtctgcaaatcttcctttctagtgttagaaaagaaaatggtatcatcagcaaattgcaaatgggacaccctagttctgtttctacccaccctgaaaccctccaacatttctctttcctttactctcataatcatcctactcagtacatctgcgactaaagtaaacaaaaaaggggataaagggtcaccttgtcttaatcctctcgatgccttaacccaccctttagcttcaccattcaccaagattgcataagatactgaggataaacatccactcatccatttcctccatctcggactgaaccccttcttctctaacacatgatccaaaaaatcccacttcacgtgatcgtatgccttttcaaagtctattttgaagacgacaccttcctctcctgatcgtcttctctcgtccactatctcattcgctatgagaaccgcatccaaaatttgtctgccttgaacaaaagcgccttgagtatagtggatggtctcatgtagaacccctcttagacgccctgagagcactttggctattatcttgtagagactagtgatgaaactaatgggtctaaaatctgatattttctttgtcaaactctttttgggttatataacaatgaaagaggcattagtgctttgattgataattccgctcctatgaaattttgcgaacactctcaccaaatcctccttaatcacatcccaacagtcttggaatactgcaacagtaaagtcatcaggccccgagccttgtccctatccaactaaaaaatggccttagaaatctcttcttcagtgaaaggggaatccaaccttaacgcgctctcttccgaaataggggaccaatcttcaacactccaagactctcctgtagggctcgcgtagagcttttcaaagtaaagtaagatctcctctgtgatactctcggcattcttcaacactaagcccctctcattctccaactccttgatatatttcctatttcgcttaccattagccactttatgaaaaaacttagagttacaatccccttccttaacccatttcaccctagctttttgtctccaatggatttcctccctcaaaattaattcctctagctccccttttcttgaggctctttgacttaacaatttagaagtgagaccccctgcctgctcaatggcatcaaagttagctaaatcattgaggatactttttttcttttcattaagctctccaaaagaaaacttattccactccttcaatttggctttaacatattgtagtcttctcatgaacttgtggccttcccatccgtttccttgaaaaccactccaccaatttctaaagttcttgaaattaggatgttgcagccacatattctcaaacctaaaaggtgttgggccccgcataaatgggttggtatccaaaacaattggctaatgatccgagatccttctaattagggcttcttgaaggccttggggaaagagctgccccactcattcgagtaaagaaaacggtccaatctcttacacacaggagactcttgcaaatttgaccaagtgaatgaagcgttccaaagaggtggatcaagcaattcacattctctaataaaactatcaaagtccctcatgcttgaagttagactagaaccccccaatttttttgaacttctccttatgacattaaaatcgccgcccacacaccataacagaaaagttagaccatatatgtcaaaaagttccacccaaaaatccttcctaagtgagggactgtttggaccataaacagcagaaatccaaagaggtccacaactgtccaaagtgaacttgactggaccgagaaagatcctattaccacctcctcactacgcagattttttgaatcccaaatgatcaaaatcccacctgatgccccacacgccggaagagtaatccagtccttatttctgactgtctagacactacccacaaaccttctgttacacttctccttttttgtttcctgaatcatcacaacatccggattctttgacctaaggaaatctttaaccgcccttcgtttattccttgaacccaaacccctggcatcccagctgataattttcatggaaaaacacatagaccctaaccttccgaaccaaatccaccaagtctcaattacctgtggagccactgttcttcctcttggaatacaccttaatgtccagagagcataaaacctctcgcactttagccattttcctaggggacaggccatcaataaggagatcgcccgatggggatacctcagtatccccttgactacctgacaaaaggttggaatcctccttatgcgagctaacattaggcttcctaggggtaaagctctcggacaactggtttaataaagcacactggttctcctcctcatcacggacagggatgtcaacatattttaaagagtcaactacgcctttttcaaaaaaaaatttagaaataacttgattttccgtaggagactaagaaagagagactgagttagggagatgtggaccagagggactcgacaagggagattccagactacaagaaggaaaagaagaagactcgggtggctgagaaggagagggctgacatacctccatgtttttcgctcccggaatttcgcaaatcccctaaagatgagtccacttgtgttgattgcccattcaacatccgttaacaaagctgcttaaccgtcatccctcattacctcatagaagacctccttctaatctcatggtttcacttcgcagaactgcctgtgctcaacttgatctaaccagcctgagtacagactatcccatcaaaatttccacttgctttttctttcctctcatatcaaggttgctgattcattcaactctagctgagataatcctgatttcattgaggagactcttgtcacccagctctttctttgccaaataagatgaattctggaggcaaaattgtagtgacctgttgcaatttgtatgattttccctgcttatcttctcaatttcttcatgacatcatttgatgctttaatcttgttcctctcattcaatactgtgctcagccaaagttcatttcttcttcttcttattgttgttgttgttgtttttttattttatttatttatttcataagcaattacagattgaaagtgttaaaaaacggtcaagcctagtgagtgtggtatgcaactaatcttgtagtacctaaaatatgtcaatattgtctgttaagcagtttcctaaaccatgtaaaccaatcagttttatgtcactgcaaacttccttgattagttttatttcagtctttaaagagcttatatatgctatttgaaattattgttgtcatggaagcatgtcttctacttccctaattaaatccttccttacttttgcagct

SEQ ID NO: 11688 - DNA, 4497 bp, Vitis vinifera
  Intron number 1 from transcript GSVIVT01029355001 (locus G SVIVG01029355001) derived from phytozome v7.0 (chr-ID chr1 7; pos 15114093 to 15118589)
ctgtgtccaaggagctcaacgccaagcactccaaggtatccttttcttttgttctatttcgttctttctgtttggttgctgagaaaattggaaacaaaaagaaagatgacaaatttgattttttttttttttttttttttgtgaataataatagatatgtaaaagaaataaaatgtttgtttgtttttggtttcctttccagcaataaaatgtttgctttcttaaaacacaaaagcaatgtttcgagattttccaaaaatgacctgtttttgagaaaatcacttccaagcagattttgtagacatgctaccaagtctgatttctgtattactcatatgtttatgcttttaaaatcagaaataactcctagggaaaattacaaaaaccactccaggactttcatcgtatttcaatttatccctaaactaatttctgaagcaacatcaaccctaatatatatccaaatatggagaagaagcttttctttttttcttttttaagattttctttttagaaaaacatttgtatgaattgaacatatctaaaatatcatatctataaacgcgcttgtcacatgtttagggttgacattgctctaaaagaaaagtttaaaagtcaaattgagaggtgaacataccaagggtggtttttataatttaccctagttcttatttccacctggaaacatgccccttaggctctctgtttatatatatcataaaaacttaatttgtgcttgcatgccaatttttatgtgagctatttatatttttatgtttattaaatcaaattggggaaatattggaaacatagtatttcaatccttaggaccagagattgaagacatatttatatatatattttttttatgcaagtggactcaattcttctttggttggggacgacaatgctcacagtaaatactatcactacatgaggtttggagaaaaaaagggcataaaataagtaatagaacacttcaactaacaatcattaatgaacaagaagaatagtagaaataaatgaagtgaatcacatatcactacttctattccaacattttgtattctttagatatgtttctaagaaaaatacacgaattatctcataagttttcgttcaaaatattgaattatgtttgtgtgcagccatggagaaaccagaataaaagattttattgacgaagactttttttgattctttacaatatgaatggatacaaaatatataggaaaaagaagaaatatgcataattggaactcctagaaatcagttgtaatatacatggaaatacattaaagaataatctttattttcctaattctgatcctatccttaactacccaaaaatattgtgtttaaatttggaaaaaatcttggccttaatttttggaggttaaagaataatctaagctgttttcctacactcctcaagctggtttgaaaatttcaaaatatcaatgagacctagcttgttaattggtagctcgaatgcttgcttgggtagatctttggtgtcgatatttgctagttattcattagttgacacgaaaggcatgcaaattaatccactctccaacttttctttaataaaatgtctatctatcttaacatgtttggttttgtcttcttgcattggattgttagcaatatttatggctgtcttattatcacggtagagcttcactggtccctcaatcttgatccttaattcttcaagtagttttcttaaccaaaggagctcacacataccttgagccacaactttcaattctacctcggtgctacttcttgccgccactgttttttttttacttctccaagttacaagatttccaccaacaaatgtacaataacctaaagtagatcttctatcgcctgcccaatttgcatttgtaaatgcttccacttgaatctgttcatcctttttgtataatgatacccggagttctcttgaggtattttaggattttgtacaaacttctaaatgctcccccttaggtgcatgcatgaacttgtttactacactaatagcaaatgcaatatccggtctagtatgtgacaaataaatcaacttcccacaagtctctagtacctctccttattgacattttaaccaccttcggtgaggccaattttatggtttgggtcaatcggaactttagtaggcttgcaacctaacattcttacttaccttcaacaagttaagtgcatattttctttgtgtgactacaataccagtctttgaacgtgccatttccatacccaagaaatatcttagaaggcccaaatctttcatctcaaatttatttgcaagttcctttttcaggtgatcaatttcatacacatcatctcttgtcaaacttctctggaaaatttgaaaaacatggtgtgatctgactgactttgtagatatcctgctcccttaatagatattgaaaaacaatcagaccaagccaaggagactgctttaatccatacaatgatcattataacctgcacaccttttctctaccatagttttcttcaaagctaggtggtaactgcatatagacttcttcttcaagtttgccatttagaaaagcatttttgataataagtgggtggagaggccaatttaaatttgcaacaagagacagtaaaactctcatagtattcatgttagcaactggtgcaaacatctcttgatagtcaattccatatgtctaggtgtatccttttgccactaatcttgccttcaatcaatcaatagtctcatctagtttgtgcttcatcgaaaaaaatccatttacatccaatatgagactttccttttggtagcttcaccaaaccctagctatcgtcgagatatcacgtgttgtagggagaagaagataagttctacttatctctggttgcatcgaatgcagtaaccaagacataaggaattcttaatttcccaaacttcataagttaggtttgtgactgttggggtaagtaaggtagcattaacatacttaaatttcccttttcccatcaaagagattttggctgactgagaccactccatgaagttttttccattcaatttcacaatggtaagattatcattatgtgagggagtttaagggtttgtggaggttctaccatgtttagaaaagcaagataagggggaaaaatagggttgaattaggctgtaatactccttaacaaaagagaaaaaaaaaaaaaaaaacgatcaacaaaaaaacgtgaaacaggataaaaataatattgcaatatatataaaaaaaaaaaaacaccaatgagtggagctaatatgaatgggtaacatcaagtatggatgaaaaacaaacacttgatgatagtctttgttgttgttgtttttttttttttttttttgatgaaaaacagaagagaatagaaaaaattcattaaggaaccgactcctttttatgattctttacaatatgaatagatacaaaatatataggaaaaagaaaaaatatgtacaactggaactcctagaaattagttgtaatatacatgaaaatacattaacgaataatctttattttcctaattctaatcctatccttaactgcaaaaaaaatattatgtttaaattaggaaaaaatcttggccttaatttccaaaagtcaaagaataatctgagctatttttctataatgtttttcttttttcctttctcaattgacttatagtaactaggataactagtgttagtttcctcattagagaacacattgaaaatcatttttttttttctgtgaacttttattcattgatatacaaattctaaatataataactcatttttccatgcttgtttcgttgctaacttcctattgagattcaaaaggtttggttattgtctttctataacacgtagtccatgccaataacttggttaacaaattagtgaaagcacactcatagaaatacatatatcttcaaagtgattccttgatgccctttcactttttaaaatgagcattttctcaaagcccttcttctggctgcatccaattcaacacaactgagaatctccttaactcattttactttcgattttctagcccctccaataaatccttaagctctcaatattttatatagttgtatacatatgtatccatgtgtgtttgaacttttgggtgtatgtaacttgtgttcaagtcttgatactttggtgtaacatctacatttgatgagtgatggacagatgctgctagttgtgaaatctccatatttatttgtttcaattgtttggtttggtctttgcaattttttttattgattggcctaaaaactttaactgttaggatatgggtccataatgcataccagatttacacattttattttatttcctaaagtttcattctttattttattatttattatgagtattgtacttagatgttaaatccaatggcaaagtggctcctgttttgtacagatattggagggtcttctcaagcagccggagaatag

SEQ ID NO: 11689 - DNA, 986 bp, Vitis vinifera
  Intron number 14 from transcript GSVIVT01000665001 (locus GSVIVG01000665001) derived from phytozome v7.0 (chr-ID chr 13; pos 20555518 to 20556503)
ggcgcaagattgctcatatccccagcatagaagtggatctcgatgactgatgaggatggcaagtttgaatcaggtagttgacttgagtctaaaatttgaagaattgaagtgttgaattagagagagatttgttatgattagaaaggtgagggcatatttattatttatagaaattggaatgatataaatagagataataaattgaagagaatgatactaaaatttatttatttaaaagttgataaagaaacatatactttgtattagtagaaagtgagtatatcccacctaaaaaacctatcaatataaactataaattcaaatctaatataaagtaaaatttttattaaggtagcaaatccttatattttgtgatatttataaatatgttaaattattcttttcaaattattaaaataaatttaaaaataataaaataattaattttacatatgtttttaatatataaatttaagtaaatagaaaataaaaattcattaacttttctcaaaattttaaaaattcaaggaagtgaagaattttttttcttaaattttaaaaataaaaagtaaagcattgtgtccaaactagtagtatttgttttttaattgaatagaaaaaattaattttttttttatttagttaaaaaataatttattatctaccaatataatgaaagtaaacttgttattaatagtttcggtttaattaagttaattgatattaatatgttatttttaattatttttaggtgaataaaaaaaatcaaaatatttgattttttctattaagggaaaaaaacaaaaatcacttaatattttattttcctttttgaaaacatctaaattaagaaaaaaaacattaatctaattgaaaaaggaagtgggaaaaggtggaaaaatgagagttgggcgattaaaggaaagaagcgagtagaaataattgaggcagtctcacgagtataacaaaaaaacaccaaaacgatc

SEQ ID NO: 11690 - DNA, 8106 bp, Vitis vinifera
  Intron number 4 from transcript GSVIVT01000853001 (locus G SVIVG01000853001) derived from phytozome v7.0 (chr-ID chr1 3_random; pos 3041438 to 3049543)
attgtaaagaagacgtaaaaaatgttgggatgatcatatgacgattgcacagaaaaatattttctttttcgccacaaatgtgggaggatcgactactccaaatgaaagtttttgttctcatgcatgggtagagccctttatcaatctgaatgtaaatgattgtatatacagtgttggaaccatcactactacaaaaataatgtattgtgtcactttttatggtgtcacttttaaaataatgatatcatatggcttaaaatccataaaggtgagacatcatataaaaattttcaattaggatacatgatattaattttaagtttatagtgttagttttcgaaaagtgataccatatataataaaaaatttaaaatattataacttaatgggcccactttgagaataatgatattatataaaaaacttattgtttccatatacccacaatccaaaaaaatctcgtttcataaccttaatcataattttcttttacctcttctcatactcatagttaacacaaaattgtctttccctatttcgtggactcttaggtaacccaaaatctcttaaatctatcattttcattttattttttagtaatttcaaaatctttattagcacaattgatttatattcatttatttggtatatctgtaatgtggattgtataaataatgtttttttttattgtgttgtaggaaagtaaaatttaagtttaacattccaccgtatcttttgtttcatagttaagcccataaaccccaaaatgaatgaaaataagataaatgaatgatttttttaatatcctttatacttagaataagggataaacattttactgtatgaaattttcttttgatcttataagaaatttcctttaatgaaactttttgtttgttttcaataaatattatagtatattgtgatgaggatatgtataagtgatatttgaaaaataattttttagaaaattattcatgatattgtcatctctcacaaaaggaaaaataaaatagttttcatatcatattagagttggtttgaaatgttggaattaacaatgataaattaaatttatttttttatttattaatgtaaatgaattgttttttaaaatttatataggaatgaaaaattttataatcataaaaatgatcaaatcttatattttgattttttttttttttaattcttttacatggtattatggttaatatcttatcttgttctattcatattttttctattcttaaatatgttttttgtcttttgtttttaccttctttccttattgtttttatacacgttgaccaaaatttagagtaatttgagattgataataaaatttcccttttaagtttagaaaatttctataaaatccttttattacataaattttttcaattccttccataaaactcttcattttttttttctttttaagaagatgttttataattttcttttcattttctatgaaatttcctttaatcaaactgtttgtttattttctaagaatgttatagtatgttgtgatgaagatattggttggtcatatttggaaaataatttttgagaaaattattctcaatattgttatctcccgcaaaaggattctaaaaatatgttttatttttaccttcttttcttattgtttttatatgcattgaccaaattttggagtaatttgagattgatgataaaattttccttaaaaaatgttaagagaaaaattagtatgaaaaagaattaaagaatatttcataaaaattattgatttttcagtcataactcctatttattttttctaattaaaataattaataaaaaatttggatatgaaaatatgttcaaataaaaataataaaaaattaaaaacatcaaaggaaaagatattcaatattttaaattttttacttgtattattctttagattaataaattatcaaacatctttttcaaaaaaacaaaaaagaaaaatgaagaaaaggaagagttttatggaagggattggaaatttttttataatgaacgattttatgaaaatttcctaaccttgaaaggaaaatttcatcatcaatctcaaattactccaaagtttgatcaatgcatataaaaacaataagaaaagaagacaaaaataaaagtatttttagaatccttttgagagagatgacaatattgagaataattttctcaaaaattattttccaaatatgatcaaccaatatctttatcacaacatactataatattcttagaaaataaacaaacagtttgattaaaggaaatttcatagaaaatcaaaagaaaattataaaaacatcttcttcaaaaaaaaaaaaaaaaaagtttatggaaggaaaatttatataataaaaggattttatagaaattttctaaccttgaaagggaaatttcatcatcaatctcaaattactctaaattttgctcaacacatataaaaacaataaaaacaaaggtaaaaacaaaaaacaaaaaacaaaaaacatactttaaaaatagaaaaaatatgaatagaacaagatgagatattaaccataataccatgtaaaagaattaaaaaaaaaatcaaaatataagatttgatcatttttataattataaaaattatcattcctatttaaatttttaaaatcaattcatttacattaataaataaaaataaaattaatttttcattgttaattccaacattctaaaccaactccaacattatatggaaactatttcatttttacttttgtgggagatgacaatattgagaataattttctaaagaattatttttcaaatatcacccatacatatcctcatcacaatatactataatattcctaaaaataaacataaaggcccattaaaggaaatttcttataagatcaaaagaaaatttcatactgtaaaatgtttatccctcattctgagtatgaaatatattaaaaaaatcattcatttatcttattttcattcattttggggtttatgaacttaacaatgaaacggaagatattgtggaatgttaaacctaatttttactttcctataactcaataaaaaaaaactatttacacaatccacattacagatataccaaatcaatgaatgtaaatcgattgtgctaataaagattttggtgttaataaaaaaaaatgaaaataatagatctaagagattttgggttacctgagaatccacgaagtagaggagagcaattgtgtgttaactatgagtgtgagaagaggtagaagaaaaattatggttagggttatgaaatgagatttgttttggattgtgggtatgtggaaacaatgagttttttttttatatactatcattattctcaaagtgggcccattaagttataatattttaaaatttttattttatatggtgtcacatttcgaaaactgacactgtaaacttaaaattaatatcatctatcctaactgaaaatttttacatgatgtgtcacctttatgaattttaagtcatatggtgtcattattttaaaagtgacaccataaattatttttgtagtagtgcaaggggtacaaatttcagaaaaataataacgcttttgcccactgtttttttcacttgtttttggccatttgattaaaacataaaaaaggacctgatttagtagtttgtttgcttgctcagcacttcttaggttactttgttttctattttctgtttttgtttttctctctctattcgtggaggccatggggtcagaatttaaaatccattagggaggaccatgttattgcatggagttcgaggagacttagggatgttggagaatttgagatgggagaggacatcttttggtgagcatttttttggagacaaataacattgagactttaggggaaaggggctaccaaataatgaaagacacgacttgaggactttggagattaagatgactctctagatgatggcatggaaggaagaaagggaggatcttaaggttttgactaatggctacgtggaggtacttgagatgagtaccagattattgttagaaacttctagcacacaacattagtagccactttttccacttagtggagagcttaatgaagaagaaaactcattgttgaattgcaggttgttaatgggggcttgaaaggtttaatttaaatgcaagtttgtggccatggagatgagatgaatttgtggcattaacaattcaaatatggtggctgcatcatggaggatatatgattgaataaagtgaatgcaatatggaacttttgtggctgaaaatttatggagaattaagtttaaagattgctgaattttattggctgcaagtaaggaatttcatgatggaggcacgactatggatgcagaaaatatatattttttttttattcactgaaagtggagttccattcttccaattgtgcttgctgaattttttatcgttgttagtggattcttggaggcagaatttcggtcgaaaattaaggggaaattgtggctccataaatgaagattcttgtggatgaaaattaagaaagttgtggttgcataatggagaattcttgtaattgtttaaagtggatataatatgggaagtttaatggatgaaagtggccgccatccaatggttctctggtggctgaattttttattgcaaaatcaatagaaatgcagccatgaattgagactacaagtgatggctgcatgcatgcgtccatgattccatagctgaaaattcagtgtggttcaagtggaattgttgctgcatgtgtgcgtgattccatggctgaaagttatttataattcaagaggaaaagtggttatatatgtgtataatctagttgttgaaatttaaagtgagttaatcgatgcacatggcttgagtttggcaacgtgaagacaacatcaatttcaaaaaaatttgaggtaagtttcaaaagttgttaaattttaattttagtttttagattcatcctatttgacttatgtgtggctttagtattttatttgattaatttatttgattccatgtcattatcattgattccatgttattttgtccatatattgagtttgttcacgttgattcttaattggtccaattttagatcatattttttctagagtttactagttttagtgaactcttgttattatattcatatttttttaagcttattaactttagttttgattcatcatatttagtctgtgtttttttttttttttttttttgattagttttgttaaactcatgtcaatattttcatgttctaagttcgtttggttttggatccatcgcatttagtttgcatgtttactagaattttaattgattagtttagatgatctcatgttatggctttcatgttccaggcttgttaactttaatttgctatttatcatatttcaatttacagttttttgggttttcgtaaattaatctaatagatcccatgatactaagtttatgtgttcctctcttagtttacttgcttttggaattttggttattattttgattgatcccatgatatttaatttgtagtttgagttaaaaaaaataattgttttgaatcgaatcttatttatttgttttaacattttcttgattcaataattcaaatagaatatttgtttgagttgtaatccttttaaaattatctaattggtttttttggattgagtaaaaatcattttttctttttgtaaaaataaatttccttccatcatcaatgaggctccttgattccaaataattaaaaggtagcaaaaaaagtgatccaagttgattttctcttgttctcaaaaccatttgaagttataaataaaaaaatgtctattttgtatcaatgttttggatttattgattcacatggttccttttgctttcctaaaatcatttttcaaaggaatttagatcatttaaaaaactttaaagaaatccattctagatttttaggacaaagatctcactttcttttaaaaatatgcaacttagttttatccaagttgcactcttttttcttggttttccaaaaacttttttttttcttaacatatgtttgaacttgtggtcccaagctaatgagaatacacaagttaaatttatggatattgaatggggacttgatggaacctcaacataaaagaatctttgcaaaactcatctttactgctacttttgctatttgttgtaatcataaccattaattttctctagaaattatgtacaagatgtatgtgataattaatgattctatatactctgatcatttttgttatgctatttagacaccaagcatgctaggatttatttcttttattatttattactataatttttatctaatcctccatgtcttatggaaacgcattataagttatcaatgttattcaggtacacttcttaccttcacatcttaattccataaattatgttttgatttatgtacgatcagagtaattttttattagatcctatgtcattatcattgatcccataaattatgttttgctttatgtacgatcgttatgtattactttgaatgtgattgtcaacatgtttaacacatctttttttttattgtttgtttgacttgccatgtatgattaagagactagggtaaattacatgtttcgtatcttatttttttaactaaccattgatgtcttatgatagcgcttaagttgcgtttttactcatactattatttctttatgattgtgctttgaattcttgtttgacatgatagtgatagtagaattttgaaatcaccttaggccatctaagtatccatgatcaacttactaattgccagatttcccccaactaagctagaagagacctcgttagggcatacagaggtgctacctctttgaaggtaactttttaataggtaactttttaataggtaacctgatcttcggaccaagacctaggttttttagagacaagttttccaaaaatcaagggtgggttttgttcttacttgatttcctttttaaaaataaataaaagtaagtgatgacttcaagtttttacaaaaataaaatttttaaccttaatcataagcaggtctcgccagtctagtggggacgctcatagaaaatgcggcaacgcaattacacttacacagattttgatgaagagttgaaggcacatacatagtttggaaatgaaaattgattattggaagatgaatacggtggataaaaaggagtcaatggtcctggttttcttgaaaagccttttcaataatttcaattatggtttttacgagtgggaaattagaactaatcttagaaattgcaagtaatagaatggttttgtagaagatttgaaggtaaatggtattggataaggttgatgttaatttatgaaacatggatatatattttggtctgaaagaaatgtggataaacattcgagacatttataaatcagttattgcctaacataaatatctaagtggccaaaaacaagagaattggagttttgaatgtctaaatttggaaaggatgtttctctaatttatttatttatttttacttcattgattgtaagatgtgtaggattttggttgtagaggggaaatttcttgaagtaaaataaggggacttaaaattaaagcatcaacccatccaacctaatattttccacactccttaattaaatcgccaacaacctacttaaagaaaaactactttgtaacttttattttgccacataaagatcttcaaaatcccctctggtcccaactcacaactttcgtgtcggcattacctgtctaatttatccagagagtcttttaacaattttagaaaaatctcaaattagtgaaatgcttgactataaaattcacacttctggatttgtaatctcgctcattcaattttcccactctctttgtatctctttaccgtgagttgaacttcgtgtcttttggtttttccttttatgtggtgtgattgagtttattattgaaaaaggcaaagatgacaaagatcgaaaaggttggtagctttgaatcgaaaatcaccgtttatgtggtagtttgttgggttctagcggcctgtggaggcctg

SEQ ID NO: 11691 - DNA, 6530 bp, Vitis vinifera
  Intron number 7 from transcript GSVIVT01009717001 (locus G SVIVG01009717001) derived from phytozome v7.0 (chr-ID chr1 8; pos 10738888 to 10745417)
caggattcagaaaaggagggtgggataaagtggaggtactatcctttctcttatggcctcttctttaaatcaatgattagctagaggagcaaagattttgaaccatcttaaccgcttaccaagttacatgacatagaggcttgtgacaagttattaaggtgcatgtttttcttcagtgaatcctccatggatggaggaagatgctggtttggcattgaattgaaatcctttttagatttcaatagagctggttgaagaaaaggcagtaggaaaggttgtggagaggggacgttttcctcttggataagttttagctagaggggccttgctttgttgctggagggtgtggaagcttgctgtgagggaaaaacccaaaagccctttagccctttaggatgatttggaaaggaggaggaaggaattataaactggaactttgcagcagcatggtaggtagattcttgctatgttcagtgttatcagtagacaagaaaagtttttcttcagttttcccacaaggcaggggcttcccaagaggatggaagactcaagccaacaaattgaggagtattgaagttgttccactacacaagcactggaggcatccctagtggctgttcagcagttagggagagtgacaagggagtctctcataagggagtcttttttttttggtgtaatctttggccatggcccattttttttgtagctcatggcccctcttcggttgtagattttgtggattggatgaggtcttgttgaggggtgctttttttggtgtttttctttgttttttgaaggtgctttaggcgcccattgtatactccctgtatactttgaaacgcttttctgacgcttttttaatacactatttactcttaaaaaaataagggagtttcatatgcagaagtggtgaacataggtcaaaaggaggtgagtgacatggtttgtatttagttttgcatggaggagcttaagaaaaatttggaaaccttgaaaatttgccttatgggtagatggggagcttttacagaccaggtgcccaacttaggtcctatgaaaagttgggcttgatacaattgatggctgaaaggaaacctccatttggccttgctgggaggttccctcatcttgtttgagtttgaaagcatcattgaaactgaaagggtgtggcatatgggtaacaaaatttttacaggaaagagattgcaattggattggtgcagctagaagctggatgtttcaagaaaggaatatttaccagaaaagcttgggcaagagcagtggggttaccattgtatttgtggggaaatgagatttttaaaaggttgagtgacacttgtgggggagttgtggcggtgaacaaggatacaccacctgcaatgggcaaagatttttgttagattcaatgggagaaggtgcttgagattttgcgttgtagttgagtgatccgttatcaccattcagctatgttggggagatcctgcccatggatgacagtggtagcttcaaagtaaagtagcagagatttaaagtttagggatgaaagggatgggaggcaatgttttggtgggagagtggaaaaggatgatgcaaagtgtgtcaaaaggggcatatggaagagacaatatctttccaaatgagggagacttggttaaaatacatgtccagcttaccaatttacttcatgttttttgtttgtcatctgaaaagaagtgagtttaaaattcaaacaaattcaaagaaacttttgctgggggcgggctgcatcaatgaaacacctcatctggttaattagtccatacattagaaatttctatactctaaacaaggctctccttagcaagtagagtcgaagattcactactaagagagaatccctatgtaaaggtgttctagcacaaaagtttagggaagaagtcaggggatgatgctcaaagggtgtgagggatggttatggggtgagtgtgcagaaggctattagaaatggatgaaagtcctttatgggtaaatcgtgtcatagttggcaatggaagaagagtcaaattttagacagatggatggtgtggagacttatatttagaatagtccttcctaacattactttctatagctagcaataaagattcatgggaagtataaatgtggaagcaaggttgggagggaggttgatggaatcctcgcctctcaagacaacatgattaagagattgaaggagtgacaaccattttatagaatctatagaagagttcaatcacaaattaggaggatggcagaatagggtggaaggaatccaactctggcaagttttcatttaaatccttctacgactccttagatcaagaaagaagagggccttttcctacaaacatcatttggaatccccgagtacctgtgttggtaggattctttgcatgggaagcaacatgggaatagattttaacaattgattagcttaaaaggaggagacaggtgatgctaaataattgttatatgtgcaatgggtgggtcatttgctactccattgccttgaagcatggattatgtggcaattggttttctctttgtttggtgtggcttaggtgatgcaaataagagaaaatctcttgagttagcttggatctttcgtgagaaagaaacaaaaaaaaaaagcttggaagagcaccctatatgtcttttttagacgctgtggaagaaaagaaacaagaggtcttttaaagacttagaacagttggaacatacacttaaaacttcttttatgagtgcttttttagaatgagttagagcgtacataaatgattattctttgacaatgatgggttttgttgattggcttggctctaaggagtgggtgcttgttttttgttattctctcctcttcaagcctttttttttttctgccaattatatacatcgtgtgtactttgttgtgtcatttatttaggtggtattaatacatatactctatttgcctaacaaaaaatgacgtcaatgttttatgaaaaggaaaaactgaaaaatcttttgtgtgcactcaattatatgatttcccacaggtgtgtcggatatcttatcttacaaaagtatatgatggcaccacctagcttgttgctaatctgatgctttctaacgcaagtggctaaccatgttttcatggccactttgatttgctgaatagagttatggaaatatgttaatcattactagaatggaaaaagttaggaatcaaaatcataaaatcataaaattcttttccattcccattttagtatttggtttatgtgagaatagaaattaagggtttgttagataattgttcttgaaaatagttttctaacttagaaaatatgtttgacaaaatttaatagaaaataatttttcataatttgttttaaaaacatgctattttttagaacaaatttaagatgtttttagttgttgttttttaagttctaagcaacaattggaaaaatggagaatattgtggaaattttgcactatatacaataccttcatggaaaataatatgagagaatggtttcatatttgagttcttagatagaattttgttcataaaaaccatttttaagaattgttttagaaaattgttttctaagaattgttttaaaaacaatcggacaaggctcatgtaaatttgaatgcaaatataatttccaatatatcctttcaaacccatctataccatatacgaaatctctaaatatctacatgaacttataaaataaaataaataattgttgtacaatttcttttccataaaataaatcaaatagttgaagataaaaatagtaatcagccatatgcgagtccccctagagaatcttggaggttagaaggtttagattggtcacccgtttcagtaaagaatgattccaagttggaatgtgcctttattgaggaagagattcatcaagccatttttcaggtagataaggataaagcccctggccctaatggtttcactattgttgtgttccaagagtgttgggatgtgattttggaggatctaatgagggtgttctcagagtttcatagaagtgaggtagttaatcagagcacgaatgctaccttcattgccctaatgcccaaaaagagtcggaccaaaaggatatctgatttttgttctttcagcttggtcacttgtttgtataaggtcatagccaaagtcttatcagcgcggttacaagatggtctgaatgaaactattcatatcatacagggagcttttgtttagagaagacaaatattagacattgtgtcgatagccaatgagatagtggatgaaaaaagatgatctggggtggaaggggtaattttcaagattgattttgaaaagactcatgaccacttggattggggtttttagaccatgtacttgaaatgaaggggttcaattctagatggacttgtatgagaggttgtttatcctctgtctcttttgcagttatagtaaatggcttctcaatagggagtcaacttccttctcaaaccattccataggcaaacctaagaactcgctgaaggagatgaacttcttgaaagccacataggcacagtccccgtcgggctcctcatctttcccgcccaccaagtttgtcaatgggcagccctttcttgattcaacctcattatcacacaagactgggtttgtattcttgtcaaagaaaggaggactcactggtaagtccagatccaaacccttactgagagacaaaagagaaagcccacaaccctcaacggctttcataaaaacatacttatatttcataaaataaagaagagactggtttgtattcttgtcaatggaaggacttactggtaagtccagatccaaacccttactgagagacaaaagagaaagcccacaaccctcaacagctttcataaaaacatacttatatttcataaaatgaagaagttaagaagaagaaaaagaagaagaagagaaagcccacaaccctcgtggctttcataaaaacataaactccattattatgtactacttcctatgtcaggaatttaaatctttggaaaattatggtgtgcagtgcccaggaaagaaagtcaactttaatttttaatattcataactccattactatatactacttcctagtcaggaatttaaatctttagaaaattatggtggggaagatctcttaagtggaaaccatgggattgtttgtatttcatcatatgcatgtcacatgtaccaacctaaaatagtcaactgttctttgctaataaatagtgttgataacattaagaggagtgggggggaatggggcaaccaaagtacaggtgaagtaaatgattttaaagtttctccctttttgtaaaatgatatgagaaatcaaagaagaacaaaaaaaaaagaaaaataaaggttggggttgcagggaaggaaagaaaagatcgatccttggcaatgataccaaggttcttaggtaatcaaacctaggtttcctaagcaattacactgatgaagaagacaatcactctcttaaaaggaagcatgataaataatgaaacttttatcaaaattcttgttctttgtatggattcttatggactcttttccttgctaagacgattttcctaattccttatatttccttacaagaatgccaaaaaatataagaaaggaatattatttataagtaaaaggaaatggagcttctccaaacagaacaaaaataaaagaaatagaaacttaataagaagtaaaccactacctaaagtagaaacttgataaaatactggactaaaactatgaaatgctagagttactattcctgttgaattttttctcttttcttttgtaagttatattgtttctcatcagaaaaaaaaagtaacctagaaccaaaacttacccccacaacagaggctaatatctcagttcctggactggtaaaaaatagtgtaaatagtgataataatctatttacaacgatggatatgagggccaaacaagctctataagcttccaacccaatacttttgacatcctcaaaacttctctcttctttccacagttacttacaattctcacattatggaaactatggaattgcctgccaaattttccattatcatctgtccacaaacttattatgccagctaactgtcagcttcaaggactttagaacatttcaatggacatggataaaggtaaggggcccaggggttcccaccaaccaagcaatggggcatctaacgatccacagtctcaccattctctttacacagaggcattgatttggaatggcattgcttattataacaagctgatcaatggtattattgaagttataatatatactatagctcagatttgtatctggatgtggaagattgttttgcagtcatgcttgcaagttagtctttctttcagttgaaaggctattcatttgacttgaggattacataatgtatacggttttatctaattgtccatttattgtaaaactgattcttctgtggtgttgccctgcagatttatttcc

SEQ ID NO: 11692 - DNA, 8684 bp, Vitis vinifera
  Intron number 1 from transcript GSVIVT01033227001 (locus G SVIVG01033227001) derived from phytozome v7.0 (chr-ID chr4 ; pos 10021764 to 10030447)
gaggaccgcccacctctacgctcatcgtctgtaaccccctcctcttttcgttttcctgccttcttctcggcaaccaaatggaggtttttttgacttccaactgaactgatgttagattcatgctttctacaatactatcttcttgttattatgcgatattggagtatttcacatggattacgaatttgattagtgggtgattaaacaatccaatgtaggatccatatcgattgatccttcacacaacagcgcctgcttgactattatgggattctcgaagaatcccagttcaattttttgttggacaagttgatacggctctgtatttacttgatttttgcattccagatgtgaaatgttccccatttgtttcagaacagtgacttggcccccatcgattatcttctaccttcttgggaaaagacccagaattcttgcaccacattaattatttaggccatttaatattgaatttatgtttacttgattattgcatattgaaatatgcctcatttattcattgattatcttctttctttggcaaaggacacagaattttctggagtctaagtatgattcattgagaaagagctcattgatttgacccttgaatggggtttacttcatcagtcctagagtgtttttattcagataggagaattttccccatttttggcccattaattatgcttttgcctgaagcgattcttgctcaatctggatcttgtaaatattatgaaaaaggaaaaaataataataatatcaaatctggcctttaggaattggctaatttggctttttctgctttgtaagaacaccggagatgtacagagtttcatgaactatcacggggctctaatttgtcttatgctgctactttgaaactgtagggagagtaactgagtagagatctagacacgaaatagacttttcagaaagtgaatttgtcttatgaagagaatgaattttgcatgaatggtattcattggtgtagagaactgtcaaatggttcctttctcttggcaactgatgagactgctaatggttcttaggccagaaatcttgtagaaacaatatctacgataaagtggtgattactgtgttgatcatggtttcttctttcatggatgatgtatttggggatagccttatcttgttatttatcttactagcatttagttttagatgacaatgaaggaagtccattatgaatccaaattctacataggaatctcatgttaaatcatatgaagaaattatgcttgacatttctatagaaagggaacaaacctaagtccattgtgggtgctgaaggagtatggatcttctaaggcgatagaggataaaccacctttctgtattctctctgtgatgggaggcaggagggggaaacgatctgtcttttgaaaagtgaattgaattttcaaaaataccctgatgaattccttaaatatcaatttcctctatgccttagggaccataccctttggatattgggccatatgtgtcttaggcccatcatctgagacacatatggtattgggctctacacataaggtggcccatactttacaacaaatagaaattaaatatgtatatgcgaatagcttaatcatgaactatgcttcatatgtgtgagtccatagttattctaacaatctcctacttggaccacatatattaccgaacaatgttcatgatagtactttattgagctcatctttgctatcctatacaaatatccttaaacaattcggcctactaattatgctaacacaggattaaagcggccttcgttaatcacaatataactagacccatcaatgatcacaacattaacaaaattagcaacatagatcaagtatggatgtatagcatggaaattacatagaatgtgatatttaatgtctatttccaattggtcctactttataactaaaaatagtcaaattccactttcaacacttgatgctaaactgattctgaaagtcatcatttcaattcagagtattcaaacactatagtctttaacatcaaggtctgtacaaataacacaaacataacaatacttcaagaaaacaaacacaaaacctaaatacaaactcccactatactagcacatcatcaatatgtacaatacccatatgtgtgacatgctcatgatatactttgggtggcaaacccttagtgagcggatccacaatcatggagtttgtgcttatgtgttcaattgatacttgaagactttgaattctttctttcacaaccaagaacttgatgtcaatgtgtttcgactttgacgaacttcagttgttctagaatacaattttgcggccttgttatcacaattgattctcagtggtttctcaatcccatcaaaaattcgtaactgagtgataaaattccacagtcatatcccatggtttgatgcctcgtagcaggctataaattttgcctccatagtggaagaagcaataagtgtttgtttaagacttttccaagaaactgctcctcctgccaacatgaagatgtagcctgaagtggatctcctgctatcaagacatcccgcgaaaattggagttcaaatatcccacgatttctaaatgactggatcttcgatatgtgagcatataatctttagttctttgtaaatactacataacccgttttgcctttttccaatgatccatacttgggttactcaaatatctgcccaacattccaacaatgtacgcaatatctggacgcatacaaacttgtgcatacatgagacttccaactgccgaggcatagggaaacctccccatatccttcttctcaaattcatttttcggacattggtgcaaactaaatttgtcgccttttgccacaggtgtgtctccgggtgcacaattgctcatgccaaacctacttaacaccttattgatgtaggattttgtgatagcccaagtatacctcttgaacaatccctatagatttgtatacccagcacaaaagatgtattaccaagatccttcatgtcaaatttgctagatagaaatcgtttgatttcatgcaaaagttccatatcactacttgcaagtagaatatcatctacatatagcaccaagataatgaatttgctcccacttgaacttgagatatatgcattgatcaacggtgttctccttaaaaccaaatgaaataatcacctaatcaaactttcggtatcattgtcgggatgtttgctttaaaccatatatggacctttttaatttgcatacaagttgctttgaatcattagacacaaagttctccggttgcaccatgtatattgtctcatcaatgttaccattaagaaacgcagttttaacgtccatttggtgcagctctaaatcataatgagccacaagtgccatgatgattctaaaggagtcctttgacgaaaccggtgaaaaggtctccttataatcaatgccttctttttgagtgaaaccttttgcgattagacgtgccttatacctaataatgttgccttttgaatcccatttggtcttaaaaatccatttacaaccaatcggttttacaccttcaggcaactctactaggtctcaaacaccattgtctttcattgatttcatctcatccttcatggcttctatccacttttcagagtcaaaactttgtttgacttgactaactgaaattggatcatcttccagactcatgtcaaattcatgttcctggagatatacaacataatcatctgaaattatacttctcctttctctagtggatctcctcagtggcacttgtacttgaggttcttgagttacctcttcatgaacttgaactggttcctcaacttgagtaggaggaatttcaggtgtgtcttcaatctctgttattggttgtacattctggatagtgttatcaaacataatatgaccatgtccagttgcaataataggaatactaacagattcctcttcaaagactacctttcttaatgactctctcccacttaactcaacatcctcaatgaacttagcattgcccgtttcaaagaaagacctagttgagggatcataaaacttgaaacctctcgaccttttagaataccctacaaagtagcagctcatagttctggagtccaatttcttttcatttggcttgtaaggcctagcctcagttggacaaccccagacatgtaaatgcctaatactgggtttcttactagtccataactcatatggggttttggctactgctttgcttgggactctgttcaaaatgtaaactgtagttttgatgccccaaagtgattttagtaaggtggagtgactgatcatacttctcaccatatccttaagagtacggtttcgcctctctgctacaccattttggcttgaagtccccggtagggtgtactgaggaacaataccacactccatcaaatatttggcgaatggccctggatgttgttcaccgaatccgtcatatctaccataatattcacctccacgattagatctaacggcctttattttcttgcttagttggttctcaacttcagctttaaaattcttgaacacatccaatgattgagatttctcatgaatcaaataaagatagtcatagcgtgagtaatcgtcaatgaaagtgataaaatattgttgtccattccaagaaggggtaggaaatggaccacaaatgtccgtatgtatcaattccaagacgtcaccacacctgttgacatcctttttcctcacatttgtttgtttacccttaatacactctatacagacttgaaagtccgacaaatcaaatggatcaagaattccttctgacacaagcctttgaatatgttgatttgaaatatgacctaaatgcctatgtcataacattgatgaattctcatttgttaattttcgcttaatgtcataattacttaaatgcaaggtttcattaccattagaggcttttatgttcaatttgcataatttgtctgttagactaccagtactaataacatttgaatttagataaagactaaccattccatttctaaatgaacgataatatccacatttgtccaaacatgaaacataaattaaattccgtttaaacgacggtactacaatagtctcttctaaatctaaagtacatccagagtctaactgtaatctaaaaagaccaataaccttcactgcagccttgttgccatttcccacatagatgtatctttcaccatcaattagcattcgactccttaggcaaccttgcatcgtgacacttatgtgagtagttgcacccgtatctatccaccaagtgtcaataggcattattgctaaattaatttctgaataaacaaggttgagaagtgtacttttcttttcacaccaagcagcgtacttggtacatgttttcttcatatgaccagccttcatgcaaaagaaacaagtgatctccttatcttgtttcttctgcaccttttgcttagatgccccagaaaatgcagtttgttttcctttattgtccctctttcttttcttgctggtaccatatccctgagatgtggaaaccaagtgagcactttctatcttctcttgtttcaatctctcctcctcttgtacacactgagcaataagttcattcaaagtccatttttccttttgtgtgttgtaactaatcttgaatggattgaattgtgtaggtagagagattaagaccaagtgcacaagtatgtcttctgacaactctaactttaatgccttgagtctagtcacaagattggacatttccaatatatactcccttatattatctttccctttataccgcatggagacaagcttactaagaatagtgcttgtctcaaccttttcgtttgtagcgaatcggtttgctatctggtccaagaatgtcttggctcaggtctcctcaggcattgcaccccttatagcttctgaaattgagtgtttcattatcattagactcatgcgattggatcgctcccatttttccatagcaaccctttgctcagcagtgttaacactagtaaggtctgcagggcgatcctctcttaatgcatagtccaaatccatgcacctgagcacaattataacgtgctccttccatttcttgaagtttgtgccattaagcataggaatgttattaacattagcagatatagaagatgtcgaattcataacaataaagctcataatcagccataaaaaatatcatatatatatgaataaataaaaaatttaacatatatatatatatatatatatataaatgcatgtgggcctattacaagataccaaacaaccttctccgatcgccaaatgacgccaagaacggcatcgcaggccaaaatggagacgacgtttgcgggaaagaacgtcacgggcgtcgctctgactggcagaagggcatcgcaggcagaaaacggtgcgaaatccaccggagatgtgatctagagacggcatcggcggtgcaagcttctaggatcgccaaaccggcgctaaaacagcccatttgaatggagtcacgacgtcgcaagtaagccagcggctaacgacgtcgcatggaatgccagcggctgacggcgttgcatggaacaccaacggctgacaacgtcgcatggaatgctagcggctgacaacgtcgcatggaaccgccaacggggacggcgtcgcatggaacgccactttcccgctttcaagcagtcagaatttttttttattttttattgaaaggcttgtttaggactccagtttcccatggcatggagtcttccagttcagtttttttttttttagaagattgtgtgaacttttcttatttattaattaaagaagtatgtttgatttccgtataagggtttagatcaaaccaaaccccaacaaccccacccaaaagatgattttgtaggatttagaaaatgaaccctgaaaaattcccagattctgtcaagttattccttgccctaatatgtcatatgggagaaaagtcatgtatgtttgaattaacaggcatttcgaaatgattcaacatttgtggctctgataccaattgaaggaaatccattatgaatccaaattctacataggaatctcatgtatgaagaaattatgcctgacatttttatagaaagggaacaaacctaagtccattgtgagtgctgaaagagtatggatcttctaaggcgatagaggagaaaccacctttctgtattctctttgtgatgggaggcaggatggggaaacgatctgtcttttgaaaagtgaattgaattttcagaaataccctgatgaattccttaaatatcaatttcctctattgccttagggaccatgccctttggatattgggccatatgtgtcttaggcccatcatgtgagacacatatggtattgggctctacacataaggtggcccatactttataacaaatagaaattaaatatgtatatgcaaatagcttaatcatgaactatgcttcatatgtgtgagtccattgttattctaacagacaacatttttgaagcttgcatatactgttatgatgtattctccttaagactttctgtttatctgttcatcaaagtccattttttttccttttctagctaattcccacagatatacaagattttgatctatatgaagatctactggggaaaaaattatttttcttcttgagccccttcatcaaaatcagctctgatatttaggaaacttatcaataccagttaaatatctgttgatgctttttccagtgtctgttatttatgaagtaaaatctacatctgactgccaaaaaccttcatcacaaggatgacaaccatatccccaattttctactttgtttcagaatgagctctgaaacatagatgcgtagctctttcataggcatgccttttgctgacattataatattgggtgaaatttactagactacatgtaatgcttattttaaagcaagagagattaaatggcccataacaagctggtgaatgcataaaagattgatggtcaaggagtttcagattacttatagaatcagaggatgataggtcaagtggtgcgttgcctctggattgtcacgatgtcaagttgtaccaatgaattggaggaaatttttaatgaagctagtacaggaccaatcgagtcttatgatagaaattgtgggtggtgaagagataggaggaccaatgaggtgaatgggtagcttggattagaaggtgataattttaagatgaatgagcaccttggactagaaaaagattgtatagaaacaaatgcatttatgaaacaaaagaagcaacacttacaggagatcatgatgagagcgatttgttaaatgaaggatattcactggacaaatctaaaatctcattccttcttttttcttttccttttctttgcatgtgagatgatagatggttaaattgatcaacttactgaactaattgttacttttcaaattgcttatttctactctactcaagtacttggtaaaattacccacacagaattcttatccttttttttttgtgtccattctccctatggaaaactttttatggttgccccttcttgaatattttgacttttcaattcaatatttgaccacaatatgtcttccatttaacacagggatatatattggggaagaaaaagtgatccacttc

SEQ ID NO: 11693 - DNA, 2138 bp, Vitis vinifera
  Intron number 1 from transcript GSVIVT01029733001 (locus G SVIVG01029733001) derived from phytozome v7.0 (chr-ID chr1 2; pos 13878106 to 13880243 reverse strand)
attgtgagattgatctttttgaatttcttactcaggtgagtttcatttatttcatgctttttgaaagtgaaatggagaagttagtctaaattgtaacaacaaatgatcatgcaatttgtttagtaaaaagaaaaaaaagagaggaaaataatagaaatagagtgcacatatctacaacattatgtgcacaattagttgtatataatagttacttcatttatgacttggaaatcatgttctagtgcaatgttgatagaatcatatattttggtttgtttgtgtggcaatgaagttaattctgtaatgacaatatcattggaattgatatcactaatagtgcaaaattttccaaattgtagaaacatacatatgtatattatcctattgaaactaatggtgaaaaatgtaattttcctttttaaggccaaaaaagaaaaaagataaattttaccaaaagggggccacatgtcagatatgtagaagtaaatagagagtgaccaagggtgagacaaagagaagatagacaaggaataaagaaaggctataacccctagccctcacccaatccataaataatatccaacaagagaaaaatctacaccttgactaaacatagagagacttgaagaaagcctctttcagccactcataagttctgcacatttcaaaggcaccaaaacaaggtctatcaacagaaaaaaaaaaaaaaaaaaagcaccaaaacaagtacaaaggggctattctccataccttcctactccacttgcttactccctcaccaacaacaagccctgtagagggagggtttcctgttagtgaatgggaatatggtttgcagcctcctactggtctttgcttaggaagcatttactaagcctggtctatcccctgttcataagttggtaaaatgttaggattttctcctaaatagttagccaaacaacaaaaaatgccccaagggccatcgtttaacctcatactccctagtaggaaaacaaaatgaacactttgaagctaaggaggcatagaatgatttgacaaagaagcacccattcttccaaccccatcatatcaatgtctacctactaaccccttgaaaaccattgcttagatttgctaaagagagttatttaccatcttggtctcccaatcttagaaagatcttaaaaaacaaggaatctaatatccttacctatccttggcctaaaaatttgctacattatcatttttatgggaagcaactctaatataaatttcttgagaaggggtttgcaattgcatataaaaactctcatatttcctaaacaagaaaatttttcttatttatttatttgttttttatttttctgtaaaattctctttcatctttgacatatattagtattcctaaggtcttttaagttaaaatataggtcatgattaatcaagtcgaggaagcttagttatgacctatatttttaagttaaattatctaatagtattcttgaggcctctaaaccactttccatacctagaattgattgattttttttttttttttttttttttttaactttttctatttgcataacccatgagcatgacacggcttctttaacttgaattatgtatgcatggtattttatttgacatctgtgcatgcatattggtacaaaatttgccaacataactttatgggctaaaaatcctagttgttctctttatgtattctaaacatacatcaataagtcatacatatatacatgccattttgtttaaatattggtaattttgctaaagagttaaggaaaatggtttgatttcttgagcttcagctctgttgagtacttgtttgatggttttctttgttcttgtagttgggagccacttttttaggcttccaatcccgtcttgattgtagaatctcttatcctttcttgtgcacacctttttatctattaatatgtctgtttccttgtaaaaaaaatatgcaatgtaaattagctttactctttgtagccccatgcttaagattttttatattgtatgtaatttctaatggctgaatatctatttgttcattttccttttgtgttgttacatatatttgaaattctatcgcaggattcagagtctgattctgaagtacttgatctgtt

SEQ ID NO: 11694 - DNA, 10971 bp, Vitis vinifera
  Intron number 2 from transcript GSVIVT01036069001 (locus G SVIVG01036069001) derived from phytozome v7.0 (chr-ID chr6 ; pos 21079150 to 21090120)
tgagcgggcacaatcttgttcttggtggtgtcaccattcttacaccttctaatatgtttgagatgtgatctaatatcagcttctgttggttaatgaatgaataaaagatgcatcacatatgcggtcacaaaaaaccataaaagatgcgtcacatatgtgctcatagaaaactttgtaggtgcctactgcttaatctgtactcgggtcaaatatcttggtgactgagagttcagtcttctttttttcttttttgtttctttttatttttatttttttatgagtcatggctgtgaaaagcttgaaacaaagatgaaaaaaaaaaaaaaaaaagtaactaaaacaaagtaggagtttctagaaaaatgttttcaattttttttttcacaaccatataactagctgactatatcataaataactagctaagtatatattagcattctaactctaatttggtttagttacaactatacatgacttaatatcccccctcaaactcaaaggtcttgctagaacggtaaattttcttcaaagattggtggaataggtgaagctttggtaagaatgaatatcagcaatttggtcaaaagaaggaatgtgttgaaccactaaagattcattgagaaccctttcctaaacaaaatgacaatatagttccacatgcttaacttgagaatgaaatatagaattgacaacaagaaaagtagctgaaagattgtcacagggtagaagaggagggaaagaagaggagatagaaagctcctagagaagatattgaatccactaaagtttagaagcaacatttacctaggccctatactcaaattcagtattagaacgagacacaaccttctgtttagcaaagctccaacatactagattaaagccaaaaaagataaaatgaccacttgcacttagatgatcattaaggcagccaacccaattggcatcatcataagcaataagtcgaagatcaggggaagaatgaaaggaaagaccaaaagaaacagtgtccttgagatattacaataatcatttaatagcttgccaatgaaaagttgttggggattgcataaattggtagaatttgttgatagaaaaaaaagatattaggccttgtaatggtaccatattgtaatgccctaataatgttgtgatattgagaaggatcagccaaaagagaaccaatagaagctaataaagtgtgagtcattagtatggcaataggtttgtaatttgcaagaccaacatgaattaatgaaccctaaatatattttgtttgtgaaagataaagagaagaaccttgccaacacacttcaacacccataaaataattcaaaatgccaaggtccttgaaagaaaactgtgaatgtaaagaagaaaccatttggtctatcaacacaaaattagaataaaaacaataatgtcatcaatatagatgagaagaatgatcatgtcagtccctttccaaaacatgatgatatgatttccaaaacaatatagacgagggttagtgagaatttgttaggattaagcctttagaagcataacgtgatgtcacaaaataaggttttgttaataaatttatttattatattttatggttttatttttttccttgtttgaattaattgttatataagcattcatacccatattacttgtattgtatatgttaggtgcattaagagttatagaaaatatcaaagccatgggtgtcttgtagaatgataagtagttcatagtcgggtcatggatttggacaattcattagagactatatatagtgcactaacttttaattacatgaatgacttatcttggtcattgagatgagtttctaatgatgaatgaactaatgtgtacagttacagattttacatgacctacggttaatcataacactagttattaggtagtcatagttcaccaaactactatgctaaatgggctctaaacctttggagaatattgagttagtgtcgaggtcaccactagctttaacctataggcgagacactaaattagtcatatatccttatgaatttggtcattgttgattaaggtaagttagaacaaatattttcaagatagacactatgatatttaatgggtttgagataacatgttcccttgggtgatcctaagtacatatgataaggacatatttatagtaatttcttaacttgaatttgacatatgccctttgagagctagagtaagttaatcacaaaataggatgctctgagactcaaagattagagagttaatcttgataggttggtaacatatacctcgttagattatgggaattgattcatgagaagtttgcatgtactaaatagtaggtcataaagctaagtttatatcttattttaatatcatcataggatattggagataaattgactctgtatagtgggatgttaagtcaacttcaaaattgaattttgaggaaatcaatatttttctatgggtcccaatggttcttcttgagctcttatgctttagtgacacattttttttagggatatttagcatctttgtttatacgtgtgcataaaggcatatttataaaaacacaagattgaacaagagcttatgaactattattttgaattacactaattaattaatttgagcataataggactaattaattaatttaagcttaataggattaattaattaatttgagtctaatagggctaattaatgaagtgggcttaactcacttaagccgactgaaaagcttatataaatctcattagaggttaaggcttcatatctgctaccattcaaacttttaatgacatggagactaggtaaggacaaagtgggtataaaaagcccactcagcatagagtgtacaaaaatcaaatatttttttcacattaacatgggaatcttggaattccaaaacttgggttctgaaaacccatttatttccaaatggccggcccaaaacatacttttccctgcatgaaaactactcttattttggttatttttgggccaacaatcctagcaaatgacttcacctttcattttttttttttgccataaaatgacattgattaattatgggatactaattttttaatattgactagattgatatttttctttaaatttgcttttatgcaaagaactattgataaatattattggtttgagacatattactatataataaaataatattataagaattattacaaataattaaaaacttgtagatattctatattgtatctctaagagtaacaaattatatcatggtaaatgtagtaaatatgttaaactatcactattttaaattttattaaattttactagcacaatatttaaaggataataaaaaaagtaaattttattatttatgtacccatacaatatagggaaaaatatgtgtctgtatacttatatgaaaaaaatcacaaaataggaattcaagtttataaaatacaaatttcaagcgcccatcgttacaaatttgtgaagtttttatttagaaatactgtgcttatatcgatttttagaatgttatcctccatatattgtgtatatattatgttggttacgagtgacagagtaattattcctttaaaatgagtctgtactgttgaaaaggggatttgaatctattctcaaacaaggttcataaatagcactaccttaaaatcctatccctaaattgattttttaactagagatcatagggagggtttttattcatgagtaggtgattaattaaggacaaaaacaaatctcaaattcatcattacccatttttcattaaattaaatgaagcttacaatttttttgggttaaaatcttacccttgaattggattacaccttaaacttattttttgaaaagacagatacaccataacaattgtatgaacttatcttttgaaaaataaagttaatgttaaaaaagtggattagtcattaaaaaatatgagcttagtgtataaaaaaatatatatatagagagaaaaaaaaattgtctttcaaaaatataaatttaatgtaaacgcaaaaattggtttttaaaagaagattttaatgttagaaaaaatagaacaagtaacaaaaaatataataaagagtctaatttaaaaaataaattcatattttgaaaagataagtttaatgtaaaaaaaaatcataattgtgaaaaaaaaatgacttataaaaaaatgaagtgtttaatataaaaatggaacaataaagtggagaaactagcatccttgtggctagaagtgtcatttttatatttatttttagaggaatcctttgttataataatttttaaaacaacaaggctccccttctcctaaaaatgaaaaaagaaaagaccctaaagataatgttgccacatatttctccctttgggaaagattttgacattgacacctcacatgtgttaatcattttcaattctaactctttctcatttccaaaactcactttttgaaaacatagatacaccataaatagcttttgtacttgtctttcaaaaaaataaatttaatattaaaaatgtgaactaatctttaaaaaatatgaggttagtgtaaaagaaatagaagaaaaaagaaaaaaaaacttatttttcaaaaaggtaaatttaatgtaagcataaaaattattttttatgtaataaaactagaactttcatgtgacactcatttcttctaaaaagagcttaattaatttagaaaataaatttatatttggaaaggacaaatttaatataaaaataaataaattcataattttggaaaaaaatgaaatcgtgttttataaaaaaaaaaacgagtttatcgtaaaaacaagacaagagttattttgatggattaaactaattaggaagatccatgggaaatcttgaatctgtaatttctcaaaccttgtaatatttgatattatgccttgtgttttgaattttagaacaatgcctaatttcttacactttgtaatatgtgattttgtgcattgtgtccacacttttaaaataatgccataacttgcaagaattaagtaatggtggttggaggcttggaacccccattgatgatgatgcctgcaatctgtgaatggcagcttaaacattataatatttgattttgttcattgtattcacaacttgaaaacattacttaatgtctcaaactttgtaattaatgtttgattttgtgaattgtgttcacaattttaaaacaaagccatagcttgtaggaagttatggtggtaggaaccccactaatgatgcttagaatctataaacgacactggccattggcactgtttttttcttcttttttttgttgggcatagttattaaccagtgggcatatttcttggctgtagagattagtcttaagaaggctgtggaatgtttaccaatatatcaattaatttaggttagaatttggcacttacattgagaaaacgtgtgggcatattactgattctgtactgagtagacaggagttgagccttacacatgcatcaaggaaatagaagtatgcacgtctgtctgaaaaataattgaatgtcagtttggaataggtaggatgatcatttcagataattggttacaattcaaccatgataagttcaaagctgtttccaaaacttaatatgaatggagaggccttcgcctttggtatggaggtcgatataccaatggcccctaggttagaatctttccctttaaattgattttttgacttcacatcataaggaggatttttctacacaaatatcatatttttttctttcctttgtacttttcggaaccaaacataacttaaaggaaaaaaagtagaaaaaaataataaaaagaaataaaaagtgaaataaaataaataaaaaaagtttaaaatcaataaattatttttatatcgttcttaaaaaaaattaattatattttatttttatttttttattaaacataataaaattgttttgtttaactttttttcttttctttttttggctttttcttttaatcaaacgtagttaaaagaaaaaaaaaattaaatatggttttacaaatttttaaaaaattaaatttgatttatgattctaattatgttagaatcttatctccttatataaattttatgtccaaacttatcatttgaaaagatggagtgaatttgtcttttgaaataaattaatttttgtaaagaaaaaagatattatattaaaaaaaaaaatttaacgtgaaaattgagaattatctttcaaaaaaaaaagatttgaatataataaaaaataaaataagtgagaaagaatatattgactgtgaattcctttgttaataaaatcttctaaaataatattttcctaaaaaaaaatcccggataggagactcaatcgtgaacattgcctaaaataagaacatcggacaataaaatcatgtgcgtaatatgaatctttttctaaggtagacaatcatgacacgacattataaattaatgtcattcgtcatctgcccacgtgtttaggtaatatgaatctctttctaaagtgaacggtcatgacaggacattataaattaatgtcatcggtcctgtgcccacgtgtttaggtaatatgaatctttttctaacgtggacggtcatgataggacattataaattaatgtaatcaatcatgtgcccacgtgtttaggtaatctgaatctttttctaaggcattataaattaatgtcatcattttgcaatttgcgtgcaggcagctttatcctcatctccggcacatttataatactttaagttgctcttccgttaaaaactttatcaataaaatccaataggacaaaacctagatgaaggaaaaaatattatagtacactaacacttttttacaagtacactctctctcatgtcgatatccttgagttgacgcatctcaatcttgtatattaacttcttgaatgttgagattcacaataactttgtgaataaacatgttagattatcacttgaacgtatttgttgaatatcaatttcattactcttttggagttcatttgtataaacgaattttggtgaaatgtgtttagttctatctcctttaatataacaccatgttatctgtgcaatacatgcaatattatctttaaataatattatcgggttacctttgataaaggagagagtccacatgattcttgaatatgttggattatagatcttaaccatacacattcatgacttacttcatgaattgcaagtatttctaaatgatttgataaagtgaccaccattatttgtttaacaaatctccatgaaatagtagtatcattgtaattaaacatataccccatttgtgacttacctttatgtggatctgaaaggtatcctagttctgcatatccaagtaattgttgttttaattctcttaagtaaaatagactcatattagtagttccgcgaagatgacgcaatatatgtttgataccattccaatgttttcgagttggagcggaactgtatcttgctaataaatggatagaaaaaacaatgtttggatgtgtacaattgacaagatacataagtgcaccaatagtattaagatatgatatatacttcaagaccaagtaattctttacatttttcacaaggacgaaatgagttcttcttcacatcaagtgatcaaacaatcattgaagaacttaaaggatgtcatttattcatttaaaaatgcttcaaaattttcttaatgtatgttgattgatgtactaaaactccattagaaaaatatttgatctataggtcgagacaaattttttttttttttccaaaatctttaatctcaaattcttttttcaagtaattttttgttcttgtgagctcttcaagagttccaacaagatttaagtcatcatcacacattgcaataattgcaaatctggtttttgatttcttaatgaagatgtatggacatatagcgttattcacatacctttcttttagcaagtattcgctaatgcaattgtaccacatgcatccggattgctttaatacatacaaggatcattgtaacttgattgagtacatgctatgaggttttgtactattttctttaggcaatttaaatcctttaaggattttcatgtatatatcattatccatggatccgtataaatatgttgtaataacatccatgatatgcatattcagtcattctgagactgccaaactaattaagaaacaaaaagtgattgcattcatgataagagagtatgtttcctcgtagtcaatatcaagtctctatgagaaaccttgtgctactaatcgtgttttatatcttatgatctcattattttcattgtattttcgtacaaatacccatttgtacccaataagctttacatcttcaggtgtttggactgtaggtccaaaaacttcttgttttgttattgagtttaactctgcctgcatagtttctttccattttggccaatcatttctatgttggcattcctcaacattatatggtttgggatctttatcatttcttatgatatcagaggccgcttggaaagcgaaaatattattaataacaatattgtttcaatctcatatttctcccgtgtgtacataacttattgagatctcacaatttttaggtacctatgcctcttcaggtgtttcttgttaaatatgtgcctctttaagggctttctacattatttgtgcctcttctagagttatagatttatcaattttagactaatcagttattttgatgacctcttctaaagtgccaaaattttcttgtgttctactcttctggggagttacatcatttgaactgacatgtctaccatgtttcaggcgtatcttagattcatttgttaactatcttatagggacatcaatccgtgttggagtatttgtagccggggtatgtgactttgtcactttctttatatcaatgaatgtatctagtaattgatttgcaagattttgcaaatgaatgatcctttaaacttctagtttacattgatttgtacgaggatcaagatggaacatagtagatgcgttccaagtaatttctcatcattcttcataaatcgactgttctccccctaataacaggaaaacactcttattataatagtctaagggattctgttgggcagaaatctaactacttgaactccttttgcttttgcctttggtatggaggtcgatataccaatggcccctaggttagaatgtttccctctaaattgattttttgagttcaccccattagaagggtttttctacacaaatatcatattcccaaaaaattaaaagaagaatgcaataataataatgaaaagatttatatatttttttcaaacttattttatttattttcatctattatataaagattaaataattcaaaatatgtagattattgactaattttaattatattttattttcttttatcaaacatgataaaaccatttttcctaaattttttttcttttttagtgtttgttttaaaacaaaggtagtcaaaagaaaaaaaaaagaaaaaagaaaaaaaacattgaatatgttttcatgctcttttaaaaaaaaaattaaatttgattcatgattctaattaggttagaatgttatcctctcatatggattttatgtctaactcatcatttgaaaagattgagtgaatttgtcttttgaaaaaatcaatttttgtaaaggaaaaatcatattttgaaaaaataaatttaacttaaaaactgagaattatcttttcacaaaaagatttgaatgtaaaaaaaagataaaataagtgagaaagaatatattgaacgaaaataacatattttagtatttagtttttaaaccatcctttgttaataaaatcttttaaaataatattttcctaaaagaaatccggataggacactcaagcatgaacctcgcctaaaataagaaaacatgatacaataaaattatgtacccgcttatttaggtaatatgaatctttttctaaggtgggcagcaggtgggcagccatgatatcagttatgtgcccacgtgtttaggtaaaatgaatatttttataatgtgggtggtatcagccaatatgaaaatctcggtaatcatggatatatcggtattttaattttatgaatatatcagatatatggaatacatatcgatggatattttgatacaaaatatcggtaacgtaaaaattaataaaaattatgaaaatattaaaaaaaaaaacaatttataagaattaaaaataaatattttaaacttatttatatatatatatatatatatatataatttttcatatttgataataatatcctctacatgtataaaaaaatataaattttataaatgtacatttattattaagttgtattatatattattttataatattattatgataatatgtctaattttaaaatatatttaatattaaaattatggtcgattttaatttataagtattcattgatataaaataaataataatatatgcataatttttttaatatttatttttattatatttaataaatatatagattatataaaaagacctattaagaaaattatgtttttatatttttggtaataaattaaattaagtataaaaataaaataattataatttatttatttaataataaaaaaaccgaaaaattagtgacatatctattaaatatctagaaatcgaaaaaataaaaaaattgataaaatatcaataaaatatatgaaaatattggttgacggatatattttcctaaattttgtatcggtatccatgaatattggatatatcatggatatatcgacgatatatccagatattttaatcctggatgtcagccatgacaggacattaattaatgtcatcatatagcaatttgcatgcaggcagctttatcctcatctcaggcatccaagcaagc

SEQ ID NO: 11695 - DNA, 6442 bp, Vitis vinifera
  Intron number 3 from transcript GSVIVT01009892001 (locus G SVIVG01009892001) derived from phytozome v7.0 (chr-ID chr1 8; pos 12181263 to 12187704)
caccatcatcaggcacggattccaaggcaaggcaggtgaggcaaaaggtgtgcgcaccactgacagcagcggtcgggcccacgactgcctaccgtgtacggacggtcgcagggccatgttggtgtgccgcgtgatcgccggaagggtgaagcgcatggcggacgatgcgccggatgaggatggcgcctcggctggctcctacgactcagtagccggctactccgggatttactcgaatctggaggatttgttcgtattcaatcccagggccattcttccttgctttgtagtgatctacaaagctcttgattgattgaaaaacttctgtacacataactaatccaacggtcagatcagtttgctgacctccctttgtcttgtttgcataaaatcctttggatactgtctcacacgctagcaaatccttacagttcaactgcatgttcatatgccaaaatcatttaacaaagtggttaaaagcgaaattaatgattataaataaaagttagagcgaattcaggaaacttggtgttaataatgatggttaacgaagaacttgaagcagcatatttaacgtcccatccacatagaaagctggcagtcagagagaaagaaagctacaccaactttaactggaagtagcaaacacaacagtcattgacctgtcatcttcactacgcactctctctgcaacgctcttctatttgggtcttaagagaaagaatcagatataatggctctttcacttgtttcttttttctttttcctattttactgtaaatactcattagtcacagactgactcacagtcttctttttcttaattaagcgtggtttgagttttgaagccggtgaggcacgtgggggagaaatcagagaagagtgaagaggggttgtgtttgagttgaccccggccacgccggcccaggcataggaagaagaaaattttaaatatcaaccacagatgataatcgattttacacatgcaggagcatatgcgcattgattgcttctcattgtttggtgtgcttgggctttgggggaactgattaatatatggtaattctgtgattacaataaacaaaaacacttgagaggacagattatttaaaacctcggaggcttcgtaattcttattttatcttacgtaatcccaaaccgagatcactgaaaatgttgtatgtcatataaataatagtgggaaatttcataagaaacttcctcttgtcagccaactaatttcacttgattttggtgataactgagattcgataagtagtatggagcacgcgttgacaggttgatgatgattagccatcgctcttaaccaagacaggttaactaattttgttttaagaaatttatccaagttaattggctaaggagtttgtaatactagaatcccgaaagagtcaaaaggaaagcaatatgctccttggatttattcttggcttgatgttgaggtaaaacatatctttctcacccaatttcatttataaaagtattatttccacccaatggtggcttctcttctggctacaagcttctccatgattgccggtcatgattcatgggtatgtataattggtgaattacagccggagcaataagaaaatggaccaaaattgacatgagaagttgtcaagcctttcacattcgaatacctcaacaaaatctcttcaaaatcaggagaatgttgtctttacccaagattataacatctcatgaaggaccactacctatactgtctcgtagtgacagagttgcacataggccatacccaaattatttggtggaaaatctctggcttgactgtctatttgtggagttgatactttgaagaccagttagtgaatcataatcattcgatcatgtttagtagggaagttcacagcaactgagtatgggccggttgacccaccactgcaaagccatgatgcccattgacatggtctccctctatctgcatctgggacaactcagcccaatgtcatgattgggttggaaacttctgcctatggtatctcaaatattaaattgatttatcaaagatgtgttaatcgatgtcccaaaatacctccaagcactgggaatagcagcgaggaaaaatgcaatgaaggttaattgaatgtgagctctctccaaaagggagttatagagttacatatatataacatgaatcatgactcatgagctcatccagctccacaaatcaaattacagttaagcacttggaaaaacttctagaaaagaagtgcgatttagctgtcaatcctacctcacatctactagatgattagtccaattcttgacaaagtttttactcagggttgtgtttgattcatgaaaaatttgataaagagtgcaatggaaagaaaaattttgaagggaaaaataaaaaattaaagttattaaataattcttataaattattttaaatttaatttatttattctaactcttttatataaagattaaataataaaatatctacacctttttttttaataatcttgattgtatttaattttttttatatattttttaaatatgagataataattttttttaatattttttcaaaaccaaacgtaacctacaacattaaataataaaaaagcaacatcatttttattgtaattcatttttttttacatttctagtttttttatattttgcaataactttacattgtaactttttttatcaatcacatatagaaataattgcgtgaaatggctaaagtatccccattttcaaaaattggtttttatgttattgaaattgtaaatataaactcaaatggattataaatgtatttgataatatttttatttaaaataatttggtaaaagtgtttttttagaaacacttaagtgatttttcaatcattttcaaagcaataagtgatttttaagattttaaaaaattcaagtggagtttctttgatttcctttacttttcattgattttctctctttttttattgatatataatcgagcgcttgggtgttttttaacgttttaaaaggtgaattgaatattaggttacgttatgtgtgtgtttttttttaaataaaaaataaaaattgatgatttgctcaaatttgctaaatataccattttttagactaaaaacatttttttaaattattgttgaatggatttgaaaagcatgttacaataattatattcaaattgcttttaataattatgttttacatgtaagtgtttttaaaataatcacttatcaaatgtttatctaaaaaacattacaaataattttgtaaatttttaaaagtacttcttaaattttgttgaatacctaattttttttcaaaaatacttttgaggcgaaaaatgcttaaattttgttaaacatttaattttttaaaaaatactttataagaccaaaaacacttcttaaaattactgtcacaccacctattgttttataaaagtgttttgatgtgaaatagtaataagaactcattgggaagtaaatttgtaaaaaaaaaaaaaaaaaagccatggtggttttaaaaatggggtcatttttgtaaaatgaaaccatatttttatcattttaataaaatatatctgatatataatggacttgtagtagatttacctaccaacatggcattcttagcccagtctaaatgtcaaaaaacacctcaaaaactgataatcaagctgaataatattaaattatatttttttcttatttaacattattatatcatatctatattaactcttttaaaaactcaatttaatatatatataatttgaactgttcaagtttctttggacaagctaaaaataaggttgccctaataaatttcacccgctttaataggactgaaaacacaaaaacaaaactaaaaaaattattgtctttccccagccttattcgaactatgagataatactcaaattcatattgaaattaaaacttctaacaactataaaaattttaaaagattcaactacttaaatatagaagtcaaatcaaacactcaaaataaaattattttaactaaattttataaattaaatcaaatttaaatatttagaaactttataaaattaagtttgctttccaacaatagcaaaagtactttcacttttagattttaatggaatcataataaaataaaacaactattaaatattgttagcgttatttattaattttcatttttcctttcttatttccttacattaggtctattatactttattttgtgttacacctattggagtgagagtttataataagaagtcttagattttttttttctccccttttctctttaaatcttttttaatttcgcaaatataaaattaaggtgggaggattggagattataaagatgttttggttttacaatattatggtatgtttcaattctccactaatgaggagattcctgatagtgctcgccttggtactttttaaacaaaaagaaattgcaacgaaggtggaacattttggagaagaatccgaagaataactttatgaagttgaagtaaggtgtaaaagaattcatggtctaattgagattgagaatcctaattaggggaagttaaagattttgaaagttagagatattgatattaagaaaacaattggatcatgttttaatagtctcatttgaaaatcaattgatgttttatgagggtaggtcaaatcttttataacattcgacatcacaccctaaaggttgtaaggatgaatttggaatgctttaaaatttttgaaaattagagatattgatattgagaaaacaaatggatcaggttttgaccatctcatttgaaaaccaattgatattttatgagggtaggtcaaaccttttatgacattcgatatcacaccctaaaggctgtaaggatggacttgaaatatttagctttgatttgacaataaagatctgatgttaccaaaaaacaagaaaaaaaaaaattatcaaagtccaaaaaaagataaaagaatgttgaaggttgcaaaagatgttaataggtagcaaaacatatcattccaatagcatacaacgcctcctacatgcgattgaatattcaaacataatcatataagaggacactaaaatcaattgatatgtacaagagatttaccaaacataatcatagaacatataggaaggataaccccaaacaaatataccaatagaagaagctcaaggacctccacatcaaactccctattgtaaataaatttgagaaaggctttgagttttgaatctttactttattttaagataaaataaaaatgctaatataaaaagaataaaaaaaaaatggttgtcaaattttagattaaaaatatatatttttttagaatttattctgaaaacgagataattttttaaaatatatttagagtgttttcacgtatttttggtctaaaaaaacacaaaaaatgaattgataatttttatgttgcagataacaataatgttttcattgagaaaattatttttcgtatataaatttttaaacaagattttatactgtttttaaatatgatatttgctaaaagagtgcagaagtgcattgaattgtacgttaggaacatgatggaatcaagaagaaaggcagagagtccaagcccagtgaagcccgtataatcttgggctaaaagcctacataaaggttgacttaagttgataaatttgaaaggggctccacggaaggataggattgacaacacacaaaaaattaccaaaatatatatatatataattgtgaacaaaaaatgtcgtatttcaccctttgaatactctcacattcattctaaaattaaaacttctaataaccataaaagtttaataagagtcaactacttaaatataaaaattaagttaatcactcaaaataaaaaatattttaattaaattttagaaattaaatcaaataaaatttagattttagaagctttgtgaaattgagtttcctttcaaacaatagcaagagtccttggatttatggatctttagttatgaatctttagtttgtgaggagtaaactagtcataatccatttaggatttcaattttcattttctcaaacttttaagcttgtgaaaaacaaactttaatcctactccaacttggggttttggagttagaatcaaatactacaaaggttaaataaaacgttagaggttgggcgaaaaaaaaagaaagaaaaaagagaagtgttaaaaaaataaaaattagttatttttcaagattgaagatagtagagccgattttgtttgatgggcaagggaaagggaaaaggaaagtcgaatgacaaatccacttgtatgtgtcaattctccattgatgaggagattgtggctagtatctttgttcatcctaatactttcaatcaataagaaattgaagtagaaaaatactttagggaagaattt

SEQ ID NO: 11696 - DNA, 16932 bp, Vitis vinifera
  Intron number 1 from transcript GSVIVT01026874001 (locus G SVIVG01026874001) derived from phytozome v7.0 (chr-ID chr1 5; pos 19712172 to 19729103 reverse strand)
cttttgatttatttatttacaaaaaaaagtttcaatttattttcaattaatgatttgattcaatttcatttgtatttaatttttttttaaaaaaatttatttgtacttattgtataaaagaaattattacaaaattttaattgggcaacaaaaattattttacttgcttttttttttttcaaaaaataatgaatttttacaattttatttacaaaagtattttgagtcattttcattttaaaaagtgatttttacaaattatttaaaacgacataactttatttgcaaaagaaattttaattaaaaaaaataaatatttaaatattctatttctaaaaaacatttttaatcccattttaattaaggaaaaagaattcaaaaaaatattttgttcgacaattttattaaaaaataattttttttggatgactttatttacaaaacaattttttttagacaatttttattaaacgaataaatttttggacaattttattaaaaacaaattttcaaattctataaaaaactattcttttggatttttctaaatgcatttttctgaatttttataaataaaaaaaactttcttttattaaaaagaatattttaaaattattattttattaaaatatatttattgaattcttcctcttaattcaacaaaatttatagtttattcgatgttcaattctatacacactcaataaatatatacgaatgaatatttacaaagacgattaagaattaaatcaaataaaagtggaaaataaaatatgtaccaaaataaacttacaacaaactctatgtgtcatcaattcgtactcagccgacaagattgtagaatggacccatgcaaaagacaagaataacacaaatgtaaatattcaaaaacatgtagagtccaaaatagttattcaaacccaaattcaaacttcaaattagtctaataaatttcaccaattataaatggacccaaattaacaaatataacctaataaaaatatctcatatatcatagaccctaatataaaatttccaaattaatagccaaaatataagcccaattaatcaatcccaaaacacgataaattaagataaatcccattatgcctaaatttaatatttccataatctaaacataatttaatatacaccataattaccccatgttcaaattaaataattcaattggacaaagctcatatcaaatattcaattcatccaacaaatttcacccacattgtgggcccaaaattcacatcaattaacaagcccacattaataagacacatgaccaaaaataataatatctcaagcccaaacaaatagtaaattaacaagcacacattaataatacacatggccaaaagaaatagtatttcaagttcaatctaataaacccaaacaaataatcaatcaacaataggcccaactccaattaaataatatgtaattgatgtaatccaaatatcccaaattaatcatcaaatttaatataaccacaaaaccaaattaacaaatttcaaattaatccatcaataataaattaacccaagttacatattaatccaataattcaaatttcataaactacaattgctattaaaaccaaatcaaggaaaataaagaaaaatagtagtagtaataataataataataataataataataataataataataataatggaaaatgagtgatacgaggaagtgagagaatgagagaaaaagagaggaggtcgtcggccgtctagggcttgtcggcggcgaccggctgaagatcttgccaacaacagtggatggctttttaggaaacacaaataaaataaaataaaataaaaaataaaaatggaagggaaatagggagccaactgctgggtgtttttggatggagaaagggttggaaaaaaaagttgaagaagaacgagaaagaagaatatgtcgattccctatgagtcccctaggagagaaatagaaaaaggaaaaagagatgtgaatgagggtttcgactggctgtgatgtttgggtagtcaaaataaaaaataaaaaataaaaaaaaagaatgggaaaataaaaatgggggagcctgctgtggtcgtctatgtagtgaaaaaatggggaaatagatgagaaatgaagtggggagatggggtcgccgggcactatgggagtgaatggagggggaaggcagaggatggagaaaacccggggggagagggggggggggcggcagttgggggagagaggaaaaaaatggcaaaggggcaaaatgggaagagatgagagaaaggggtagccgaccactatggtcttttggggggagagcaaaaaaaagggggggaatttatgtaaccatacaccaaggggcaaaattttgcctttttgaaactttactttttacttttcaaattcaatggattttgtggaaaataaaccacctttcatacactgtaatattgatattgagggcccttccaataataccctcatgcactttgacataattaattgctcaaaagccatgtttcacttaagccaatgacatgactcatatgacatgtagacactccacgtggcaatatttaaaaaaaaaaaatttattaaaatataatagtgagatttacccgaaatcctttcttctgtgttgaatcaaaaccctaaaaccctttttctctctttgaaccaaaccccccaaatcccttattctctctttgaaccaaaccccccaaatccctttttctctcttgaaccaaaccctaactccaaaaacccatattttttcactttctttcacaaccacaattcgtgaggagagcttgcaatgaaaacagagagaggtggtccgagctgagaggagctttcccgggtacgaatgtaatggatttatgagttaatttgggttgttattgttgcttgttgagatctttgacaaaaaattaggtaattttttaaaaatatcgccgagatttcggtattaatgggtatttttacccatttttcagaaaaaataaataaatacgggaaatctcactgaaactagtgaggttgtaagtttgtaactgtcaaaaaataaaaataaaattctaggctttaagttgtaagtcttaaaaaaaggctttgatggaaataaaaggaaaagttgattaattaaagaaatagtgtatttgaagtttaggtgtggttcagtggttggcaaaggtatcctcattacccgtactccacttaccagtctagctcgcacacagatccagaatttgcgggcaaaagttgtggttttcagtctggctcaaaaatcgtggatttagggtttgtaaaatttaaatccaatgacacaaaagcaaatagaaccctagaacagatccagaaaacacagggaacaacaaaaataaaagcatttttttttttttttccttgggagtttgcatggatttctctcggaaatcaaacgaggatgaattttcctggaaatcgaatggggaatggattttcttgggaagcaaacaggggttgaaaagaaatattaataacatgattagattagtacctgcgaggattgagagtggtagaggaaaatagggcatgatgctcgcttggagaggaaattcagcaaaagggcttcttgatgccatactcgggtggccgtttcgttttttagatctagtagagaaataaaaaggaaacaaatcataagaacaatattataaatcaaaattattaattattaattataaataattattaattatccatctttattttggttaaatcaaaatttcagtttttatcagtaatattttataaattaaaattaatttgataagataaattattaataatattaattatttaaataaattaatgttaatagaaaattttgttaccacatatttttaatacaaatgtagaaattttttgaacatttaaaacaatatggcttttatttatcaatgtaaaaaaatgttatattttaatttacaaaaaaatcaaaatttacatgaactgttatatatatatatatatatatatacacaaaaactaacctcctcaattctggagcttatttgttacaagaactttttttctcaaaactgattggttgacaaagaaaattccaatattatcttcatttatttaaaagtaatttaaaatgcatgcactttttaatttatgatttaattattcccaaaaatagccctttacttgtcatgtcatcctaatccattgacaattagaatccttcgtataaatatttatattctttttagacattttattattattattattactttattattttatcattggggaattttttttttctctagaaacattataaagtaagaatttgaaaaaaaaaaacagaatttattatagtattaataagttaaaaatagattcatattcttgataataaataaaccaataataaatttctatttattatataatattaataattgtttaatataataatgaataaaatttgttattagagtttttcaataataaatttgttataatattaaaataattatatattatgaagtttattatttattatttaataaacaatcttattactttttgaattggtaattatgattaaatatgatttgtttgacaatatttcctaaacttttagaaaactaaaataagaatcttataaggtgtttgtttctagaggaaaaaaaacctaaaataataaaataacaaaaaaaaatctaaaataataaggaaacattaaatggagaagtgtagttgtcaattgatttgaataacaagacaaataaaattacattttttggaataattggataactcagtgcatgtatttcaaattatttttaaatagatgaagataatactaatttaaaatatttgggattctttttaccatatattttctcattagtgaatcaaatcccactattccttaaactatattgatttgattagatgagtatgtaactttgaggcataccatttgtttaattggttgacccactaaaatgcacattgtcttttttttttttgggcagtgggtatcatagtgggtgaccctatatataacaatttcacccttattgataaccatattattgaaaggctaggggaaaccgatctcaatgattttcatttacatgatgtaacaaaatgtttctcatttctttgttaatatatgttatatttgtgtaataattatgatgaatgtatataggaacactatattcacgttcacatgtctttaacatttgattaatttattaatgaattatggttgtttaatgcagtgataatatgaacatacggtgtcgttgttctggtcgtagattcctctctggaatccatttgctctcagaagtgaagaaggatgtaataagagaacttggttttggtgggctattgcaattaggttgtaaggaggttaatttagatttatgtttttggttgataaaaaacacaaacattgtttattcccaactcgagttatttggggataagaaggtctctttgacatgtcatgatgttgggatgacgatgggcattccacatagtggaagaaagttaattgttgagaagggaagtgttaaggctagtcaaatgccgagtttgcaagatatagagtcaatgatggttgacatcgatgatatggaggaatttaagcgggtcttcttgattttcgtttgtgcaaccttattggcacccacatctcgtttggaagatagacactcattatggtatacaccccgagagcagttacttgggaacataaattggggagaatgtcttagaattttttattcaagctatacatgaacataggaggaaggaaagtgtttggattaaagggtgtttgatgtttctacaagtaactttttgtcttatttataagtatatgttcatgtattagatatttaataatggttatacactatgttgaccatgatgttaccactaattatgtcttatattccacttttcaatatataattttccagccatgtatgtggaacttaccactcctcgcattgctgcatggaatgattttttggtcaagcaacgcatcaagttggagttggaaatgcttggaggatttggcaaagttgaggtataattagcttttagttatattaagatagttgattaccattgtaattagattattgggatgacaatttacatgttttgcaatgatagttggttagcacatcggcggagcaagatgaaacagaaaaaaataaggctcctacagttgatgacctagttgacccagatgagaatgaagactttgatgcaatccttcatacctaatgactatgaatagtaacttatattaaggcttattttaaatatatgtcatttaatgttcctttattatgtttgacttaggttatttatgctcgcatggaggcaacacaacgtcaaatcaccaatgcacaaagtcatcttaatagtcttattgcatcatacaactgtgacgtgaaagtgttgaggactcgtttcacctcttcacactatcgcacagatgaaggccaatcgtcaaattatcatgaacatgttaatgaaagtggtgcaccattttatacaaataatccacatcattcacctgttaattctggtggtcaaagaagatcttctgaagatgaccttggatgtacaaatgaaagggtgtcaaaaagacacaacgtaaaagatggtgtgttctttgcaaacaaggatccccttcaccctgggccacacaatatgttggtgttagtgcaatcttgcatggacaacaatacggatgtagcaccacaagcctcaaaagaaatatgaccacgaagaataaaaattaaagtacgtcgtcataggcaacgagcagctgcgtgcaagtcaccttttgtacaattatgtgtatcaaaatacaaaaggttgacggaggaagagacacatgttgtcgactatgtgtttgacgagtcataagatcctaggttagtcccaaatcacacgtttagcaagtattgttcttaaaagactatgattatggatttgtctagaaaaacaaaaaaaattactcacgtcttatgtttcatgtgattaatagtgagatgctttgtgcatatggtggctatggcgtgacacgggaacaacttcaatgcttagtaggggagagcttcattgatattccggtaaggtttatgataaataagaaaaaataccttcatctttccattgatcattttaactaatgaaaaggcattatgtaggtgatttccatgttctgtcgatacatttgtacatccttcgcaaaatttgtaatatatatatatatatatatctatgtgtatatattaaagatgctttttaaatgtaattgatataagtatgattaaagataatttttatcaaaaaattaacataaattcatttaatatatttaagtgatttattttaaaattaaaaaaatacttttattaaaacatattttattacattttaaataaaaactaaattgatttatatcaaatatttgatttgagatatgatttctaaaaatttattacaaacatgtggtgacaatttttctattaacattaatttatttaaataattaaaattattaatcatttatctaatcaaattaattttaagttataaaatattaggacttcatcattttttttatattgtagcaaattctgagtataactatttttgtaatatttaaaaatacaaaattttgaaattaaataaaagtaaacggataaataaaaaaaattactaatgagctaaataaaaaaagtagttaaaaaaataaagtaatataaaataaaatgataatataaatttgaaataaaaaataaattaaaaattgaacaattaatttttttttaaatgataaatatttagaaaaaatctatgattttgaatcaacaaggaatcatttccagcgtttattttatatgaacatcaagggccaacctttcaagctatcagtatgcctccatttgccttactgcccaacccacacctcaactttagtcatcctaaaggcatgcctctgacagagagtcatgtctttctttttcctactacaagtagcttaacaaaaagaagtttttcacccacattcatgcgtcttccatcaaggttttgctcttaggttgactactgcacatagcctaccaatataatggttttagcaataggcatgcccctaaaatcaagggtgtgcccctactttgcatacttcatatagaatttccaaataaagttatcatacccatgggcatacttatgcaaccaagggtgcacccctgttttgccttctgcatgtagcatagttatataatatcattaacacataggcatgcctttcaaatggaaggtgcacccctagattgtcttctgcacataacatattaaactaatgttcgaatgccttcccatggtgttaatggtttaacctcccttttacagacacctcacataacacgaaaccaattttaaagaagaaaaacgatagggttgcctatgatctaacaggcacaaccttattttggctactgcccatttcacacaaaactaaataatatgcttaagggtcatcagccaaaaagcgataacccctacatgtaaaggttgaccacgattatgcccactagttaacaatctttttttttttttgctaaggacgccatgtgaatctatgtcactttaatgccatctttgaacaatcatgaccaaggtacatattttgctattacaattacattatcatgtaacatatcccataatattgaagaacaacatacaatcacaatatatgtacaccaaacacttcaaatccaataaattactcattgcttataatcaaggaaacaacaacgaagattaccaaactatttcatacaaatataaagtcgatcttacattatgaagtttaataaaaaaaaacttacagcaatgggttgttacatgtcgcacgattatgcccaggctaattacaacgagaacaatgaaccgtttttttttacatgaattaagactcgattcgacatttcctaggtcttccaagaggtcgctttgtggttggaggattaagaaagggataagtatgacccaaggcatcacgaacggttccatctttatcaatcattggcatgtcatacgttaccaaagtacgcatgcttccagagtatatcttctcttgcaaattgtacttataccagtcatcaacataatcagatacatcaaaccccattcaccgtataactacacaagcatgatcacattggattccaaacatttgccatgctttacatgtgcaagttcgctccattaagtccacttccaggaatgcttttccattggattctttcatcgaactacccaagtgtaaataagtgatataattttcactttttccaatgttcaatgcaatcttttcttctattttaggaccaatacacccattccattttacaagtccatttttatgctcgactaaaagagatcctaacttatccatatgctcgatgaagaaaacacaaatgttatggtgttgttcatgtcttaaccaagaattgaaagactcggccaaattacttgtcatcttatcccaacgcatcttcttaaatttagagattgcccaatgttgagggttattttctttaacccacttcgccaaatcatgattaaatgtccttaaagtatccattgcaacctcataatcacaatctaacctagcataggcgatagaatcaagcatttgcaaagcattttcctttactttcctccctttagtgttcagctttgttagaaagctactgaagttttctttaatgtgacgatagcaatgtgcatggttttcactaccaaatacctctgaaacactatgaataatcccttggtgcctatcaaatattattataacatctctttcacctatgaccatctttaatttctctaagaaccaaagccaatcctcgtaattcttagagctaaataagtcataagcaagtggaaacatgccattgtcagcatcataggaagaagctgaaaataaagcacccttgtatggcccactcatgtgggatgaatctattgatataataggccaacatcccatttgaaacccatgtattgacactgaaagggctacaaacaattgcataaaatgaccatcatccgaacatctatattcaacaatcgtccctggatttgtttcaataagccttgtacacaaccaaggtaacaacttatatgaacattgcggcacaccatgaattcgttctttagccttctctttcaagttccatgcttgacaataattcaattgcattccgtattgttgacgaaagtctttacatatttgacagggtaagtaatctgaatttgaatgaataacatcatcaatcatagttgtggctcaattacaacgaattgctggttcgaaaattgacacatcttctaaagagtggttatgttcatttctaaatgtatacacttgaactatttttgttctcccaacaacatgagcagttactttccaatgacatccttcaacaacacatattgcagtcatatgcttaagacaatttctcttaaacttatatctaaaatggccttctactgacatgagatatattgcatcctgaaattcatttccaattgagaaggtatgcccactacccaatattgcactctcaaaacgacttgactctagtggaccaatatgtgattcagcacatctttgatgaaatcctcgtgattgcattctaatatcaacatctcttgttgaatatgggaccgatgagttagaccatacgtttgtttcgttcaagctgcattataacatctaatgaataaacataaatattgcaaaataaataaatacatggaatcatttaagattatatatttttttgatataacttacctttgtcctccattctcaatcatttcatcgtcttcaactgttgatgctaaacatatatatacacatgcacatcgatcactaaattgaaacatgtttctcaagtcttcatcatttttcaatggttgaagtgtgataaaacaaaggctatgaataattaaggaaaatacccaaaagggggggtgaattgagtttttcaaaatctttttccacagaataatatatgcacaaaataaataaaggaaagagataaagttagagaactcaaactcgggtttatagtggttcggaacttccttacctacgtccactctcctcaatctcctaaccgagtgagggttccactaatcttgagcttcaatcaagctttcaatcttcttacacttggattccggctccaatgggctcttacacaatctcttcaagatttgaaccacttgaaggctttcacactcagtttacacaaagatgaaactctcaacctagtttaaggatgactcaagtacaagagaaagctaggatgatttacaagagtgcactaagaatatgcaagtgatggttttaatgcactaagaaagaaatgagagctttttgatcaagaacagataggtaggctttgaatgcaattgttctcttagtcataaatgaagtggagctctcaatttataggtttctaagctttgcattcaaaaacagcaaaagacaacctcgtccggtcgagctaggggtcaaccgattcactagctgttggagcatttaatgtatgacaggttaccgttgcctcgaccggacctcgaccgggaagaaaaggctactgggagagagataaggtttttaaccttcctcgaccggtcctcaatcggacgacctcagccggtcgaccggttactcaaccggttgaccggttggccttagcctcaaccggttgagccttttggccccgaaaacctatccttttttatttctttcttttccaatacttaggcaaggtctttaggtgagttaatatgccacttttgaatcaatttgcctaaggtatgtttgataaaactcgggttttaaagaaaatcaagttttaaagaataaaccgagttttctaagatgtataaaaaggtatgaacatcctaagtgcactcatgctatcatcttacattcatttcctatgatctcaagtcttccaagcgtctcgatcttgtatccatttggtcctttaatgaattttcgagtttatacttgagattcttaaacattaaaccaattagttacttaaccatggtttgttatcatcaaaacccgattaggagaacccttgggttaacaaagtgcatataaatcaaacgggagagtatatgaaaatgttggtcccactatattgatgttcattttcccacaaatccttgaaacaaaatcattatatgtcattgatcattctaaacttagaccctctcgtctcccacccatatattccacattgtcatgttcatcccttactagctctcctccaatgtgcagataacaataaattgtattactttgatccatttaaatgctactcaatcatgtgcaacccctatttagaagcatgaacctttagtcaagctgaaacaattaactaatttcttaataacactgcataaaccaacttacttataacaaaactaattatcacacctatgaccattatatattaatacatcgtttatctttgaaactttacaaacgagcttcatttacatttcatagtctacaattaatggtgtaaatatagacatgcatagtgtatacttaacattaagcaatgcaattattctattttacttcgtagtaatttgctatgttatataagttagggagtgaacctctcaattcatgggctaaccattgttttggtaactcttcaagccaaattgtgctaatgtcactctctttgggccaccccctcaaacaatgggtcgacccttatttttcccactgcccagattaaaccacaacaatgtttacaatcaacggccgacctccaaaaacacgggtcaacttttattttgcccactacccagattgaaccacaacaatgtttacaaccaagggtcgacctccaaacaaataggtcagcctttattttgcccactgtccagattaaaccacaacaatgtttacaactaagggcctatctccaaacaaatgggttatcctttaattcacttactgcaacctcttacgaaaacaataatttcatccaaatatcattaactgaattacggccaaccccttcatccaagggtagacccttactatgaccactacacacataaacaaaacaaatttcatatttgtggttgtgaccatcaattttgaacctaaggcttcactactattttccctaattcccacataaattcatgcccgctttactaaatttgttttattttcttcttcaatttaacccttattcattacaaattcaaaacttttattaagaaatttattcaaactttaatcccaatcatttttaaaatttatactcatctactcatgactaaacatgaattcttttcccatgcattaaattcaccaattaacaactataaaaaatcactcaaattactcattttggaatcccatataaacaacattaaacaacaaaacatctcgaatcccatataaacaacattaaacaacaaattgtttgaacattcctaaaaattgtattcccttcacatgcaatagtcatatttttcttctcttttccgtattcttcccaacaaccacatacaacacaaacacaacaattcagaaaataaaacaaaatcaatatagcttaccaccatctcattttcccatcatttatcaaattttaagccatatttcatttcgaataaaccctaaataaatttaaatttaaatttagatacaatattaatggacattgaacatgtagaaatatgcaatgtaatcaagtttaaatcacaaaattacacaaatcacataactatgacattattcaaatctcaaagaatcaaaatgacaaatcaaaatataaagttattacaaaatttaataacatatatatatcacctggaaaaacccttgctttaaaatttaaatgcaactacaatatttttattcttcgttatctcgttctctcaattgctttctttctcctttttcaatgtaaaagcaaaataggaagtacaaccaggagaaaaataattgtcactcctgaaataagaagaaagaaacgggtttttttgtctacctggcctttgttaaggggttcacacttggacttttgttttcagattgatgtttggtgagaaaatgaagatgtcgtcttccttatggtgatagaggagaaacaaaataagagatcaattttggaggttcgtttggggttgatgggttatcgcgatttgagaacctaccagattttttatggatcatttcgccttgtgatgggttgtgcttgtgaacgaacaagaaagaacatgagtttttggtgttagggtttggttgaagaaagaaaaagacatttaggggtaaatattttttaaaacatcaatccatgtggagtgtctagctagccgatgacatgtaactgcgccatgtcattggcttaagtggacaacaaacaacttattcaactaaaagagatgtcaaactataggagggtatttttggaaggatctcaacatcactattacagtgtatgaaaggttgtttattttccacaaaatccactaaatttgaaaagtaaaaaagtaaagtttccaaaaggtaaaattttgccccttggtgtatggttacataaattcccaaaaaaaaaaaaaaaattgaagaagaatccacggaagaaaaaaaaaataaattggagggaagaagaataataaaataaagaaaaaaaaactagctaggggtatgggagtgggattaggggtatgggagcagagagagtgtgtgtggggtaggtaggtgaaggagaaaaagaaagagagaggagagagaaaataaaataaatataataataataataaaataaaatgatataatatacaaaataataataaaaactaagaattaaaggatgagtggacaaaaaatattacatttaatcgggatttaaaatctgaggacaaaattaggtttaaaattaatgtaaaaataaaaatcgggacaaattttagggtctacaatgacctaaatcttctatctctttggatgacatagacaatttttttattttttattttgtatcaaatagaattttacaatatggtatcgaataatcttgattaatttcacttgaatatatgaaaagtagaaaaagaaaaaagaaaaaagaaaacttaggatgaagaaggaaaattaaatgtaaaactttgaaacgatttaaaggataaattttaaaaagtttatgatttagagcttaaaaagctatatttattgaacattcaaaattatttaaatggaaaattagaaagctcgatattagaaaaaaaaaatgttaggggccaaactaatttgccaattaattcataccaattttttttattttgattaattatattttcttaatccattgatttggtttgattagaagtagaattaaaaatcaaatcaaatccaactttgaccacccttcatgatatttcagtatgatacattttccaatttttcaatacataaatactttagtatatttttttatttttttatattagttatctatatttgatatttcttttatttggtatattcaaattcatcgagaaaataaatcattgtccaatatgatttagatatattactttaaatatttatccacctttttattttgaaatatctatttcatctgtatcctctttccaaataatttacattttacatcctccacaattttttttttttttttctttttgtaaaataacttttctttttaaaatttttattatcaagaattgttccttcaatatgttgaaatgaacaattcttaataaaaaatattaaaatttattaaaagtaaaactcaaatagtgggtctgcaagatcttctcattatgacaactaataaaaataaaagcaagaagattaagaaagcaaaacatcctagagagaaaaaggaaatcaataaaataatttactatagaaaaaccaaaattaattaatatgattagttgtatatttttatttttatttacttttgtttattttaacttttaatatattttttatactcgtgttctcctctaaattcttgtgtatcatcttctccatcgtgggtaagatcaatggctagtgaagcgagatttaacaggggggtgaggggaacttcatcaaatgttttccatttctttgttatattatctatcattatccttgtcttactctattggactcaccttgtaagtctttcttggtcctcttgtcctttgcttctcctatttctttgcacatttttttgttttcttcccatcatgtcttgttcttaattgaactctaataatcaatcatatcatgcttgatcataacatgcaattttttttatttattaaaatgataaaccctaatatcgaatagaatttccgatatcatgttggtgatgagttggttttccagcctatgatgactagtttttcatatcagaattcggctccaaacacaaaaaatccaaggattttccctaagatcctagtaaattgcaccatagggaacatggcacaagcatgcccagccaatcatccgatgactagtgtaaccgggaaattatcagcagaggaatgtcctgagtacttcagatggatccaacagagaaaggggcgaaagaaaatatcaataatgctttatttacataagacttaattttaatactatgtcgatttcaattgtcacatctaggctaataggccatggttagagtcatatctaatctaggctaataggccatggacacaagcacataacattattatattttttcagaactgggaaaaagaatccaaggagggttcaagaac

SEQ ID NO: 11697 - DNA, 8279 bp, Vitis vinifera
  Intron number 2 from transcript GSVIVT01018613001 (locus G SVIVG01018613001) derived from phytozome v7.0 (chr-ID chr1 6; pos 12209258 to 12217536)
tgttgatcattgctcaggtgtgctataacttcccctatcatctgtaatttgcatttggtttttgtttggctagggagaaaacgtggaaaagagattaaagatttgaagttgtggattccaagtgtttagaaacaagaagcttaaattttgcttgactgagccaaatttgattatatacatagacacgtatgtgttttcattgactaaaataaccatttcttcaattcttatttctctcttgaatattttgggggttgatttttgatgagtatttgttgtgctaaacaaatttgattttatattcacttataaacttcaaaaccattgcaaatttgtgtgattgtggctgtttgtggttggcggttattgagcaaagattttgtggattatgagtctcagaatcattatctgatcacagttgtttcaatgggattcatttcctgacgacttatttgtttgaaagtacagcttttgcaggaaacattttcccaaaaatatgtgcgtatgttgggcctgaagagatattttacccaaaattaattggagatacatcataaattttcctcaagcttcaaagtaaactatcctttggggaggagagatggattttttatttttattttattttttgaaataatttttttctttttgttgaaataaatgcatgggaaattcatcattcagttgtttgcttcttcaaaagtagtagttgtaccatctacctatgttacataggaaattagttcctgaaatattttgtgttttatgttacatggtactgggtcatctttttcctagacaaagatttccattacagcagaccttccatttttcttctttatggtattctcttctcacccactagggggtaaaagacacagcggatgggcctcccatttttcttcttctttatgatattctgttcttgcccactggagttgattcttcttgggtaacttccttgcacttggccctctaaaatcgagtaggaattgttaactgttctttttcttgtatgatattaccttgcccatatcaactctttagcctaagcttgcccaccaagggtaaaatgccttgccttgcgcttagctgtttaaaaccactgccaaagagctaagtataaagcatgttgaaaatgtgctatttctgggcatgattttcttctattgtgctaaataactggaactagaattctacgagttgctataatgttcaatttcagatagtaactcataggctattattgaataaacccttttcttcccctcgtactgtgcaaggaaaactttgaaatgcttagcagaaattggcttgataggactggatggttcaagtcaacttcaaccagcagatatattggtgatagttgttgagttaacctattgaaacaagatttaattatttaaaagacaaggtctagagtggttaaccatccaagtctgtccgcaggggcatcctactattattctgactttatagtgcaatttgttttaggtattgatgtggcctgtgggaggcttgtctcatttcaactaatccatgtggtctattgtagcaaatattaactaggtgacatatttagtctgttcacacattgagaaatgttccaaccaatgcttgatgtaacagttgtaaaatcattgattaaggttatgataagatgtaagtttttttgataagtaaataagatttgatatataaaagagacgctaaaaaagcgactcaaagaatacaatacctatacacccgccttcaacaagaccaaaagacaaagacaacccaataccacaaacctacttagaacccaaccaatcaataaaattagctatagttagagggcaatcatctatgaacaacttagcctcagcccaaaaagtaagaataaaagagtgtttcagtctttgaattgacaacgaatcattcttgaaagccaatctattcctcgccttccaaatcgtccagaaaatgtgaagaggagcagctctctacgccttcttgcgttttttgcccaggaaaaaaccattccaacttagaagggtctctctaactgaagaaggcaagacccaagacaccccaaataaagtaaaaagtagatcccataacaccctttttcttgaacaatgaagaagaagatggtttatgttctcctctttctcaagacacataaagcatctatttgccaaagcccatcctcttttctggaccatatccaaggttaaggctttgccccacgtagcctcccatgcaaagaaactaatcttgggctgcacattcacattccaaataaagcttgaaggaaacaaagatgaaccacccacttcaagggctacatagagagacttgaccgagaatttaccactcttggtttcagtccaggacaccatatcctccacatcctcaataactctcttaccctgaagcctcgccaaaaatctttccacctcctcgacctcccaatcattgaacgctcttaaaaaacaggggttccaacccccccaacccccctcagccaaggggtctcaaatatctgccacccacgcttccttctcaacagtcaaagcaaaaagagaaggaaatgacatacacagaggagaatcctcacaccatctatccctccaaaaactcacccttctcccattaccaactatgaaagccaacctattactcaccaacttccaatccatccttattcctttccacaaacccataccatgagcctctctcacttcccgagagcaccaacctcctctatcttctccatacttccctctaatcacttgattccacaaggcctttctctcatttgcgaaacgccaattccatttagcaagaagtgccttgttgagaagggaaaggcatttgacccccaatcctcctttcgacttacttaaacacaccaactcccatcttactaaatgaggctttcgctccaaattgcccccaccccaaaggaaatccctttggattttctctaatctccgtctaactgagcttggtaagcacaacaatgacattagatagatgggtaaattcgataatgtgcttcgaataagagtcgccctacctcccttggataaatattgtctcttccacatggctaaccttcttcggaagcgctcttccacaccatcccaaactgtaactaacttaaaaggagcacccaagggcatccccaaataggtggttggaagactacccagactacaaccaaattcccaagcaagatcatccatattctctaccctccctactggaatgagttcacttttttccaaatttattctcaatcctgaagcagcctcaaaccacataagtagccaactgagataagttaattgatcttgtgaaggtttacaaaataccagtgtatcatcagcaaacaacaagtgggaaattaagaccccttcttcactccgacccttcaccctacaacctgataagagatctccctctacaacccttttgaggaaagcactaaagacctccatagctatgacaaagaggtagggggaaaggggatcgccctgtctcaaacccctggagctttggaagaagcctgtaggggttccattgaccaacacagagaaacttgcagtggatatgcaccacttaatccacctgatccatttctcccctaaacccattttttgcataactgtgagaataaaattccagtccactttatcataggccttctctatatccagtttgcacaaaatgccactctcattgttcttaagggccgaatcaatggcttcattagctatcaacactgcatctaggatttgtctaccttccacaaacgccccttgagccttggagatcacctttccaaccaccttttttagcctattggctaagaccttggccagccacttgtacaagcttcccaccaagcttataggcctaaaatcccctaacgcttcagcccctgctttttttggaattaagaccataaaggttgcgtttaggcttttaacaaatttaccattttcatagaatttcttgaaaaaacacatcacatcagccttcacgaaatcccaagcaaattgccaaaaggccatagagaatccatctggccccggggctttatccccattatagcccaatagagcgtcgaagactcctcttccgtaaaaggagtctccaatgcactagcgtccagagactccaacgtctcaaactgcagcctggaaacagaagggcgccattcctcgggttagacaacaacatcttaaaagcattgacaatctcttccctaatatcattctcctccgtaagccaggctccgttaatcttaattttgtccacgttattcctcctcctatgagcattggccatcttgtggaagaaaccggtatttctatccccttcttttagccacacttccctagatttttgcctccacgtgatttcttcaagtaagacccattttttatattcttccctcgcttcatttctagcttccagctcttccaacgacagtctattgattttatcctttgcatcccaatactccatctgctccaaagccatattctttctatattcaacccttccaaaggtgtttctgttccactccttcagcttagccttcagaaattttagttttttggccaagataaaacttggggatccactgaagctgccttcctcccaccaatacttcaataggtcctttacaccttccactttcaaccacatgttctcaaatctgaacggggtagggcctcttctcagccccccttcgcccataagaagcggaaagtggtcggacacgggtcttggtagaacaaactgcctcgcatctccaaagtgactgtcccacctctcattaaccaaaaagcaatccagccttgaaaaagactggttattcgcccctccagtccaagtaaaagggcccccaaccataggcagatcctttaactctaggtcttctataacttctgagaatcttctcatgattgaattcaagctccttcctctgctgtgctattccggacttagaatgacattaaaatcccctgcaacacactatggcccattccaaagccccttaatggcccccaactcctcccaaaaactctccctcttcctcctcaaagttggcctataaacccctgtaaacgtccatataaaaccatcctcgcagctcttaaaagtgcacgaaatagagaacaatcctttttgcaagtcaaccaactccaacaccctgttatcccaaaacaccactattcctccggctgcaccccttgaatctacagctccctattcaagaaatctacccgctcctaaactacgaacaatgcccgttgacatttcctgaatcttggtttcctgtaggcaaaccagatccaccctatttttctttatcaaagctttgatcaccttcctcttgtcgcaattattggcccctcttacattccaggtaagcatatggagcttcatttagtcttgctcgtactcccccccttctcctcctcctccaatatagtttactgtccattccaactttctcaattctctttcgaattttgatgactctaatttcctcctttttctaccatccaactttcctttttgaagcttcctctctttcattcttttaagcaaaaacaagatttccccttcgaagccctctgtcggcattcctagatagcggctaaatttagccaagctactagaatgccaacatagttccccctcttcgaccctctcctcctcatcctcttgggagaccctttccgaaatcccctctgaagcctccttggaagtcccagactccctacccgccaaatccgagacctcggcctcccttccatccgccaatatcatccttaacgggcccatagcagctcccccttcagcttctgaaacttttccccggtcagaaaccctagccatgacaacactttccccctcccacccagaaggagtagaaaaaagagagatttcccgcttccccaaagaaaacaaaggatgagagatttgatcagaatacttggaagcctcctccaacaacgcctcgtcagtgatttatgagggattaacggccagacggagcgaccccagatgggaaccaaacaaattcccctcctgctctccgccgacactgagacgcccattggaagccctaaccccttttaagttcttcagaatgggtcgtcccacccccaccaggcctttagaaggctctgaattgggctggcccatctcctctgattttttaaaatcatcaatcacttagccctccacaacgagctctctttcccagcccgattctctttgctggcccaacgacagatttcctctaggcccgaagcaagagcttttcccccaagctgaaaattggcttcctgttgtcctgttagcctctgtttctgtttccgacatagtactagagggctgagctttctttctacagcctccttcacctactttgcacggctcaaccacttttgcaggttccccatgcatctgttccctcactattttgaatccagcgcgtgaatctccttctccatcatccctaacctcccgctccttacccttctcatttttgatcaccggaaccacttccgacagccctggtttcacctcccaccatagctggaaagcataacaaagggacccaactactacttgcaaggagctcggccactctaagccttcatatctcactaataatctggcccattgtagttccttaaagttagcagtgttttcatccactgcgacgaaccccccacaacagtccccgatttttctaaaagcttcctgactccaaaaatgcaccggcaagcccacaactctcacccaaacactcttgtctctctcgccattttgagaacaccccacttttgggtcccacctatccaagtgcaggctcgattccttgaaccatcggtttcctcttaaaagcaccttatctgcctcttctttattctcaaactcgatcagcaagagagggccccctagccttgcaaacttcaaccctcctttaatattccacatggatctcccccaactttcaagagcagacatatctggatccgagagcagacatatctggatccgacagcggagtctacccccatcttccaaccagacatcggtccattaacttcctctcgcttgggatatctttctcccccaactgtaaccatacttcttcccctaactttttcactcttgttttcaccacatcaacataggatttttgggcttcccctcagattccccaactgtacttcctgtcccataggaagcagcatttcccctaggctcatcccgagacaaaacaccaaggaaacgaagcttttcagccaacaaaatccatcctcccaaaataccttttccttctggaaacactaaacaatatctctttgattccaggtcaaccacaaaacacaataagaacctacctgcctcatttgctcgactttccagcttaaacctccttcctccatcccctcaccttttaacaagaccctgcacaatatcacccctacagcaagcctccaccccttccaacaaacagcacaaactgagacttccaaacctgacccacgaagtaaaacctctgctcctttccacaattattcccttacatctctccccatacacctctacagaaatttcaaaggattttgagtccattgcaaaccagcatctgcctcctcttttagcaggcatctcctactgattagcagcttgaaaatgcagtattaatagcatcctacatttctcagaatcctaaacagcataatcaggatcagtcacacttagagccttcttggagtcatccaaatatctcatcttgccttgatctttgttaaagaaccttactggttatgtccaacacagaaaattttccatcaatattagaaagtaggccaagctttagtttctacaacaggtcacttctgtgtcttcaacttcaaattgtgcacaaggaaccatatcatcagccaaacccatttaactcatgtgaaatttgacactaattgtatgtcttgaatggtttttgaaacagcacctgcatctcatttgaattatcagattgaatcttatgatcctcattttaaattataacattttaccaacatcattcaaaatgtcattcataggagtttttatgtgaatgaagtcaacttatttattttccggcttttcttcatataattccatttttttgaacccaatagtactagacatcaagttggctatttcttgatgcaggctatcattcatttgataggtgggctgagcagatt

SEQ ID NO: 11698 - DNA, 613 bp, Vitis vinifera
  Intron number 4 from transcript GSVIVT01017186001 (locus G SVIVG01017186001) derived from phytozome v7.0 (chr-ID chr9 ; pos 5140659 to 5141271 reverse strand)
tattattgacaatgtttttctgatagtaagttcttctgtagtctctaatattattacctttttcatgtgactgtttttcttttaaatatcattagcattgtgtgtgtgtatatatatagttggtaggatagggttctatttgaaaagtgtttttttgaaaacaatttttaaaaataatttttgaaaattgttgtttgattttttataaaacaaaagcctatttaaaaatctaaaatatttttaacttgtttcttatattttaaaaataatttttatatacagtgttttatttttaatcattcttcgtatttgtatgacttttttaaaaataatcctttaaaaaaagtgaaaacaattaaagaattgaaaatacaatgtttttgttttctattatcaaacttgttttcttgtttttttattttttaatttttaatttttaatttttattctggagactaaaaattgtttttaaaaacaattatcaatagagcctaatacttcatttgagtgatagttattgttttaattaatttctatgctcattattgctttaataatttattttttaataagcaaagaaaatacaggtccacaaaaaagtttacaccaagtt

SEQ ID NO: 11699 - DNA, 3795 bp, Vitis vinifera
  Intron number 1 from transcript GSVIVT01013678001 (locus G SVIVG01013678001) derived from phytozome v7.0 (chr-ID chr1 8_random; pos 2480944 to 2484738 reverse strand)
gatccgtcatttccattgacggagagcctaaggtatgcctgaaatttttgccacaacaattgcaatctttcaaactctctcaagtgaaaacaaaatagaaaagttatgctattgattttctgttttttcttagatcatttgggcatttcgttttctattctagccaccatataatggaatgtaatatgcaaaattgaaaaaaaaggaaaaaaaaagggagaaaaatcgacccttgtctcagaagctcgggaccaaataggggagtttgaatgcaatataatgttgtagaaagttgattgtgtttattttggatgccctggtgtctttagatacgatgctgaaaattcatagtcaattgagaacgatttagtttagcagtaaattatggttatgtgggaacatcttcaaggaagaatgagttctgggtgtgattttgttcatgaaagtagggctttgtttggcgttgacagggcttttctcattctttgggaataaaacttgatctcttggttatcacaagtgaatatataaaagtagatgaacagagtgaatggcttaaaaggagaaggagtgggtggctcctatcaaccatagaacttcctaatgagtgaggatgtgttaagtttgtcagcaaacatttaaaatcagatgtagtgatcgaattactttatattaataaaaggaagcatcatccaaggatctatgatggattttgatgtcctcttcccaattgtgaagaaaagtttaagaagctccactattttatgctccttgattctgataccattgttgtagtggttatcacttagataccttaatgtcatgtcatgagagatttaaatgaccctccgggattgtgatttttgcatggttttgtatgacctataagatgtgtgtgtgtatgtgtttttttttttttttttgggatagcaaatagagcatctattaataaaaagtgccaagaaaagggggcacatccaaagcatataggcagtatacacaaagcaaaataaaaagaaaaaatagatgtctacaaaaagacagcctttgaaaaacctaaaccagccacagttaaggctatctaagaattccatcatcgaaaaatttgccatttccaaggaaacatatgggattgctgaagttctgttttttattattatttttttttggataggcaaagatagaatatattaaagtgcctgacaaaaggcgataaaaggtatgacctttaatctttgatctaaaagctcttctccattgaaaattctgtggtttcactctttctagatgcaccaaaacaaacataggggatccattcacaaaatatgatgtctcttcttatccacacatggtggctttgctattagatgctttaacttatttgtacttgaggttgatgggaatttgttgttgcttgttatttgtttagttgctggtttcatatggtttgtggttgatccttcatggatgacattagaatagcaatcaattgtatcaaggatgtagaagtgtgtatattgtgcatatcttgtgatattttcttaccgttttttatgcttcaagaggattggggttgtgtggtgatgctgccctcggatatcttggttcaatatgtgggagtggtggcgtactttaaggcaactgaaacctcataagcaaaattatcccacttacaactttgagttggaaacaaagatctttgcatagaatatttggaggcattctctatatgggagatatatgagatttatatagatcaaaagggttggaagcatatattcttgtaggagttgaatctgaagcggagtagatggattgactttatgaaagatattgcaccattctgcatcatctggtgaagctcatgtcatagcagatgtagtaagtaggaagcctcttagttatctggtggaactgagcacaagtcataggcgttagaggatttttgcaatgaaaatttggaggcattatctatatgttggggaatatgagatctacaaatcacaagaatctaaaagtttcctgcaaacagtagaatttaaggtagaagaggtggatttagttgatgaaagataatgattacagcatccgtaatcatataacaaagtcagtgttttagaaaatatactcaaatggtaaatcctatagttatatggtagctttgagtgcaagttagaggccctagtttgatattttgaagaggcttaaagtgagtattaggatttgggattatggatactgcttactcctattcggttttagctgacctaggtagaaacgatcttactaactcaatgtagtaatccttagttcacttacagaggttagatggatggcaaactagagttttcagtccgagaaaatacaggtgcaagctcgatgtggtagatttgagtgaatttctggagcctttgtgttcgatatgcaatgcatcttgatggtacatgatgcacctagatttggggggagatttattggggattttgttgtttgtggttcagcttctgacatgacagcaggtgaagtcgagcatcagagacctactggattggaacagtttctccatattctggagatgttttattttttttggtggtggggggttggtttaccaaaagacgcacagggttcaagtctcatatgtttctgttagggatctaccattgatgttgttatttctgctaatcaggatattaaggatctctcacgtgagcacccactagatgagctggagttgaaaagacgatggagaaataagcgataacaaattctccactcccttaaagaatacatctgttggggctgatcactgacatttactttcttatgagcctctatacctattggaatggcttttggttgctttagatctccaagttagtttaactaacataacacaagtcagattatccatttttgaagagaaaaagggctttgaggcttgtcagggtgcccaattggttaaggcgaatgccagaatatgtggtagaggtgcacgctcttgggttcgattcgtattgttggtcgaatgccctggattatttggtgctagttatggctgacgtgattagcaccctgaggtttagatcactatgaagagtctgaagggctcggccatagaaggttccctcggttatccaaaaaaagaaggagaaagggctttgaggagaaaaagacttcaacttgttgaaggattaatatctttccagggagcggataaaaccgcattctcaaaagaaataaggagagagattcaatttagaatttcccacactttgagattctatgaaattaaagtactaagatggagtgttattgaaaagagtacaatgagaaaactagggggtctttccttcccaaaagagcataaagccaggttagaagaagaaaagggaaaattacctcaacaaatatctttccatgagcttcattttagatttgttgctgataattggcctaatattttggttctttcttgcaacatatgtttatatattttttcagtacttccacatgtgcaaaaaagaaactttgtgatagagaataataggaaaaagatgcacaatacattttatgagtaggacaactatgcctgcatcttcaacacttatgcaccctgatgccgtttgtgtcttcttttctgcctaatacagagcttttcaatgtctacatgccttttcatctttaatgtatgagtatatgcacagacacaccatgaagggtgttatattcgtatctcatttacattctctgactgcaggactcaccgatcaaacctgtatccaaaattttgtt

SEQ ID NO: 11700 - DNA, 14118 bp, Vitis vinifera
  Intron number 4 from transcript GSVIVT01029934001 (locus G SVIVG01029934001) derived from phytozome v7.0 (chr-ID chr8 ; pos 1700976 to 1715093)
ggatattggtaagctctttcagatactctatgtacttatttttattgtagtgtagtcgcatgctggtagcttattattcctattttatattttgtcctattgttccaaatatcataaaattccttataaattatgtatatatgctcgttttcttattaacttgacttatttataagtatactaaatggtggaaattcgataaaaagagtcagagttgatgaaacgattatttcattagtttatcatctatctagctattttttttttttttaaaaaaaaaatcttttttgctttctaaattgtaatgaagtagctatcttgtttttgagtttttcttatggagtttattcttaaaggtaaatatgtaaggatgaatgaaatttgatgaagtttgaacattggagggaatgacttgaaacgggtttgtgtgagggactaagacatagggtatattagtagtattagtaagaaaatgacctaggcaaatttcacaattatgtccttttcgtttttattgtgtacaattgaatttagtacgatcttaattaaaaggatttactgtagctttgatgatatggtaaatagcataaaattaacggattaaataacctaaattcttgatggttaaatcttctagtttcacaccttattgttccatatagacaatatggtttgctttgtgacctactattacaactttaaatctagaagactcatatgtatgtattctagcaatttcttcctcctaagcgatttgtgacataatatccaccatctcatatgggcatgacatgctcattcatctcattgctcataagatactaaactctacatagttccaactaggaattcactttgataccatctaccatgacccttttgttgagttatgtagcctaattatattgtacacccttccccatgaccacaaattgacctgttgcactatgttacatgcctattgcaattcattgcatgtatgttgagttttaagaggtattttaggcattcaatgcatgcattaatctactctaattttcacattacataaggattattaaggcaaccatttttctataagaggaaaaacagaggagagacaattagctataaggcatgagatcatcttatatttttctttctgatcataatggaaaatctttagtgacaaagtggacatagttctcacattgagggctaaccactataaatcatgtgtttgctctatctgtagggttaaccactattaatcatgtgtttgtttgtttgttttttttttttgttttataaatagggattttttcttaataaatggtatcaacgccgtttttaactgagagtaatggtcggaaaagatggatctaggcccaaaattgacaagttcaatggtatggattttggattttggagaatgaaaataaaaaaattatctttagtaaaaagttgcatcctttcttcttggaatcaatgtcgagcacaaattagagtctcattgataaacaagtgtttggagtcatttgattgacactatcaaagaacatggcaatttatatggtgaaagagaaaattacaaggggctaatggaggtcttgtctaacatttatgagaagccttttgcaaataacaaggtacatctcttgaaaaaattattaaactgaagatgggagaatgtgctaatggcaaaacatctaaatgaatttaacatgattgttaatcaattatccttaattgaaatcaatttcgaagatgaagtttgtgctctaattctttagacatcactaccaaatagttagaagcccaggggagcaatggtttataattatatggattctcaagtatttatgaggtattatagatttagccctttattttaggaaatcggacttgggtctaccatgctaagttaatgttgatatagttagtgataatgatagcatgaagagtaatactaggtatgtatacatgattgatggaatagcagttagttagatcttaaagctacaaaatattattactctctatactattgaggaagaatatgttattgtgattgaaactagcaggatttagtatggttaaaaagtttcttggaggagtcatatcaaaaaaataggaaaaacactttgaaaaggtgaatctcaatagtagtggaatacaccgagaaatggaggggggggggaaggagaggtgggtgaataggtgttttgaccaattaaacaaaatctcaactcaaatgagcaaaccttaaaactttttgaatgtttttcctctcttcacacagtctcaaaaacacaaattataaatcacatgtatatatgaatgcaacaacacttcccaacaatattaaaatgcagttcacatgcacatgatctagcactcccacactcaaatcaacttaaactaaattataattaaaacaagatcaatatacctcaaaatgtcaatgatcaacaattagaaacaacttcaatgatggctcatagctatttctcttcatcattcaatcaaatagtagacaatcaaaattataataaattgctgaaactaaaaactgatgttaagaagagaaagagagacaatgagacaccataaatttatgttgaaaatctttgaagagataaaaaaccacgggcctactactgatcgaaaatatccactatgaagaataaaaaatgaatataaggttttacccagctcaaaccaaccaattattcctggaccacttgactagtaccttcacttttagcttctcacctttttcttccaaagcacacttggagtctacaccaagctcgatctcgacatcttctttaattcacagaaaaataaaatggatttttgcataaaactaagagaataagagatgaatgttttagaaatcagcccatgttcatttttagaaaatccatttaaaaaaaattcttggaaaacttagatggattttctttgtaggtaaacaccctcaaaatggtgaggaaagaaagactctttcatggttgttgtagtcaccacctttagaaattggagaaatttgattttaaatgagaatgaaaaccttaatccaagggctgaaaatggatattaaaaataggtttgttagatcgatttgtccctgtacctaggtcgatctagaaacaagggaacaaaagccttgcaccaaaaatatttctcctagttttcttaactcatttaaagatgaaaaaaaaaaaaaaggattgattcacattcaatcaccacacacttggttacataccttgacctcttagcaaagtcttaatcttcaaaggtcaagtagtccgaagagggattggtaaatcgagttagaggacacataggaattttgtccggaattgccaacctagataaacactcataatctctccgtttggaaattctaggacaaaaccctttacaacacgaatgagtacaagtaagtaaaccccacccaactctcatacaaggccactcatacactcaaaacctcaccaaagctactacaatacctacaaatgaatctcaagaaaaacattagtagcacctatacatattaccaagacactttcacaagtttcaaatgaattgacacacaaatatccacatatatccacaaaaatcacttgtctaaagatagtcaatatgcattcatgcgttcaaaaccatgtcaaatatccatagatatacacaaaaaaaggtgatcatgatcaacatatcaaatatccaaagcaacaaaacacaaagaaactgtcatgatcaactacatgttatatcaacatccaagtaaaatgtaaaatgtaaaatgtcttccattctttgtcccaaaagaagacaaagatcacttaagatctgtccaaaacaagcaaaatatatgaaactatcaaactgaacatgatatcaaaaggaagttgtccaaaaagataactagcagctacacagctaagagagaagtttgtggacaaagtcttcaagatcttgcaactgatccatgttgcatagcatttgtccatcaattagtgagaagtctctctccatatgagattggagttgagaaatctattcagacaacaaggtgggttgtgtagaaattttctcatccaatgcatcaaacttagcacaaagttgagcttagacacttgaatccgagtcaccttcaccaatttggatcttagctctacgatgacacaccttcttcttagaactaagggcaccctcaatctgtctttgacttcgattccaagatgaggtatcaatgggacccattggtttgagaaatgaagaatgtacaagaaattccaccgagctctttggcaaatttttgtgattaaaatgctaaagggaataatcttctttttagacacgaaaggatctcattgaacaatcatctcatctaagatgcaagatactaggttgatcggttcccaatgaaaaatgcaggactagagaatgcaaatccttcttacaaatatgtgcccgataagaagatggataaacagagaatgttagaaaggtcgtcaacacctatgcaagatgagatatgctactagtgtgtacaattgagactagctgacctcgaacctctccccataagtcaatagccactctatctaacagctcagaagtgaattccaattcactcataaagggtgcttcaaccaataggatgcctaagacttcagtaatcacctttggagtggctttaacaacaattctaaagagacttaactttaggtaggactcatccaagtcatgttcaataatcttcaaataaaacatttggacaacaggagcacacacaatcctagtgaagcctgcaagatgaatccaacctagttctacaaacagtgctggaattggtgtgtcgagaaatgattttagatgaagtcgtttgttaacaacaagagacctctgatgataaaccttagtgtataagtctctacataatttttccaagaaatcattgaaaacaatcctatctatggaagttttcgcaggagccttagggatactaggagtctgaataggtggattgatgggtaaattctcatcttaagcactttttggggtcttaaaggatgaccctttaactagggccttgtttccacgacctttcagaggtatagttttgaaaacacgtactctgaagaccaatagaataggaagacccgatgcccattcaaacccttgctggaaagcttgagtagaaacccaatatagacacacaagactattggaggatgacaaacttgtataaatagaagtagtggttgttgaaaaaaaaccttgtaaaggaaaagacacaaccacaagaagaagaacacacaaaaatggtgtcggcaacaacatatggagcaccagccgaccacaaatgctggaacacaggccgatgaaagtaattagattgaacatgttgttttgaacaatggtctcaagggtagattgcgattttcagttgtgacaataggatgtaatcttgtggtaggacgttgaaaagatgccaaccgtaagtgagacacacagtttggcgataaaaggtgaaaaaaaatgtgttgtgcaaagaatggaaatgatgtgttgtgagataatctagcgaaaaagatcgaaaatggcaaaaagaaaacaccagcaacaagataaggagcatagtgtgctagctatgcaaaccgctattagcttaagaagattatgatggaatgactaaaaaagaaaagttggcaatggccggaaaggaaatccggtgacattgggcaaaaaagaagcataaaaactagagtgatgagttgtgttgaacggcaatggcggagagcttcgacaatgatatttttgccaaaagtgatcggaatgaagaactggtggcgatagctagagaggatgcgcaaaaaagaatgatatcttctctagaagaaatgacttagggctttttagagaaatgaaaggaaaaattttggggattttgactttttcacctttaaaccatatgagtataatcagctaggggcaaaaattgattttttcacaaatccataagtggtatcgatcttggtggatcgatcaagctttcgatcgtgagttctcggttatacacagtcacataggtttgaacatgccaaatttgaaaaaaaaaaaaaggctaagtgtgtgaaaaacaaggaataagtggtatcaatcttggtggatcgatccaggatttgttcaagggctctcggtcacaagattatgcacatagtgaatcgatccacaaattcagcagatcgatccacaccctattgaaaaacgacttaggcaaaaactgacgaaaaatcataagaaacacaccaacaagctttccaaaaattgaaaattgatcaaccaaagttgatatacaataggatgacatacttatctttcattcaataagttagaattgattcatattgaacaaaaatgcttccaagaacttaacaatagacaaaattaacaaacatagagattgaagaacctttcgaatttatcaaatgaattagtaaaaaacaaatgattatcaacactctaacaagaaaacttaagctcaaagaagacttactcatgacactataaaacagtgagaatgttaatttctatccacttatgaacatatatctatccatgaggcaaaaatcattttcaagatgcttttccttcataaagaaattcaagataatattccaagaagtcaatttgcacctctcttggatggatttctgttcatacctcattttcttttcacatttagcattaaaagaaatacaaagatatagactttacccttaagatctatttttttttttttttttgacttgaggatctctaaggatgcctttacaatgtaacaacataagatatgtcccactatttcaatgaaggctttttaattcttgaaacattgccaatgaaccataaccattccgagaaacttcatattttttttcttttattttttttccattttttttatacttaatttcaaagagaaggcaaacaatcaaggaacgatcatctcaaccactcaaggaatttctaggtgacttttctcactctttaatgctcattaaataggtataagtttacatttagactttaaagagcattattcaccatttatacaatcacaaggttcaaccatgagcttttactcacttaaaagaaatgaagctaaccttttatggtttatctaatcaaatcaaaatagtaaggattccatatcatgtttatcaatcaagccatggagataaagacattttgaagcttttaagatcattaagagtcaatctaacttttaaacaaaagactaagcatgtcactctcatgaactttgcaattttagaaaatttatgaaaaatggagaaaatattgaaccaaaacataaagaacatcaacttgatgacatttaggaacttgagaacacaactaggactcaaagatatgcaagaagatgtctgagataagttctagaggacgttaattgagtgtacataagcctatggatcttctaagcgattcaaacctagacacatccaaaggtttagtgagaatatcaacaatttgactctattggaacatattccaaggaaacaattttgtcttcaactaaatcacgaatgaagtgatgtctaatgtcaatgtgttttgttctagagtgaaaaatagggttcttggagatgttgatggcactagtattgtcacaaaacacaaccatggttccttggtcaattccatagtctttcaacatttgcttgatctatagaaggttagagcaacatcttccgacggtaatatatacaacttcaactattgagagtgaaatagagttttgtttcttactaatccaagcaaccaagcaatttcctatataaaaacaaccacctgaagtgcttttcctatcatccacatttcaagcccaatcaatatcagtgtagcaagctacatcaaaatgaatgttaaacggataccaaaggcctagctataaaatactagcaatgtacctaataatgcgcttaaaagctatgaaatgagattccttaggacatgcttgatacctagcacatgctccaacactaaaagctatgtcaggtctactagcagtgaagtataagaggctaccaatcatgctcctatacaattttttctctaccatttttccaaatttatccttacttagctttagattggtaggcattggtgtcctaaagtgtttggccgactcaagtccaaacttcttaccaagtttcctagcataattggattgggataagaaaatcccatccttgagttgtttcacttggaaaccaagaaagtaggtcaattcccttaccatgcttatttcaaactcacttttcatctctttggcaaaatctaaagcacactcactgaaggtagagccaaacactatgtcatccatctagatttgtgataccaagaacacttcatcatttcttctaatgaacaatgtttgatcaatttcccttctcatgaatcatttcttaagaagataggatgtgagtctttcatgccaagctttaggagcttgctttaaaccatagagaatttttttaagtctatagacattaggatacctagggtcttgaaaccctttatgttgctccacatacacttcttcattgaggatcccattaagaaagacacttctgacatccatttgaaacaatttaaatttccatacagaaactacaactaaaagtattcgaatggattcaagtcttgcaaccagagcaaaggtttcatcaaaatcaattccctcaatttgcttaaacccttgagcaaccaacctaactttatttctcacaatcacaccattttcatccattttatttttgaaaatccatgttgttccaatgacattcacatattttggtttaggcaataagaaccaaacttcatttctagaaaattgatttagctcttcatgaagagcctctacccaagcttcatcattcaaggtttctttaacatttttttggttcaatttgggaggtataacaaacatagcttatctcgtttagcttggattgtctcattgttaccatattatcctcatagttcccaatcacattgctcaatggatggttcttaggtacccttgatttatttgtctttgatggctcaatcctccccttatattttttctttccttgcttttatctcttttattccttttcacttaacttttcatttttagatttttcttcaattacttcaatatcttttgacacatcaattctatctttatcacactctcttgaccttgatcctagatcatccataattacattgattgattccaccatacaaaatgtatactctatatgcttgatttttggaggaatatcctaagaatatcctcttttcactattggattcaaactttccaagattttcatgatctttcaagacatagtatctacttccaaacactctaaagtacttcatactaggttatttttacctttccacaactcataacaagccttcctagtgtgaatattgacaaacaacataacaattatctaaagttctcaaaccaatcatcacacaatttccattcaaatcaaacactttatataaattttgtgaatattgaacattgaacttcttgtcacatatttgactaatgctaatcaagttggctttcaatccttccacatataagatctctccaatgctaatcatatttaactttttttttctctctttaaggctttaatctcattgattaaacttttttagaagtcttcctgattcgtccccattgcagtcatgccatttgattctggctcagactggtgtaatcaaaatttataaaacctaaatcaccccatactagggtagcataactaatatagtatagtggctttaggatcgtccacaatgatgagttttcatcgtacaattgacttaaatgaaggaaataaaatgatgttttttcttatgaaaatggaattgtggttgcaaagattgattttaagttaagcaaaaacaataagtgaaattaactacaaagaaaaagtctcttggagctttaggtcactaggatcaagttccttaggcaaagggggagattccggatcttctcctcgcgttggggataataacataaaggatggttatctcccgaaccggttttatatttagcaattatgatttgatccaaaggtttcaaacactaaagattcttaccttgaaccatcttccaatggctcgtaaatgataactaatagacatccatggatctagtaataagcatccatggaatccgaaaagcttaccaagtattggccattcaaggtgcttttaagggatttaaaactaaatcttaaaataaaaaccattaatggtgaacaacttctttcatttaaagtaaggacaactcccatctttgcattcaaatccttcacctagcttctctcactctaagaaacgtaaaacctagccactcatcccctgagaaatcatcctcaaaggttgtttggctagaaggaaaagtgaaaacaaaatgagaaggaaagacagatcaaaagctctgtatatttcttactacgagaattttacaagtgtttaatgaaaaacatccatcctctctccctctgtctctccccttatatataagctacctaaaagatatataaaaagatataaaagaaaatagctaggttggtcacaaggagaaactaggaaattacacaaaatatctgaagataaaaatctaatggagtcggtgcacaggaagatttcgcataccatgcgaaatttggcatggtgtgcgaaatcctttggctacctcaagtggtttcgcatggtgtgcgaaatttcgcacaaccatgcgaaaatgctagtagttggatttcttcctctggttttcttccttgcatatttgattagcttggcaaatggctatgaagtgctccaaagcttggatattcatgtatttgagcttcaacttgtattgccatggatttcacaaaattctccctcattcttggcttatttcaatgatcaaatagctaccaaaaacaccaaaacttgccaaaaacttattagtaacccttgttaggttccttaatgtgccaattgagttaaaaggtattaactactactcaaaagtatttaaaacagttagtttcaagctataaaagagtactttttgagtagtaatcacttccactcaacttgttcttgtttgagacttaagcactccttatacaaagtctcatatgcaaagtcaaaactcatctcatcaccatcggagtcacttgactcacaagactcactaagaacctctttcttgagtggttcctcaatgacacttgccataaaggctttgaaattagcgcattcatcacttgcattggattttctttcacttgattgatatgattttatgtcactccaagtgacttgtatggctttctttccttttttctttgaggaacattcggtggcatagtgctcatttcccccacacttgaagcactcaacttcaaggtcctttttaacactcttgtctttctttttatcttttacatttgatttttcccattgaattgttccatgttttagcatcttccttagacgtcttcttatatttcctaaacttcatgtattttttgaattttctagcaaatctagcaacttctccatccaacattttctcatcaccctcacctttgaaacctaaggacttctctttaatggcattcaaggcaatgtcctttgatttactaggtgatctaagagtcatttcaaaggtttggagtgaatcgaaaagttcatctactttcaaggaatccacatccttggactcttcaatgacggtgacttttactctaaatctcttcggaagatatcttagaatttttctaaccactttggagttaggaatggactcacctagattaaagctagaattcacaatgtccatcaattttgcatgaaaccctccaaagttctcatgatctttcatcctaattgtctcaaacgtagaggtcaacatttgaagtttgggcagtttcacagcattagttccttcataagtcacttcgatgatatcccaaacctctttagctgaagtacatgtggctattctacgaaattcatctatgctaatgacattaaagatgaaatacatggatctaacattgttctcactagcttcattatcacctctatcgcattccaacttaggcttgataacattagttggtctaccttctctatccaacaccttaggtgtagaccaaccaaattcaacggcattccaaattttttcactttacattttgagaaaatattgcattctcactttccaataagaatatttttttccagttaagaatggtggtctcccaatggaagctaccattaatgaggtttcttaattgagattcaaggatcaaaaatgatttttgtttttaaaaacctgctcttataccaattgaaaatgtgaatctcaatagtggaatacacctaaagagggggaggagaggagggtgaataggtgttttgaccaattaaacaaaatctcaacatcaattagcaaaccttaaaactttttgaatgtttttattctcttcacacagtctcaaaaacacaaattataaatcacatgcatatatgaatgcaaatattattaaaatgcagttcatatgcacatgatccaacactctcaaactcaaatcaacttaaactaaattatgataaaaatgagatcaatatacctcaaaatgtcaatgatcaacaatcagaaacaatttcaaagatgattcatagccatttattttcatcattcaatcaaatattagacaatcaaaattttaataaagtgctgaaactaaaaacttatgctaagaagagaaagagagataatgagataccataaatttacgtgaaaaatctctgaaaagataaaaaaccaagggcctacaaccgattgaaaatatccactatgaagaataaaaaccaaatataaggttttacctaactcaagtcaaccaatccttcccggactacttgactagtaccttcattttcaacttttgaccttcttcttccagagcacacttggattttgcaccaagctcaatcatggtctcttcttgaattcacacaagaagaaaatgggtttttgagcaaaaccaagagaatgagagatgaatgttttataaatcaacccatgttcattttcataaaatctattaaaaaaaaaattcttggaaaccttggatgaattttctttataggcaaacacccttaaaatggtgaggaaagaaagactttctcacggctgttgcagccaccacctctagaaataggagaaatttgattttaaatgagaataaaagcccttaattcaatggcggaaaattcatattaaaaacatgttagttcgatcgatctgcccttgcacctggatcgacccaaaaacaggggaacaaaagccttgcaccaaaaatatttctcccaactttcttaactcatttaaagatgaaaaaaaaaacagagttgattcacatttaatcaccacacactcagctacatacctcggcctcttagcaaaatcttaatcttcaaaggtcaagtagtccgaagagggattggtaaaacgagttaggggacacttagaaattttttctgaaattgccaacctagctaaacactcacacactttatattgtaataattagagtgttgttcacttagcaaagaatcttgttcatcataccaagagaaagcataaatagattcgatatcattacatacaaccagttttagaaggtagagttttggttcttgagaagattaagtatgtcaaaatcaaaactaatatgataatgagaagtagtagagaagttgaagttttgttcaacttcaattgaatttgtcactcaaggaatgaggagttgctggctataggagacatttagtggtggcttactctctaagtatgaaattattgaattgtgtggagcttaattatactactctttcccatgattgcacattgacctattgtgttatgttgcgcgtgagttcctaatagaataccttttatttcattcattcattcattcttcttttttattataggtgggc

SEQ ID NO: 11701 - DNA, 14045 bp, Vitis vinifera
  Intron number 5 from transcript GSVIVT01003080001 (locus G SVIVG01003080001) derived from phytozome v7.0 (chr-ID chr1 2; pos 8448642 to 8462686)
atttgttttcctgcaactttttgaagacatcaaaggtgttttccaaatcttcattcattttcaggaaaaaagaggacaattaatctgtgttttagatctgctccttttagtggttgttttcaccattcttctctgcatgagctgtccttgatttttataggatgctaatactctgaaataattggtttctaggttttatctgctcttgaccaattaataaaaggatagaaaagatttttttaaattggtaaaggttgggttcttgttcttttatgtgttcctgtaacattcataaatgtagcatgatagagatattagtgagaaccttttaggacaaatgtagctaaaaatgtaattgtcactcccacttcagatgtaaccattggtgcaactgttgatctgattattccagccataattagtgccatacatgtatcatgatagggatcgttactctttttttcaactggtccttgtgttcctcaaataaaatctcttaattattgttaaggctgctgaaaggtgggatatgaggcacactcagtgatgggtttagctcttcttttctgcatgtccttggaaattttcaattcagacatctcacagatggacggagtggatttatcacatgaacaccattccttgtatgttacaagttatttcttcattgcgctgtactccaattgttactattctccccttctccattaccatgacaggtctttatgaagtaacacaaatgagaatgaaaaaggtgttaagagatcctactcctttccacgaggtagcagggggagaaggtagcatgaatttgactccccttctgtgtaagataactagggaaaaaaaaccagtcagtccaattccccagcacatgaaatctgattgtggataaaccccatcatctctgtgaaatgagaaatctcagtttagacaactgtggaacttctcaatatccaacttaccggtcacatctgctctggtgctttgaaatctggagtcatatagctccattggtagcaagaactgcaccaaggatccaccttttcacaaaagcattatgagattcagatgccaccttcctgatgactttcctcaatccactggtctagatctttactagaagtctgtttagaactccaaccaaactaattgactaaaatttgatttccattacactgctcttcttgggcgccaacaccaagaaggctgccttttcaaccatttctgtagcttgcaatttgtgatccatgcatgttatccatgtctagacgctaattatggtacataactggggaaagattggagattcattgccatatgaaaagattggagattcactactgaaaatttagaagtatcatccatattgagaatattttagaatattttattctttgaattatttcctatgaataggctattcccttaaatggatttagaccattgtatctgtaaatatgattatatgcacatggtagatatatgaatcataaattcattctcaattcatctttgtgttcacggtatcatttaggaattcatttaccttccccaaaaaatcatcttcagggggagagtattgagagagaatatcctttttgggaagaaatgggacccttacccgtgtcattaccaagtaacccacaaaaatcatactcataaatgttacccattgtccagcctttacctaatggaccaagcattatagattctaattcaaggggggaaccactacaaaaataaaaaaataaaaaaaataaaccgagctacatgtctactctcgaaggaaaagtgattagaatagagaatcccaaacataagccaagcaactcctttgagtgatgaccctctgaatgaaacaggtatcttttcactagacccaagttcaattcctaaatctagtaatctagatagtgcttcacatgacctcagtgttcccattgcacttagaaagggcgcacattcctgcactatgcatctcattgcaaagtatgtctcattccatagactttcttagaactataaagcctttacttctaatctctttagtgttccactgcttaaaactatacaggaagccttgggtcacactgaatgcaagataacaatcatggaagagatgaaagctcttaagaagaatggtacctagaaaattgttgaattgccaagagatagaaggaccatgggttgtaagtagttgtttacaattaaatactaggtagatggaagcattgataggtataaggcaagacttgtagtcaaaggattcaccctagacttacgaaattgactattaggagacctttgctcatgttgcaaaagttaatttgatttgagcactacttatcccttgttgcaaatttgagttggtcgatgcatcaactcaacgtgaagaatgcttttggaaacggagagctagaggaggaggtcttcatggacctaccaccaggttttgaaagcatgcttggagctggaaaagtatgtaagttaaagaagtttctctatggactaaaacagtcacttagagcctagtttgatcaattcaccaaggctatgaaatggtgtggatacctacagagtcaagccgatcacacattgttctacaagcattcaactatgggtaagatagccatactcatcgtatatgtggatgacattatccttacttgtgatgatgtaggggaactaaaagtcttgaagaagtttcttgcaagaaaatttgaaattaaagaccttggagccctaagatatttttttggcatggagtttgcgaggtctaagaagggaatatttgtgtcacaaagaaactatgtacttgacttacttaaggagactggtttacttggttgtaagctagtagaaaccctaatggagcccaatcttagactacaaccaacaagtgcagataaggtgatgaattgagagtagtattaaaggttagttggaagactcatttatctatctcatactcgactggacatagcatttgtagtgagtgtagtgagtcaatttatgcactcaccgagggaagaacattttgaagtagcctacagaattctcaagtatttaaaaggaaaacctagaagaggcttaccatttgagaatcatggtcattcacggattgaaactttacatcgatattgattgggcaagaagtgttacagattgacgatgcacatcaacctactgtccatttattggaggctacctagtgacttggagaagtaaaaagcaaattgtggtagctagaagtagtgtggaggctaaatttagagttgtagctcatgggatttgcgaacttttatggctgaaaaagttacttgaagacctcaaagtgacaagtcctatgcttatgaagctctattatgacaataaaacaacaatcaatatagcacatgatttggttcaatgtgatagaaccaaacacgtagttgattgacactttatcaaagagaggttagatggtggattgatatgcatgccttatattcctacaattgaacaattggtagatgtttttactgaggggctacacaagggacaattcaatagcataacttggaagctgggtatgaaagtatttttaagccaatttgagggggagtatggaaagattagagattcactactgtatggaaagattggagatccactgttgaaaatttaaaagtatcatccatattgagaatattgtagaatattttattctctaaattatatcctataaataggctattcccttaaatggatttagaccattgtatctataaatatgattatatgtacatggtagatatatggattagaaattcattctcaattcatttttgtgttcaataactttatcattcatagattgcatttggtgtatttctcatctttgatttcaagctaatatcaaagttgtttctttgcatcttgtgaattccatgagttcataatttagatgtgagtgagttggatttgtggtgggtgtcacattaagggctgaacacttagcaaaatggaggattaaaatactctttgtgcattaacgaacattattatcatcaaatgcaatgagatttcttccctttcgtggaagtcgagaaaaattgtagtgaaagaacattgtttaccaaaagaggagaggtagaccagccatgccaaatgtgtaggctgttgggaggttagggtccaagattcttgttactaagcttttggtgttgggtaggcgttaatgaagactattaactagaataaatgtttggtatccaaaaggaaaatgaaggtgataatgaatcttttgttcaaagaagcttctaatgtgtttatgcttcaaaagatagggaagttgtgtgataatttttgtgaatagcatctaggtagctagaaatgtagaatagctagaactccttgttaaggaggtattattataattttggattctaggttgttttcttgagctaaggtggtatatatactcttttttagtttaactattctaagatagcagaggcattgtttggatttccttagtttataggtctaatggctttataaaatttctttagaaagatagattagacctctttaggctaacctttccaatgtcatgtactatgggatattttaatgttattacaagagtttgggatcggtgaagaggctataggattaccttgattataagagactttgatccctctcttagaaatgctaccttcatgtggtcatacttgttggagtccccccacttttaataggttaagtaggttttttatgccttctttggattaggatgttaggctcctccatggtgtgtaaaaacccttgtctcacattgtttcaagctatgacccattagtatagaaattaatcattttaaatcaagattgactttgtttagattttaattcaatccttttaggttttgaaacatgtggttgctttatcttgagttcaaggattgtattagtacttggttaggcaatgggttgggaaggttatatatccatgcaaaatttggaaattgtcattaaaatataaacttagaagaggctcatttttggatatatcaagggaagaaagccatcaagaggggcattgccttcatttaatcttatgagaaggaagaggttttgacaagttaattgggatctttaagggctagaaagaaaatgtaattagaagatctaatttaagtggagaggtgcattggaggcagaaagccaaagttgaatgggcttaagaggggagtgaggagagtgtggggggtggttgcataaagcgggcatggaaagtggatgaaagaagaagaaactgatcaaatgtttagtacataaggaaaggggtggtagatagctgagacaatatttcagagagatttttgtcagacttcaccagaaataaactgaaggtccttggaaatttgaaggttgggaatggttctatttctatgtggagtgctagtaaagcagagcaacctttcacataacaggaaatccagaaaatggtcttttatatgaataaagaggaggcactagaacatgatggtttcactgtagctttttatcaatattttaattacataatgaacgaagttctattgaaatttttttcaaaattctatgatatggaataatcaacatgagcactaaagttagtttcattgccctagcacttaggagtcaaaacactaaaatttatagtttagacacattaattagatgactaaaatcatagcaagggtgttgtctgagtgctcaagagtgtttcagagaacattgttgaggatgggaaaattttgcatgcagtcatagtggtaaatgaagtagttagatgaaaagagaaaagggagttgtttttaagattgtttttgaaatatgatcccatagactgaagctttttgttgcatgctttagaaagaaagatttttgggtggagttagagatcttggatttatgggtgcttatcatatcctattttgctgtgttaataaatgggtgcgacataggatgggttaaggggtttaagataggatgatcaagttatatcatggtagctctgttttgagtggattgatactgagagtggagtatggtatcctaggaggcttcttggtgtgtagaattagaaagaggatgactcatttacaatttgtagatgctgcaattttttccacaagagctagtgaacacaaaaatgaattgagaatgaatttctgattcatattgctaccatgtatatataatcataacctatttacagaaaataattgaaagatgtcaaggatcctatagaaagatatcacaatgttctccttgaatttgaaaataacaagaaaagggaaaagttccattgggacatgaaacaaattgataattggttccagttacttttcaggatatcatgagctagtgaacacaaaaatgaattgagaatgaatttctgattcatattgctaccatgtatatataatcataacctatttacagaaaataattcaaagatgtcaaggatcctatagaaagatatcacaatgttctccttgaatttgaaaataacaagaaaagggaaaagttccattgggacatgaaacaaattgataattggttccagttacttttcaggatatcatggaagatctttggccagatctgccaatctttctcaattgtagtgctttgtggcctttactaataactagaaagtaaaagggcttgaaaagctagtcaaaagtaagtggagaagaatggtaatccacaccaggttcttatttgattttttaggcacctttcatgagctgaaatgctctttgttgaccttggtggaagtttcagccttgtccgattgtatgtgccagcaggaagtaccaactaagttgcttttttcttttttctttttttttgatgaataagagaatgtattaaatagtgcaactagcgcacaagagtaaaaacaaaaaagagggaaaacaaaaaatactccctccaacaagaaccgaaccaatctataaaatcaaccaaaggcatagtggggcttacagaagcggcttgtcttagatgttccttacatgttggtgggaggaactaaaaccaatctaatagttttttatttcttagttacctgcactatgacaaaaaattctgaagctacctcttctattacaactagggaactatcaaaatattttggcctttttcaaattgaaaggaggaaattattttgagttggtaaaaacatacataaaaggcaaagggaaattgagtcatctcatgggaccaattattatcaaagatgattcgaagtttttttttgggatgaagaagacactcaaattatgtcttggttatggaactggaagtagccaaaaatcaactatatacatgtatgtttctctcaatagcaaaggagatttggaagccattcaacaaacttactccaaagtgagagagatgttgctccaaatcaagattcagtattctttttttttttttttttttgttaatgaaaaacaagataagtaaatatttataaagatgaaaacatgagaaggatgaggagtcctccccatgattatagaaaacttgatcgtagtaagggtgacattttcaaccatataaggagtctatacaaaaggtttaggctataaatgtcattcctcttaaggatttccattcccttttgatttacccattgcaagccaattgagttggataagtcttaagaggaatggcattaaaagccttggtgcatgaggctaaaaaaaaaggaatagaagtgaagtaaatcccataacacctctatcatcctcctcttctccaaaaaatttgtgccatttctctttggccacataatccaaagcaatgtgtgacaagctatttgcccaaagatcttgcctctattggaactccttaaacccctataggaaataatcatcacatcacatatactcttgggtagaatctaattaatcctcgcttatttgaataaatggtgcgaagccttaaagtcatcaaacaatgcagaaagagatgatctataaactctccactttgcttacatagaacataccaattaggcctaaacgatttgaaaggttttcttaactgtagcatgtcgttggtatttatttttttgtgccactatccaaacaaaggctttaaccttagatgttagattttcgaataaatatggttggggagaggagaacagaatttgaagtattagatgaaaccatgaagaaagatttgactgtgaatagtcttgaagaggtcaataaccatgttcgcacatctgaggtggatgaaggcaagtgcacacaagtaagggataacatgagtcttttaaggtcttcaacctccaaatctataaggttgcaacaaaaatttagattctaaaaagatgatgaataatcaccaaggatagttgaaatggtaagattttttattgcgacaactttataaatatatgaaagttgtaaacacaaaggttgaccccttgccacaaatcctcccacaagtgaattctcgccttgacgaaaacgagtgtaacttgaaaaatcctagaacacctatgcaatggccttctaaggacacctatgtgaccatctaactgtaatatattggtgtctcatccatcaaaatgtatcccataaatgctcaaaatgacttgatgccaaagaccaaaacttttctttgggaaattccaaagccatttaccaaagagagcacgattcctcagagagatcaacccaagtcccaactaatgagatgatcttttctaccctccccaactttcgaccaaagaaaatctctttgcaatttcttaattttagacgctactaatactagaatcttgaagagtgagaagaagtagctagggatgtgggacaatcatgtctgaattaaagtgattctacctcctagaggcaaaaaagtctttttccaaccatctaatctcctcaaaaccctgtcaatcattgggtcccaaaatgcaactacctttggaatcccctctaaaggaagacctaagtaagttaaaagctaatatgaggctttgcattctaacgttgcagccgacctaataattaaatcttgacttgagtaggattcacaattctaagcaagatactctctttgtaattgagaattacaatgttattaaagttgtgggttgtgttggatcattattgaaaattttaagatggaatacaataaagatgctttaatacatctagagtttgttgggaaaggaggactttttgatttcttagctggtttgagtgtggaattttatgagtttagggtccaaattattaggagagagaccttagcatccctaaacaatgcctttgtaataattaggggggaaggagaataatgaaatgtcatgttggaaaataataatgatctcatggaaggttccaccttggttgtttctaagccacatggagttgaagggattgttattgctgccactgccaatgccataaacttagggaggactgaaggtcgaaagccaagtgataaagattcccaatggtgtagttaccacctcaagcttagacacactagagaaccctattgataactcttttgaggaagggaaattgaggcaaggaagtttaggatacaaatcctaagcaaatgtggctaatatggagccaaaacaaccagaaaatgcaccttaacgaaagatggagttcaacaaggaagagataaacaaacttaaatagctcatcccatggcttgaaaaaccaggagggtcttgtaattttacctagataagtaagtattctttagccttgagtgcctcaaaagattagtttttaagcccgtggatcatagatttaggggcttccaaccatgtgacaaaacgtgtgttcatgggatattttccaataaaaaagggttatagatgttatcatcttgcttcttgaaaatcaatcattttttcctaatacttatcttcagggggagagcttaggtgaagacaagtttctctcttatggtttgccttatttacctttttcacctaaggtcgcacctgtaggttctacctccttatcacctggtcaagaaccctcataaaaaatggatcaagggggagttaatgcgactgacatgccattataggtttgttgtgggcagaaacagcccccaactttattgaatgcatgctcaagagtttgaacttgagccaggtactgaacacgctaactccactttgtttctagtgtcatttctcttacttcaaatttgttactctcaccagaaactcatgatcaatttgttcaaaatgaagattcagaagagtttcttgatctccatttaccaattgcccttgggaaagctataagaaaatgcactctaacacacccaatctccaattttatttcatttgaaaacttatccccatcacatagagccttccttaccccattaattcctattgaaatccctcaagcggttcaagaagcacttaaaagtgagaatgggaggaaagtcatggaagaggagatgttagctctagagaaaaaccaaacttggaaaatagttgaattaccaaagggaaaacaaactggttggatgtaaatgggtgttcactgttaaatatagagctgatgggatgttggagagatataaggctaggttggtggccaagggatataagcaaacttatggggtggattaccaagaaacatttgctccggtagcaaagatgaataccattcatatattactatccttggtagctaactttggttggtcgttgcagcaacttgatgttaagaatgcattcttgcatggtgatttagaaaaagtgtaaatggtaacactatcgggtttcaatggagactccaaaagagacaatgaatgcagattaagaaaggcgtcttgtggccttaaacaaactccccaagcgtggtttggaagatttgcaaaagctatgaatgacatggagttttgacaaagccaaggagatcatacactctttatcaaacgttcacatatgggtaaatttactgttgtcatagtttatgttaatgatataattgtgataggagataacattgtggaaatagaaagacttaagaagaaactagctaaagaattggatataaaagacttgagaagacttaagtattttttggggattgaagtggtttgtgcaaggacgagtatttttatcttttgtgagtatgaaacgtttttatttgaaaacaagctttactttataaaaaagtctcttcaaggggagacaatcaccagagaagattctttttgaaaaatctcaggtttgttacttttgttcatactaaattcaaatttagtgggggaaacagaacttgaatcacttgtgcctacactaaattcaaatttagggggagaaacactactcgaacaacctcgcatccaactttgtgtctacttaaggaggaagaaagatcaaggtatggaaaatcaacctcctacaattcacagaacatcatatctaagtgtatgtaccttggaagaaacaagtattctaactcctaaatctcttccatttgttattccagctgctaaatctttgtccttagataattctagtgtagataatacctctattgatgctctaaatgttctaattgctattagcaaagatactaaggtttgtactaaacatcctattgctcaacatgtttcatatcatataccatctcccactttgagggcctttactactaatctttgtaatgttgaaattccaaaggacatactaaaggctttggctataaaagagtggaggcaagctgttttggaagaaatgagggcacttgagaataatgggacatgacaacctgtggatgcaccaagagggaagaaacttgtgggctataaatggatatttattatccaatcaaaaaaaaataaatggatatttattatgcaatacaatgcagatggatctattgaaaggtgtatagcaaggctggttgtgaaaggcttcacatagtcctatgggattgactaccaagagacatttgcatcagttgtaaaactaaatacaataagagttttcttgtcccttacaaccaatttgaactggtttttacagcaattaaatgacaagaatggttttctaaatggtgaatgagaggaagaagtttatgtagccttgcctccaggttttgaaagaagatttggaagtgtgtaggctgaaaaaatcacattagagattgaaacagtcaccaagtgattagtttgatagatttgctaagtccattagaagtcgtggatactgacaaagctaggtagatcttactttcttctacaatcattttttttttttgtttcgttttgttttactttgttttgtattgtttttttttgataagcgaggaaccttccatgactaaactcttagaactctccatagggacccaaacctctgggtgttgatcgagcccacaacaaccagcaccgggtaaatcggggtgtcattagtggcaagattcaaacctaagaccatgtgtctcttattgggatcacgccttctagcaataaccctgatcgactaggttcccatggcgggcttttcttctacaaacattctagtagtggcaagcttgctacactaatagtgtacatggattatacatctttactgtatataatctatccaaattggagagattgaagaattttctagctgaagagtttgagattatggatccaaaaccttgaggcacttcttgcgaatggagtttgctagttcaaaggaaagtatttctatgttccaaaggaagtataaattggatttgctcaaaaaaactagatttctaggttgtaaaacagtcgagactccaattgatcctacttgcaaattagggttactaaaagagattgtatgttgacaaagaacatttagaagggagtacaagaaaaggcttaatgtttagaagcaataatagccttaagattgaagcctacattaatgctaattaggctgagagcataatggataggagatttgtttcaagttattgtccttttgtaggaggaaacctagtgacatgggggagcaagaatcagttgttgttacaagtagtgctgaagctgaattcagagtagttgctcatggtatttgtgaacttctttggttgaagaaactgtttgaagatctaagaattcctagtaagaagccaatgaagctttactatgataacaaggcaaccattaacattgctcataatctagttcaacatgatagaacaagcatgttgaagtgaactgtcacttcatcaaggagaagttggaagttggactaatttgcatgccttatgtaccttattgaagaacaattagcaaatgttctaactaagggacttcataaaaggatgtttaattgcttaattaacaagttgggaatgatagatgtccttgaatcaacttgagcgggagtgttgaagatttcagatatttaagagtttcttctactttagggctgaaatagttaggataattcaattttattttgttgtattttgaaaaatgttgttcctagttgataggaagttagttgtagagtttgttagttcttattttgtagctagaattcagcacataattatatgtaaatagacatctatattcctatttttctttatgaaaatagtaagaatttttccttcttctcttaaactgcatccataggtagatgataacacagtttaaaggctagaagtttctaatactctgaaaaactggttgttgggatttctggatggcaactcctttagtctttggaattccaaaaataactaatattcatcaatttctcttctttctagcaggttgtagtgtccatatgatttgtctgtttagtttgtgaggtggtggatgcaatcctcaatgtttattatgcttatgatattaccattgctttgttatattgaacattttctacttgtaatattttctttttatttctttgttaatttgttagatgattttggaattgcattatggctgaagttgttttagtggtattacagctggaagatattgtgtggg

SEQ ID NO: 11702 - DNA, 7174 bp, Vitis vinifera
  Intron number 1 from transcript GSVIVT01038249001 (locus G SVIVG01038249001) derived from phytozome v7.0 (chr-ID chr5 ; pos 24656796 to 24663969 reverse strand)
cagaaaaaggatccagtctttcatcaagacacaaggtatttctcactctccacacagatatgttcaagtttttatggtatttaatggatttccgagaattctgagaattgggtctcttgtttgttctagtgaaaatcctttaatttcaatttggggtttcttaggtaccgtttgattagcatttctgaagtgattttgttgctgaaaatatgcattgattttactctgtaaaaatggcagaaagcgctttaaatttttgattagatagtagcttagttttttaatggagatcctataacaggggctacttttgtatgctagtgaatgaaacatgggtttccattatattctgtgtttgtggttccacagaaaaacttgtcccatgaggattgtggcattaattcatggtgggtttgatgccagatcaaagctgcttgtaaaatggtcttaaaccttcatgaactatgcttcttaccatatggccccaaatagtttttataaggttctagttttccctgtataatatatatatatataaatctttttggtctaaattctttttttcaataagcaatgagaatataaaatatattggaggatccaaaaaagaggttccagccaagtatatctgtaatagacaagttccacctagaccaaaagaaaaagggaaatttgaaagagttgttggcttttctggaaatgtgtttcttttcatgaaaaaaatggaaatatgtttgtttccatgaaaaaaaaaatggagacaaatgtatttgctcggagttgttgaatgaaagaagaaaacagaagttataataagaataaatttgaaaaggtgcttaacaaaaaatatttgaggaaaaaagacaacaaagaacatgaaaggctaccaaaatgggccttgtgtcagcttacagttgtaggcagagggctgacctttcacactgattttctcaggtggttacagtttacatttttcttttaaagattccttttgttggtacaaacatatttttggctgattattggggatttccttgtgttctattctatgcgaaatctagaaatgggttgtttggtgatgtcattcaaggggagtagggttattcaagataagcaatgataataatttgttgttgggcaataaggaagaaagagacagcacaagagaaaagaaaacttcctcaagggaattttagattttgtttttttttttgataggtaaaaagcaaaatataatataaactgtgctcaaaggcaagcaaagggaaaagagaaaaacaaaccacaacccaatacaaaatcaatgccctaaagttctagaaaaacatagggcacccttacgtccaacttgcagccaaagccaaaccaaatctgctaactgttgactgaataaagcctacatctctcctacccaaacttctagccactcttcacaactcttgcttgaacactcataatccactttctaccgacccttctaactcctctcttttccgcttgattgattgtagttaatcgagctctccaactttcgaagctccctatcaaaacgagacatagacaaaattcattgactcacctctcaacaagaagacaaggccttacctgtgaaaccttatgcttcacacgagagcatcatctgcagatggcactcttacgttagtgatttgtggtgtcgttaggaagcaaaggtttaagggaagcttctgaaccacacatccttcaccaaacagcaaaggaagcctcttaaaagaacctttgggttggttcacgaaaagatcatacgagccctctataggactggcttgacctgaggcaaaggggggctcctcttcgactaaaaaggaacgggccaaagaacaacaacccaagggaaagggctggtccaagtcaagaggcacatagagcctcccacctctcgacctgtaggagaaagagggcttgatattactaggcccatcgacccaactcaagccaaaaaaaggaggcccagggaccattccctcaactaacccattagcctccaaatatctattgtaggcggaaaaaattatgccaattgatacttgggcaacatgcaaacactccttgggtggtccaatctttttgcacgcttctcaccctcaacccatccccaccctcacatggcctacccttatgatcattctctaccttcatcaccctgcaagcctcctacatcggtggtatcttccaccataattgtatgcaaagactaaaaacgctaccaccacatgtaggatcctagggacccttcttccattgtagcttactagaattctagcccactgtaaatggtgtctctttgttgtatctacatccacaaccacaaaacttccacaagcatcatccaccctcttaaagaagtcattaccctacaagcaatgacagcccattcactctcacccaaaatgcttttacacaggccctttccttgtaacaaccagcttcagggctccgccactccaattgcaatctctttccttcaaaagagcaaatgcccatacaccacacccttttggcatcatagtcgttcccaaaatcaaacaaaatgagggtgcctccctacattaccacttgaagatttccattcagcctctagttgattctagcccaggatttcatagagctcaactttggaacctcaactgcggggtctacccaactacccaccaaacaatgcttcaaatgctccacattaatctttaaatcctccctcccaaactggatccaaattgcctcacccaattcctccttgcctatggatgccacatttgcataagaaacacctttgctaggggtatcttttgcacacacccttagatgaagaccatctccttagggctccttcacaagtatgggcactagggcaacacctatactcctaattcactttccatgatcttccacctccctagaacacctctaacactaacagaacaatgcaagaaacaacttgctctgttgctacaaagctctagcttaaaaactctccccacttctttccaatccatcctaaaatgctttttggatgaactgccacaacaaagttcaaccccctccaatatcataacaaggcctctctcaccaaatctgatccacgaggaaaaacctcaactcctttccacaatcagaccaacttcctaatatttaactgtctccttcaaaatctcaaaggatttcgaatccaccccaaaccagcgcttaccccctatttctccatgagaacctagctccattctctaaccaaatctttcttcacatcttaaaggagtttaggtttgttgcttgaagcacattaaatcatattgaggagaagaagaagaagaagacaacaaaagaaaaaagataatagaagagagataaaggaagaaataaacaaggaagggtgccaagtaatcttccttgagatgataaatgacaaagcaataagattaaataggtaggaagagaagaggaaagaagatagagaagaataaaaattatgagacaaggatagagagccaaagctattttgtagccatatttggagccttagcgtatgctcattttccaaattttaaaataccaaagaatgccaatatgtgtgtgtgtgtttttttttttttttgataggtaaaatagggagtatgtgttaaaaggaaacgctcaaatagtgccccaaagtatacaagaagtatacactggccgctaaagggcttagccaagtaagggaagaagagaacaaaaaaatcacttgctctcaattagaacttagccaatcaatgaagctaataagagaactagggtccgcatctacaaactccctagtccacgaccataaattacaaacaaaagagtttttcatcatttggaccgataactccacattattttttttatcaataagcaaaagaattgtattaccaagaggcgctaaaatagcgactcacataattacagtatagagacactcaccctcttacaattggactcaaaacaagaaggaaaaacaaaaaaccttctccctcatcgcaaacccacctaatcaataaaatctattaaggtcgaaggaccatcttttatccacaatttgatctccgaccaaagtaaatacacaaaagaagctttcagcctttggatggacaacatactatcttcaaaagcaattttattctttaccttccaaatgacccaaaacaagcataacggtcccacttgccatccaaagcaagaaagttagaaggaccgataactcaacattatcaaaagcaagaaagttcctttctttccaaatggtccaatagatacataatggggcaactttttaaggcgttttgtgacctttacccaaaaaagactcatgccacccaagaaacgtctctttaattgaagaagagagggcccgagacaccccaaagagagtaaacaacagttgtcaaagaatccttgtcttttcacaatggataagaatgtgatcaacggtttcttcttcaaagtggcaaagaaaacatttgtttgtcaaagaaagccccttcctctagacaaggtccaaagttaaggttttcccccaagtcgcctcccaagaaaaaaaaacccatcttgggtggcacacaagaactccaaatgatgctccacaagaacaataaaggatcactgagctccaaaacggaataaaggaatttgactgaaaactttccactcttcgaaactgtccaaatcattatatcttcttcatcccttaacaccctttttgcttgaagaaacagtaaaaagcgctccacactttccacctcccaatcattaaacgacctagagaagcgaggaacctatccacccccatcaactgttgagttccacacatttgccactcatatgtccttagaaacagcaatgacaaataaggaggggaaggaagcacaaagtgactcgcctctacaccacttatcctttcaaaatttcactctctgaccattatccattgaaaaagatattctactgcttagaagatcccactccttgcttatggctttctaaatgccaacatcatgcccatctcccacctcacaaaagcgccaccccccttcatctccaccatacttctagctaatagcttgcttccaaaacgcccctctctcattggaaaaacaccaactccacttacaaaggagggctttgttcatcactaaaagacaccttatacccaagcccccttttcttttccctgaacaaaccgtcttccaccttgctaagtggggtttttgcacaagagccctactgcccaacagaaaatccctttgaatctactctaaccttaaaccaaccagccttggcatgcaaaagagtgacatgaagcagatcaacatactagaaagggtgcttcgaatcagagtaagtcttcctaccttttgagatgtactatctttttcacatggctaacctcttaggaaacttttcttccatcccatcccaagctgtcacatatttataatgggccccctatggaagatccaagtaagaggaaggaatagctgccaccttataaaccaactctaaggccaaatcatgcagattctccacacttcccacagtaattaactcacttttctccaaattgattttcaagcctaaaatgacctcaaattacataagcaaccaactcaaataagtgatttgattgtgcaatgcttcacagaaaatgacaatatgatccgcaaacaataagtgagagatctgaatcccatctccgcccttgccccagcttccattaacaagaatagagaactttgttgttgaaatgcaccattttatccaacaaatttgacttggatgtttggagattgaccttccttttttttatttatcataaacaaacaaatgtattaattgataataaaaacatgagaaaaatgagaagtcttccccatgatgtgcaaatccaatcaaaagaaactaagaaaaccttcacaaaacaatgatggttatacaataaggacaaaagacttatacaagtataacaacaccagcccctataacctaaccctaatatgtacaaatcgagagccaactaagctaaataacactcaaagagtagggtttaaaaatgtctgtacagtaagcccaaaaagaaacatagatatgaagcaaatcccacaacgactttgacgtcctccaagtgtccttgaaaatccatgcgttcctctctctccacacagtccataacagagagagacatgcgatcctccaacgggccctacctctaattgaattctcaaaacacttgaaggagatcatcatcatattacaaatactgtctggcggaagctactccaacctagtctatgaaaaaatcttatgccacaatcccctttgttgactcccctttgtttagtttggactatttggaaacaatgatagaagaacctttgaaggtttagacaattaaagttgtggaaatcccttccccaaaatatttcacacttagtccaattgcttggtgggagttgatgtttttccccttcccttttttgtagactttgtagatagcttgagcttggtttagtgtggtaatgtaatttgtttgcttttgtttgccttggtgtgcttgtatactacatacatactgggttgtatctccctattttttgttaggttctgtatttatatgcactcgtagttttcatattaaaaacaaaaaacaggccttattggactaggagtcttcattctatatatgtacagtgttctttctaataagattattgtttactcaataaattaattttatttatcaataccttctctgtttatttctcaaggaataatctttacagttaacctgaatacagaatgtagataccttttatatttcatcaacatgtgtccaactgaaaatagtttggcttcaaggctatttgaggcagttttaaatatgtccgtctcttttactatctaaaaccagctaataaggtgatgaaacagatttgaagttccctgaagactgctgtatgtcaatggttgtgttttaaacatgaatacttttccacaatctgcacatctcaacgctcatgtgagcctgagcttattttatcacccctttctgggcagttggttttccctaatgatttaccactggggcggtgtttttcatgtactggtatagtggatttgtggacat

SEQ ID NO: 11703 - DNA, 2463 bp, Vitis vinifera
  Intron number 4 from transcript GSVIVT01028768001 (locus G SVIVG01028768001) derived from phytozome v7.0 (chr-ID chr1 6; pos 19068280 to 19070742 reverse strand)
agccctacatacagtcatattgagcaatcaagaaacacactacaacaaaataggtttttaatgacgaacttttagtcacggccacaaatatcgtgaccaaaggtattattttgtcacggctgtggtcaaattgtgactatatgtgttaataaagctagggtgggaaaaaaaacatatttagtcacggtgattttaccaaccgtcaccaaaaacattgatgagagggtattttagtaatggatttatttgaaaccgtgactatttgtaaatttagggagggaaattttggcgccaataattttagtcacggtaattttataattcgtgacaaaaagtataacaaatgatgttttagtcacggttttttgtgaaaccgtcactatatatatatatatatatattgtgacttttagtcacgccattgattaaccgtgactgtgtgggaacttatagtcacaaatttcttattgaccgtgaccaaatgcgtaaaggttgaacctatggtcacgggattgacaatattgtgaccaaagtctattatttattttaaaccttttttgttacctattataatttcttagaaaatattatatatcatagaaattatcattaatagtaataataatagttcttattaattataaaaagtttaaagttatattattattattattattattttaagttaagaaagaaattagtgtgttaccataaaatgtatttttaaaatttataatataaatttataaatacatttaatataaataaactattttatatattttttaaacttattttatttatttttatttgaataaataataaaattttattattatatatcatggaaaacttgaaaaggggaaaggaaaaatataataaagcaataaaaaaattaaagtaataaacttttaccataaaatttatttttaaaaattttaaagatataagatttttttttttttacctacacaagttaaattcttacattttttttattttttgaatttttcatgtaatatatgtatactttgtatgctattactattacacaaattttataataattaattaattaaattcaactcaaattgaacttaacaatcaagataagtaaagagaaagaatttttatttttttataaaatattttttagatattcaaaaatactttttaacttcctatagttactcctgactctttatggtaatgttttaattttaaaataaatatcgtaaaaaataatcttgttctattaataataataataataatattaataaatagtaataacaataatattattattattgattttatagaataagattgatgagataaattatgaaacatttaatattaaaactataatttatttaattcaaatacaattaatagtgtgaaataaatgatgatgatgatgatgatgatgatatatatatatatatatatatatatatatatatatatatgatctttttaatatttatattttttatatttaattatcatataactaatataaaaaaaggcttattaaaaaaattatatgattaattctatatttttattaatcaattaaatataatttaaaataaaataattagaattttttttttaatgatgaaccttaacaaatttaaattaaacatacattatcaaagaaatttattgaagtttattagaattctactttggtatctatacgaggtgtcttatagaaggaaaataagaaaggaataagaagaaaaataaggaaggaataagaaaaagttgatatacaagtgacaaaataggaaggaaatgcaaatgaaatatgaaaagataaaaagattgaaaaaaatatggtaggtaattaaaatagcatattcatggaaaataaaatcaagttgaacaatttttatttttatttttaatttaattctttaatggtttgtttgaaaaacatttttatttattttatctcaattaaataacactaataagcatattttaaaagtatttttttatagtaattttaagaaataatttataaattttataatattttaattataaaaatttataagtattataaaaatttaaaatattttctaaaataattgtcaaacaaaattttagtatttgataaaattttaaaaatatttttttaagtttaaaaaatccctttgcaatattagaaaatcacctacaattgcttctctaaaaaacacttcaattattttttaaaattttctaaattattttttaaaatattatcaaacacatatttttagtgctataaacacttttttaaaacaccagaaaatgaatctccttaaacaatttcaaggaaaaccacttaaaacacttggaatataaataccggtaaaagcctaaaagcaatttaaattttcaacttgaggtggttggtgccctgcaataggagtaaatatttttccatccacctctgcctccatctca

SEQ ID NO: 11704 - DNA, 9959 bp, Vitis vinifera
  Intron number 2 from transcript GSVIVT01027481001 (locus G SVIVG01027481001) derived from phytozome v7.0 (chr-ID chr1 5; pos 16431709 to 16441667)
gttttcatctgcttcgacatttgttcaacaaaatagtgttgaggacattagcatttccctaaggctacatctggtttcatgagagtttgagaaaaagaaaataggaaggaaaaacataagaaaaaggaaaagaaaatttacaatatttttacgttgtttggttgtctggcgaaaagttttaggaaaacaaaattaaggttatatttggtttctggaaagtattaagaaaaaaaagttaaaaaaaatgattttctcatactcaatcgcattattgaataaatgaaaaaaaatcaaatatcattaaaattttccttccttgttagaaaacgataaatttttcggtacttttgtaaatgataggctcattgggatcatataaattttaaacaccacgactcaagtgagcaagagtggtggactctgcgagttgacggagcctcacgctcatcaggctccggagtggggctcgtactacagtccccaactggggaacatctggagcaagccatccggctgggattctctgcatctaacaatgaagcagaatacgaggctatcctgtccggattggacctcgctcttgctctatccgtctccaaactccggatctacagcgattcacaactcgtggtaagacatgtccagaaggaatatgaggccaaggacgcatgcatggcgcgatatttggctaaagtaagaaacaccttgcaataattcaccgaatggacaatcgaaaaaatcaagcgaactgacaatgggcgcgctgacgccttggctggcgtagctgcttccctcccaatcaaagaagccattctattgcctgtacatgtgcaagccaatccctctgtcgaagaaatctccgcttgcaacaccattgaggcaaatcaagcagacgatcaagaatggacgtataacattgcagaatatctccggacagggattctacccggagatactaaacaggcgcacaaaatccgggtgcaagctgcccgtttcacactgattggggggcacctgtacaaacgatccttcacgggaccttaccttcggtgcttagggcattcagagtcccagtatgtgttagctgaattgcatgagggaatatgcggaaatcattccggaggacgatctctagcacatagagctcattcgcaaggatactattggccaacaatgaagaaagacgcggcagcatatgtccagaaatgtgataaatgttaaagttacgcccccattccacatatgccatcagcaatgttgaagtcaatctcaggcccatggccctttgcgcagtggggcatggacatagtaggaccccttccagcagcacctgcccagaagaagttcctccttgttgccactgattactttagtaaatgggtagaagccgaagcatatgctaccatcaaagacaaagatgtcaccaagttcgtgtggaaaaacattgtttgtcgttttggaatgccccaaactattgtagctgataatggtccacaatttgacagcactgcatttaggaatttatgttcggaactaaacatccggaattcatactccacacgcattatcctcaaagcaatggccaagcagaagccacaaacaagaccctaatcaatgccttaaagaaaaggcatgaacaagccaaagggaagtgggtggaggagctacccggcgtactatgggcctatcgaactacacccggacgaccaacaggaaacactcctttcgccctcgcatatggaatggatgcagtcattcctactgaaatcggtcttcctactatccggactgatgcaacaaaacaaaatgatgcaaacacggaattagggagaaattttgattggacaaatgaagtgagggaaaatgcagccatccgtatggcagactatcaacaaagggcatcaacgcattacaatcgcaaagtgaagcccagaagcttcaaaaatggtacgctagtacttagaaaagtttttgaaaacactgctgaaataggcgcagggaagttacaagctaactgggaaggaccctatatagtgtctaaagcatgtgaaaatggagcctatcatttacaaaagttagacgtgatgatgctttttattaccatcaaatatcatttttattttcgattcaaagcagcaatagttatcaatgatggaaaagatgaagaacagttaatgttatcattgtgtaaatgataacccattacaccatcagtgtgatgtataataagattttaacatataatagttaagattaagcataacagattttaacgttgatagaatcagtctatgaaaatgtcatttagccataatctaattttttattaccattggagattgtttcaacgtgagtttatttatactattaatgaaacaaatccatgtttcaggaagaacagttatcaaagatgtcatttctatcaataatctaatatgagattctatgtaaatatcatttttgaaaacactgctgaaataggcccaatttatcatttgcccgtgaaaatttgtaaatagaaccgacgatgtcgtcgtaaaatgagaaaccaaatgaagaaagaataaacttccataaaacctagatggtgtctaaacgatgaaaaaccaaaggatcatgtcccaatgattagttataaatggaaaaaaggaatgagcttagatagaacctagaaagttgtcccaatgacgaaaaacgagtagagcaaataaatgaacttagataaaatttagatggcgtccagtaacaaaaaacaacaaggatgaagaataaacatagatagaacctacgatggtttctaaacaatgagaaattaaaggaacaaaatattaagcttagatagggcctgtccgcgttccaatgatcacaaaccaaggtaaagaataaatgaccttagaaagaacatacgatgtcccaaaatgagaaaatatcttaatgaactcgatgttgttgaagatactcttgactggaaacaattcaagatgatatcactgatagaaatgtctccttaagattgagtcctcgggaggatgatggaaattagtgttatcattgtgtaatattattaccatcaaatattatattatggctaaatgacattttcacagactgattctatcaacgttaaaatctgttatgcttaatcttaacagaaccagtttctataaggactgcttcataaaactctcttgtttttaaaatatcaccagagggataatgaaaattttcttgaaaagcttttgcagcaatctctctggggttttcagagaaaaattatctttcaataaccaaaagagattgatttaaatcattttgccaatatcttgattttgttgaaagatgtgtggggttggcagccaccacaatttgtttgcttgaaaaagaagaacttgttgctaattccttttgagagggattagccttagtaacctgcttaaaggtctgagaccctgaggtagctggatattgtgttgccttaactggtttagaatgatcagaaggatcatagtataaggtcaacattttgttagacatatgactggattcatgcataggtttagaagaatgaagctttgccaaaagttgtgcttcttcctcttcaacttgttgactccaaagcattttatgggtagaaggagattggttagcttgactggattggggcttttgagagctagaagcttgggtattctttttaggggccatgatctcatgaaccctgcaaaattcacgagatagctaattagggctgaaataatctcctttaataaagtaactttgaaacttagattttaaaataatataccagttaattaaatcatacttaaaagttatatatttaattgtttcaaaatctttgaaaacaatttttaataaaaaatcttgattcaaaatcccaatttgaaattttgaaatgcataaagaaatgcttaaaatatcatttataatgagattatgaatgaattgggtacttaaaatcttaggtggatcattaattctaacaagattaatctcttgatcacaacgagtgatgctttcaacaggattagcaaattcaaaaagaatttccttatcaaaaagcttagttcttataccttggttatctacccacaacggataaatagaacttaagaagggtattcctaggagggctttttcattaagatccttaacactggggcttagaaattagtgacagtttttcggtactcgaacggattttaccttttgtcggtactcgcccggattaaacaatttttcggtactcagactgattctaccatttttccgtactagtccggacagtttttcggcactcgcacggattccaccttttgtcggtactcgcccggattcaacaattttccggtactcacactgattctaccattttttcgtactggtccggacagttttaaggtgctcgcacggattccaccttttcccggtactctttcggattcaacaattttcctctactcacactgattctaccattttttcgtactggtccggacagttttaaggtactagcacggattccaccttttcccggtactcgcccggattcaacaattttccggtgctcacactgattctaccatttttctgtagtggtccggacagtttttcggtactcgcatggattccacattttgtaggtactcgcccggattcaacaattttccggtactcacactgattctaccattttttcgtaattgtccggacaattgtaaggtactcgcatggatgccaccttttcccggtactcatccggattaaacaattttccgctactcacactgatgctaccattttttcgtactggtctggacaatttttcggtactcgcacggattccaccttttgtcggtactcgcccggattcaacaatttttcggtactcacaccgattctaccatttttccgtattggtccggacagttttaaggtactcgcacggattccaccttttcccggtactcgcccgaattcaacaattttccggtgctcacactgattctaccatttttccgtagtggtccggacagtttttcggtactcgcacggattccaccttttgtaggtactcgcccggattcaaacactcttggtataaagtcgagcaaaaccaaggaaaatgatgaggtagtagcaaatctacaatgcttactttcattctttggtatctatgaaatgctgcaactttttgaggaaacacaaattgcattgatgtagatacatagaaatccatcactctatgctacaaaaataaagggagcaaaacaatttgagaacaaatgccacaattgtgcaacatgttgtgcaaccatcactttcaccagtgatgatgaaaaaagcatgacatcaaattttaccacaattgttttcaaacctcgacattccaattatgctccttaaagcatgaacctaaaatgcatattgtttctatcctataagagcttaaactatagtattaaaaaaaaaaaatcaagcttatggcaaaaataaaaataaaaaaatcttttttgacaatctttttaaactaaggaacaaactctttgtattaaagaagtcaaattcatagattctaaactaaaatctccaacttctctaaataaaagtgttattttcttttaacatgacaagttctcaaaatggcaatgcaacccagaagctaaatccaaaaatgaaggttcaaaagtcatgatcaaactccaaacatttttcaacaagctcgtggaagaatatcaagcaccatacaaaattgtcattcatccaccttcaaagctaaagaaaataaggttaggttcttcaaaacacttcaggaaattattgataagtttacttgagattaggtcatccttgaccatcaattaaactttgctccaagaacacgtgtttactacccttggattaaagtcaagtctaagctcgacacatttttcaacaatcctatggaagaatatcaaacacaatacaaaagtgtcattcatccatcttcaaggatgaaaatcaagatgaattcaaaggaccttattttgttctccaaaatgcttaagaaaggtcttcacaagtttggttgagaataagtcatctttgaccatcaattaaactttgtttgtggaattgcctaagattatatcagaagatcaattgaccgatatcctcaccaaagctgtctcaagtcaagtgttctcaaaatttttagataagttgggcatgtgtgacatctatgcaccaacttgagggggagtgttaagatattagaaatgttttccatatatcattctttccttatattatttagtgttgagatattaggaatgtttaaatattaggaaagttgagatattaagaatattgagatattaggaatattgagatattaggaaagttgagatattaagatattagttgttatttccttatatcattctttccttgtatcattccttcccattcttagaatggtgattaccctctatatattctctgtacatgaacgaatgaaagtatgaatgaaaaaactatcatttatcaatttgaacaaaattcactttattgagtttatcctaatagtatgatgttgaaaactcaagcctgactcacatataccaagttgtttacttagcttgttgaatcgtgaaacatgaatcattcctattgcgctacaaaggggatatcaggggtgcttgtgaattttgtttcttatatttgttgaatgatgagtttgtccttattgtgtttttaactcttttattatttaaggctttgttttagagagtacacttgtgaattagcgtttatcatcataatcctttacaagaaagtaagcggtgcaactagctaagtccttaggcttatttaaataaagattccaattggacaagtcaaattaatcgggttagagaaagaagacaggataagaaccctaacccttgtgtcataaggctgcaaaggcactatcaaggagaggcttttgagagagatacaggtgaagtggagcctttaatgcttggagtgctcatcacacaaataggggctcatcacacaaattttaaacacttttaccctaaacagatcatataaattgaattgctgatatgtccacgggcaaatgatcgctgaaactcgctgaaactcacactaacaaagatccaatccaccatagcgcattggatattggtcttctaacttacactggggtacttctagagaactccaagtctccaagcatacgcctctatttcaggcatgcctatttggttcacttccaagagtagcatgttagagacatatcaaatacacatacccacgtcgtgccatgtaaaggtacttcacatgttgaatattgtgtgcaacataggtgggagctgtgggatgtaacccccgatcacatcaacttggaaaacagtttactatgacaatttccttaaaggttcactttcttagtgtagcagaacaaaacgccaacaggttgtttcattagttgacttataacctattgatgaaatctctaaaagggaaatcagagctgtctgtatcttcacgtgttctttgttggaaatgggaataaagaattagaatcttctctttgggatgtaatatccaaacaatgaaaagaacgatgatgcctaagaatcatggtttgatgcttcttccaacaatgtgtccttgttatagactatagactcacatgtgtttgcagcctgctaatacctatgataaaatcatcaattgcatcctttgattatgactatgcatcttttcctgagttagaagaatctgcgagatccgtgtctctctcaaagatattacaggctattcccttcttcagctctgtcattcattttcaaactccatatcagtcgagagaaaatttgattgatttgctagacaaggtattatttattataacaattttttaggccatgtatctgtgctatgcactatgtggagttggccgaaccaaggcacacaattggtaaaaattggagagaaagagcatggtccaactgatgtgatttatgaagcttgaatttattcgaaggaaaatgctttgttgcaagagtcacaagccatgcccaactggcatgagtttaattaagggtcatattccttttcttagccattgcttggtgttcaggtcacacggatgttggacctctagagttcacaagtaggggtgattaggcatacaggcattccaacctattttagtggaaggatgtgctatttgtttacatccattagttcataagggattcaatgcagattttgatggggatcaaatggctgttcatgtacctttatctttggaggctcaatcggaggctcgcttacttatgttttctcatatgaatctcttgtctccagccattggggatcccatttccgtaccaactcaagatatgcttattcctgtgcacaccacacaaaccggcaacccatgatcttgaagagttgaaatcaagcaattctgttttggtaaactaattttatcattgcatgctttaaaagattgacctgattaagaggattcattacatacaaggtataagaaagttgccttattatcacgtgtcattggattataagactaggcaaatggacatccttacacaccaaagaacaatctaatactattttgtaatgacttgctctttcccgtgtagatattatccgtgctagatctaataagttatcataatttaaaaaagcgtgtacctaagattaaagtgtccactgttcaacacaggagatcttccctctgaagccggcaattgcctggttgggtgttgctagtgactaattttcaaatcagtttagacttcacatattttaaataagatgacttgagctgtatagaaaaggagatatattttcatgcatagatccaatccttctcttttttttttttgggtaggaatgtggcatggtattgacatttttgttccgacattgggctcgtgtgctcgtgacagacgacagcgagggtacgaagagagtaaaacaatcacagactgcacaggacatgaaaaactcaacgaggctagcgtgtgcgtattacaaagacaagcaaattagctggcgagaaatctaacagttatcttcaaattcatgaactatggagtttgtgcacactagaatacaacgtcagccacgcacatgaagccattgaaaagagggttagatttgtcttttgggaagtaaagaaaagaaagggaatttgaagccttgtggtacaaactactaagtaacaaagcaagggattgggttgttgaaagttaaaacctgaaggtcatacctttgtgcgagccacttgaattgaaggccgttggatcacatgtgacatgccattgatctctaaagttaatcttataagtcccttggacccgtgggatgctgccttgtcctcatgaggaatatctttccacggggacataatatatctcgaaagcattattaacaagacaaagacaacaacgtcatctatcccatttgaatttaagatagatgcctttatttcatgtacttctctcacttgcgacttccgggaagctcttgaggtaggattcatctcgttggacgtggttcgtttcctgcctcacattggattaaattacatcatttcaaatgataagatataaattaaaatataatttaattattaaataattctctaagtcttacgggaaatttcttaagtcaatatgatcttttacaccttcgaaaaccataatataatcaattttcatgtctttcgaatttagagtaaataatatctatatgattcaatagggatcaatataaatagtattagagtcaatcctcaaccttgatgtagagttttatttaaccttatgaggggtgtttatttgtttaatttcatgatatagtgaaatataattagggatcattataaatagtatcaaagtcaattttcaactccg

SEQ ID NO: 11705 - DNA, 5205 bp, Vitis vinifera
  Intron number 7 from transcript GSVIVT01000878001 (locus G SVIVG01000878001) derived from phytozome v7.0 (chr-ID chrU n; pos 3121463 to 3126667 reverse strand)
gactcctccctttcaactcacaagattagaattgggttcttgctttctagggcctcaatttcctgcatggcttcaaacacagaagtgtgaaagttatcaacatcagcatgtgactgagaagatgtattgaacaagtcaagtttgtttttgtgtcaaaaatatgcctctgtttagtttttcaataaattaggaattgtccgagtcttagggaggtcgttgcagcacgtttagagtgactggttatctttctattcctattttttagtatttctatttctgttgatggttttgcctataaaaggcttgtatcaggtgaagtttaaaaatatcaccatatcaataaaaaaaaatttctttcctcctctgtgtgtctcttttataaagtggtttcaacatttggtatcagagccaggttgaagagggattttagagagtgtttgagagtcaaacacgtgaggaaaagagagagtgaaatgggtgatcttcaagtcattggcggaataaaaaagctcaacaacttaaattacaatacttggtcaacatgcatgatgtcgtacatgtaaggccaagacttgtgggaggttgtgaaaggaagcgaaattactcaaccggaggctgaggatgcgaatggtatactgcggaaatggaagataaaagcgggcaaagcgatgtttgctttgaagacaacgatcgaagaagatgtgctagagcacattcgagatgccaaaaccccttacgaagcttggaatacgttcaccaagctgttctcaaagaagaatgacacaaggctccaacttctagagagcgagttgttgttggtagcacagtgtaacttgacgatcgctcagtactttcacaaggtgaagacgttatgccgggaaattttcgagttggatctagaagccccaatcggtgaaaccaggatgaagagaataatcatccatggtttgagaccagaattaagaggttttgttgctgctgtacagggatggaaaaatcaaccatcacttgttgagtttgagaatttgcttgctggtcaagaagccttagctaaacaaatgggaggagtttcactcaagggtgaagagaaagcgctttatgcccacaaaggcaggtggaattccaagcagcacaccgttggcagaactaaaaagaatgaggacaaggcaaaaagtagtcaaggtgaaaggagcgctcgtgttaagggagattcgaagaatcttggcaccagaaaaaaatttcaagggaggtgctacaattgcagaaagaagggttacatggcaaaagattgttggtcgaaaaaagggcttgtggaaaataatgctactacttccaaaagcaaagatgagtgggacactcaggcattttttgctgcaacaggagaatcagcttttatagcaacaacgtctgaacaaattgattatgagaaggattggatcattgactcaggctgctcaaatcatatgacgggtgataaagaaaagctgcaggatttttcggagtacaagggaagacatatggtagtcacagtgaacaactcaaaactaccaatagctcacattggtaatacagtagtctcttcccaatataatattaatgatgtgtaacttcaaaatgtctatcacgtcccaggtatgaagaaaaatcttctctcggtagcacaattaacgtcttcaggccattttgttctatttggccctcaagatgtgaaagtttatcgtgaccttgagattatggaagagtcggtgataaagggacggagactagagtcagtctatgtgatgtctgcagaaaccgcatatgtaaacaagaccagaaagaacgagacaatcaatttatggcatatgcgattaagtcacattagttattccaaactaactgtgatgatgaaaaagtcaatgctgaagggacttccagaacttgaaatgagaaaagatacaatctgcgcaggatgtcagtacggcagagcgcattaattgtcgtatgaagagtcaaaatggaaagcaaaggggccattagagctaattcactctgatgtgtttggacctgttaagcaagcctctcttagtgggatgaaatacatggtgacgtttattgatgatttttccaagtacgtgtgggtgtactttatgaaagaaaaatctgaaactttctcaaagtttaaagaattcaaggaaatgacggaagtagaggttgataaaagaatccattgtctgcgtactgataatgggggagagagtatacctcagatgagtttttttaattcctccgagaatgccaagtacgccatcagttcacatgtgccaacactctgcagcaaaacggcgtagcagaaagaaagaacaggcacctagcataaatctgtagaagtatgcttcatgcaaagaatgttccaggacggttttgggtagaagcaatgaagattgcagctttcgtgatcaataggcttcctcgacaaaggttaaatttttcatcaccctttaaaaaattgtggaacataaagcctacagttagttattttcgagttttcggatgtgtttgctatgtctttgtacctaatcatctacgcagcaagatggacaagaaggctgttaggtgtgtcttagtaggatacgatagtcaacgaaagggatagagatgctgcgatcctacaactggaaagtgttacacatcccaaaatgtggtgtttgatgaatcatcttcacggtggtcctcagaaaaggaaatattaccagattcagatgtttttaaggatgagttgcaatctgcttaaatccaactaagcttaggtgaagctgaaaatgtagccgatggtgatatcgaagatgacgaaactcaaagtccttggcaaactggtgtgcatggacaaccaagcgaagaaggtgagcctagtgaaacagaagcaccaattccacttagaagatcagcaagaaccaagaagccaaatcccaaatatgccaatgttgccatagttgaagatgcaaacgcaaaagaaccagagacatttgcagaagcatttcagaatccagactggactaaagctataaaagaggaaattgcagcattaaaacaaaatcagacttgggagctcgtgccaaagccaagagatgtagagcctatttcctgcaaatgggtttataagataaaacgtcgcacagatggatcaatagaaaggcacaaggctcgtttggtagctcgaggattctctcaacaatatggactagattgatgaaacgtttagtccagttgcaaaacttacaactgtacgagtcttacttgcacttgcagctaacaaagattgggacttgtggcagatggatgtgaagaatgcattcttgcatggagagttggatcgggagatctatatgaatcaaccgataggctttcagagtcaaggtcatcctgaatatgtatgtaagctgcggaaggcactctacggattgaaacaagcacccagagcatggtatggtaagattgctaaatttctaacttaaagtgggtattcagtaacacctgcagattctagcttgtttgtcaaagctaatggaggaaagttagttattgtacttgtatacgtagatgatctaatcatcactagagatgatgttgaagaaattttccgaacagaggagaacttgtcagttcgtttcgagatgaaagaacttggacaacttaagcactttcttgggctagaggtggattgtacacacgaagggatatttctctgtcaacaaaaatatgctaaagatttgttgaaaaagttcgggatgctcgaatgtaagtcgatctcaacaccaatggaaccaaatgccaagatgtgtgaacacgaaggcaaagacttgaaagatgcaacaatgtatcgacaattggtgggtagtttggtttacttaactttaactagacccgatatctcttatgcagttggtgtgatgagtcgatacatgcaaaatccaaagaagcctcatttggaagcagttcgacgaattttgagacatgtgaagggtacaattgattatggtctgttgtacaagaaaggtgaagattgcaagctagttggctactgtgatgctgattatgcaggagatcacgacacccgcagatccactaccgggtatgtgtttatgcttggatcaggagcaatttcttggtgtagcaagagacaaccgacagtatctctgttaacaacggaggcagagtaccgagcagcagcaatggcagctcaagaaagtacgtggcttatacggctgatgaatgatctacatcaactagtggactatgcagttccattgtactgtgacaaccagtcggcagttcgtttggcggagaatccagtctttcatgcaagaacaaaacatgtggaagtgcattatcattttatcagggaaaaggtcctggaagaagaggttgagctgaagcagattaagtcaaaagaccaagttgcagacttattcacaaaaggtttgagtggtagcaagtttgaatgcttttgtcatcagctcggtatggtaaagattttggaagctgatgttgagggagagtgttaaagttatcaacatcagcatgtgactgagaggatgtattgaacaagtcaagtttgtttgtgtcaaaaatatgcctctgtttagtttttcaataaattaggaattgtccgagtcttagggaggtcgttgcagcacatttagagtgactggttatctttctattcctattttttagtatttctatttttgttgatggttttgcctataaaaggcttgtatcaggtgaagtttaaaaatatcaccatatcaataaaaaaaaatttctttcctcctctgtgtgtctcttttataaagtggtttcaacaagaagtatttgtgagatctaaacatgtcctatgcaggaatctccagtgtcatcccagcttggttttggacacaatcctatcttagtgtagatctatctcacaaccaaatcattggaaatattccaagtttacattcattcgatatctatctgggctcaaacaatttcactggtccactgccccaaatctcttctgatgtagcagaactagacctctccaataatttattctgtggatctctttcatccatgttgtgtcggagaactgataaagaagtaaatttattggagtctctagacatctcaggaaatcttctgtcaggagaacttcccaattgttggatgtattggagagaatta

SEQ ID NO: 11706 - DNA, 4369 bp, Vitis vinifera
  Intron number 16 from transcript GSVIVT01022631001 (locus GSVIVG01022631001) derived from phytozome v7.0 (chr-ID chr 2; pos 13773003 to 13777371 reverse strand)
ctagccaatatctggccgcttcccttacttaggaggtaaaatcttttgtaagtgttttgcactgtagcataactaaaagctagtttggcatgtttggtctttgtataaacacatctccttaacaccactttgagaggcctgctagcatatctgtacggactgccctataatctggaattatgtctttgcccacttgcgctcatatcaatactatgtcggactaaatataggcgtgcattattaatggtttaacttaatatagtggcatgttttgttgtggtttggaagatatgatcaccagttttctttggtgaagatatttccatagtgctatcatatatcacctatccattttattaatgtatgattctcttgatgggtccttatgccagtccttttggaatttgcctttgctttgttctcctgtctcacttgtgagcagtgctcttgtctcatcctgatgtaccaatggattagctttcagttttggaatttttaagggcactgcatttgtcaacagtgagcttatttctaccatgttccttgactagggtaaggtggatagctcatttcatctattagtgttgttatggttatgtgctatatgttatatctatgtataagatattattgaagaatgcaaattctaggtttccatttacttctgttttatcttcaccctttgtgttccttattctgtaaaccttaacatcctttgacagtgtagtacaatgacatagtaccaaaagaatcaatttgcacgctgagaataactatgaaagaacaacaaacaaacaataaaagacctatagtggcatcgacatccataaacatagttttaggaggagatgaacactgggtgctatcttaacatctatcactgtagtttatatggacaaatgcttggatacttgatttgatgctcctctagctttggattaccttggtattggaattatggttaatgagaggtctccaattggaatctctcctcttgtttatttccccatctatttgcttggaatccgcaacgactaatttgtttctccccgtatgggtacttagttgtatgtgagggagcatgctaatctagtacacattatgagcccatattgtaatgctttaagcttttaagaaagttggtagcttaatgttcttagtattaattaatggagtaaactccagatgacatgtatctgattaataagtactgattcatggggtgcatggcagcattcaaacaaggattacattggtactcttatattgtgacaagtggcaacatatgttttgacacttgatagcatacgaatggtggaccgataggtacacatgtatcactgagactttgtcatcatgtgtggcagaatatagtgtaataaaatactggggggaagcaggagctgacagagaaactgtatggccacaaaagcaaataagttttcaaagaagtttgattttgtatatgataaggggctgccatgatgggttcctccgctgtggggagacctggtgcagaagacttctgttaattttgtccattttgtctggttttgtataattttgattatgtggtgttcactgagtcctctttagtactataatgatggagacttctttaaccttctaatcaagaaacaagtaaagaatccattaccattatgcaacccacaaattagatgggtttgatctgaaaaccaccagatattagtcaaaccagaggtagcaacaaatgttctcgataaagataggtgatacctttcttgataagtcatttatcactttatgtatggacaatgctgcaaagaactgggcggtgacaagggcaaattcttcttggacctgaggctggcaaaaacagcataaagattgatgagaaaggacaaacaacaatcatataagcatagaatgattgtgtggttctgctatagcctgcaacaatggatgagcagggcaaggaactttcattattgtgtcaggagattgcaaccttacaactctcaaaaccctaagccctaatgatgcgcttagtatctttttccaaatctctttatgcattagaatatcccctaaataagtagccctagctccctcccatacttgggatacaagagcatgaaaaaactacccaaagcaaaggaagaaagttggagtttccagttttagcgccctcaaattgatcccgaggtttctagaatcaacacaagggacttaatagcctaaaatctatattgacaattccaggattgatcttaggcacttaatagctcagtcctgaaacacaataattttggaaaaaggttatacaacattttagatctttggttaattattgattgacacaaggttaactagaagtttaggtgaatgtaacacatcttgtaaaacaatagactggatgagaataatttttccttgaccaacaaccgtggtaaacgaaccatcatcaatagaaatctttttgtttctaaggtaaggactatatgaagagaaaactttattcaatgacccaacagtcaatgaaggacaaatttgaggcccttagaagtctgagaaatggaagacttacctgtctgtggcaaagaacacatacccaactgtttactaagagtacccaaaaattttctcagccttgtttagttctccaaatttttcttctctgttggaactagttttttcttgagggcctcctccacaatttgccatatttgctttactgtgttgctgtcatgctttatttcccccattccgattcaggttctaaggttttccatgaagtttccacttctctttggtgtgttggggcttcttacaataggcacaccaaagttctttacggttgagattctttaaccattagaatgccctgtttttccaacaagatttgggttgaatttgtttggctttcagcaaccatagcaaaaccatcaatagaagattgttcgagcatcacacctttccaacttttttcagcacaaatgatggagatgacttcattcatggatggaagtttcttttttcctagaacttggactcgcacttgacctaactcctcattgagcccagtaagaaattcaaaaatttgttttctttcaacgttttttgagcattattacatcttcactacatttcatttgaatgttctgttagttgtcactttccagccacaaaatcttcatgatattggcatatttggtcacagatttggttctttgttttgtggtggaaatcttcaccttgatttcaaaattttgagtagaatctcatacctttgaataggcttgtcggatggcttcccaaatctccttagctgttgtaagaaatatacatgttctgcttatttcaggggtcattgaattccataaccaagacatgatcatggaatcctcttcatcccaactttgaaattttggatcttcaggctttggtcttgtgctgattaaatgacacagttttcccctgccctttagaaaggttcacaccaattgaaactgttgaagataattcttctcagtaaggtggcaagcaggttttgtagttcccccatggtttggcttagcaacactttaaatgtcacctcagtagaactggtggtaggagtatggtttgacttaagacataactgtgatgaacatagacagaacaaataagaaagaaatcaacaatgaaggtcgaggaatcaaacatggcaatgaaggttgaggaattaaaacaccacagaaaaataatcaaataaggacatgcagcactcaaagttttcacctagcacaccaagaacctagtgttggctctaataccatgtggaattctgaattattcgtattcagccaaaatcaagagatacaccagaatatatatctagcctcccctatcccaggagaggagacttcctgatatatacagtaatttaaatcaattcaaattttctaataactaatttactgctgaacaaaaggagaaaaacctaattaatttatagttttacaagaagaatactgaaaggagaaaaattcctaactaatttatagctgtacaagaagagattaaaaagagaaaaatcctaaattataggacagtttcaagggtttcttcctttgatcaatcctttagtctacttgaacccaccttgggtttatctaatgcagattttcttatgtagtttttctctgatttaaatagtaataatctcttaaaatagtaaattataacttacagatgcaaccaagaaattgacgctagtaccatggacaaaattcttcatcttcttctagagcatgccagatccaaagcaagaatttcaaccacgattgttaaattctgagggtgtgttgcaggtacattcactttgtaaaaggatacttcaaaccgg

SEQ ID NO: 11707 - DNA, 3780 bp, Vitis vinifera
  Intron number 11 from transcript GSVIVT01001399001 (locus GSVIVG01001399001) derived from phytozome v7.0 (chr-ID chr 13; pos 24242723 to 24246502 reverse strand)
tgaagttgctgtgccccgtagtcctttcccctttagttcaaccttctgaaactacacatccctaagacagtatatacgcacctactcgtctttgcaatcctggaagttccatatatcatgaacttcagttgaatatccatgtttgttctaatagtgttttctttgttagtatggttgcattttcttgttctaatagtacaaacaaggttgctacactatggttataaatttcaaggtggcaggtaaacatcatattctcacctttacaggtattggaaaattggcaagcactttctgcaaaaagtgtattttctaggtgtttagaaaattcaaaaccagctgtgaactctatctatatagaacttttggcaacttcaccaaaagtctttcaaggttttggaagattcaaaacatagaaaaccacctgatggtttcgtatatcggcagttagaaagcgtattgtggacacggagcttgcattcttattttaatcttagtttggaccatgcaattaaacccatctactagttagctcaaggtttcttgtagacgaaataagaggtcagaatttaatctaatgtttcactcagccccacagttaccaattaccaacaactttgccatgatgttacttcaaatacttacttccagtccaattcttcttccattggaaaatttctcttgctcataattaccaacttcatatgggaaactgctttgccaattgcttgaatcctctcctgatctccaaaatttcaatgctttttagagtaatgatagtggacatgagatccttgaagggaataccatagttttggttttgttgtatgcatcccctttgctcttagcttctcttttaaggctcccatgactctgctggccaaataatttgagtccgagttaatctaatattagttaactaattaattattaaattgtatgtagatctcactaggtaatctattccctttctttattctataaaaaatctaattacaatactatatgaatttagaaaatatttatataataattttttattaaaaaaaattatatattccaattaaaaagttgagacacttccaatagattttaaaaaacaaatttttcatacacagatgaaccgtcggatgaagggaaagtagacaagaatagggtggagttctatatataagaaaatttttaaactattgtagacataaataaattaccattaatttggtcttctaaaaaaaaggataagtcttattatcttgttggtaaaacctcccggaaaagaaaatttgctaaaattaaggaactaaatcccttgaattaagcaactaaaattggggattttgaaattcaaattccctatcttcacctataaataaagatgtcttccatcaaggagaggagagggaagaaaattcagaaatcaaataaaaactccctataagttcggtaagcgacaaaagaactaatacactcgttctttgtcattcaacaaggtcattcgggaataagccacttgtggccctcgattgatctttgaaatcaagaaaacgtcatcgttgtcttccaaagtgcaatcaaggcaaaagaattaaagggaaaatattctttgttagaaaaaatattattattattattttgaaattgtacctgcgatattcttgaatttaataaatcatttgttcacactatttttcctattttattttgctaatttcgcaggataaaatttatgaaatttctgtgtacaactatatttgtttattatgattttggaaaatagtgaaaatatcgaaacattgtcaatattttcattaaaatatatgtaattagtgatgcatttgttgaaaaaaggtacccatgtttcaatgatatttgattatcttctttataaatatcatatagaatattgaatatattacaaagagatgtgtaaaaatggaaaaataaaataaaataaaatttgaaatccattaaactattcatgttttttttaactctcctttattttctttttccttcttaaattatttaataacttttcattaaattatctgttttttcttcatttttttagttggcatccaaacaatatgtaggacagaatataggataaaatcaaggacaactctctctttatctacgggtttgaccatcttttagcctttttatttatttatttttaatttttaatttttaatttttaatttttaatttttaatttttaattttttttttaagaattcctttattgaatgactaatatcatgtgcattttgttaaatgtggaggatccacattcatttgatgtttcattgggccaaaaatgtataaactaattattttggatatactttatccacgtcatgttttaaaagtgatgcttattaaatacttatattttgtagttcttgttaatgttcaatataagcatgcaaatcgagaagacttcatgactttaggacttagacaagaattactaaatgtagaaatgaatataaggataaaccaacttcgtattaattttattacataattaatgttgttaactattttatgtttatattttagatcataaatttatttgtatgcaaacccaacacttttgtgatgaaatttaaagcagtatggtctactcagtgctccttacccaccacatttgcaatatattcatcaatttctatttacacattgctttgtcttcaacaataataatgagaagaggcttcttattcataccatttctcatattgttcataccttgttttacattacttgtatcattttttgcattgttcataccatccatcataccctatcttacattattcgtacaatttcttgcattattcataccttctcttatattattcatactttctcttacgttgtttgtaacttttctcacatattgaaaacaatttgataacaaaggactaaattatttcaatttgattaataataaactcataaaaaaaaaagttctaaaacctaaatcttgtaaatcattacatattaaaatgctacatttttactggcaaaatttatatttaaataaaaaaatatcaaatattacctttaataaatgtaatcacttgaaatattttatttcctttatgaaatacaaatttttgtttttcttccttaagaaatcttatacttaatctttaaatttgatttatcacaaatacgttggttgaagctatttaattttcatattaaattaatatttctttttctatatttgcataccaagagtacaagagtagttgataaaattttcttattttagataattgttaggtgcttaattaattaaataacaaattatatttgatatttaataataaattataatattacactttacacttgcatttattagtggttcaaatgtgggttggcaacccaaaataaatgatgggtaccaaagaacaacccggtggcttttgctttccatttttggaaagctccacccacgttactcaacagagtctgtcatcagcctttttcctttgctttcttttactcacctctcaattattggttttggcaaaaaagtcagcatttggtccaccaccatcaatgattccttcaagcctcatgcattttggcaatagagaccagtctttgctttgcagtttgttgctgtgattctgcattaattctgcttaccttcatttttcctgtattgaatctcgctgaattccttttgcaatggcggacgcactcctcttggcttcacttcaagttctactcgacaggttggcttctccggacctcatc

SEQ ID NO: 11708 - DNA, 16036 bp, Vitis vinifera
  Intron number 1 from transcript GSVIVT01028891001 (locus G SVIVG01028891001) derived from phytozome v7.0 (chr-ID chr1 6; pos 17779024 to 17795059 reverse strand)
tttttgtgtttgctaagcttagcattaaaaagtgtgtgggcgagtggtgcccatattatctcttaaacttggtgggattttctttcattgtttttctttaaactaatatcaccaatcccacatcggacgacgaatagggaggcctttaaatgcattactcatccgagatggggtcaaaaggtagagcccaaactgtggtgatatgggcttgtttagacgggcttttccccctagaaaacaatgattaaggtggtggcaatgtgggttgggcttgccaaaaaaaattaaaaacttacatattttatatatttgaaagattttcattgtttaaataaaaaataaaataaatgaaattgggtagatatatgaaaataatataatcactttaaacttattttcatggtcattggggatgacaccattttcttgattcatactttttgttttactataaatttctttatttccatagaaattttggctaataaaaactagagaagaaaagaacatcgtgtcatattcggataccctcctctgatatcgacataattgacttttatagattgataagacttttcctatgactctaaatctgacaaaacctaaatttgtccatatatccaaattatttattcatcttatatatttgggattagacttaattacccggtgtctaggtattagtagtaccttaaacaagcatctactatatttcacccaatccaaactataccaaggatctcattacctcaaaataaacatcaaaaccctaatctaccaatgtagccttactatactcattgccctttgtcccaatcctccaccttttatgctacattgctagaagaaaggttcatagcctctcatggttgagttttcacacaaatttcataagataataaggaacctatggtattattgaaaataaagcaaaagatcttcaacatatgaacatgaaaatccaaatataaaactacactctccttttaacccattaatgaaaagtatgtataatctaaccctaaaagtacatgtcacttaacctcattggccactttaacaaaagtaatatctaacaaaccataattacaaaagtaaagtctcaaatatgaatttcaatgggaaacttgcaagaagctctagtgaaaccaatttctctttaaagtggaatcgtcaaaactaatttaaagctttacaaatcagaatttgaatgcgaattactactaatgcatcttcattgtcctcctgaattggttttgaaatgggaatattaattttgggcattggtttgtgttacttcatttcttttgttattagtttgacctcaaatcaattttaatactccttaaaccaatttgatatgcttttgtgattgttcttgctttactccactttctccacttcaataaatactaggacatctttatgcgttatattcgtacctttattttatttcatatgtcaaaatagcatcaaattctcacatttctccttttctttgtctgtttattaaaaaatagtgcattagttctcaaaatggatattaacactaatctaagatataaatagtgatttgtccccgttgcgagtctagagcgcaatcattagtgtttttataagtatatattttggtacaaatcaactattgatgtggaagagtcaagatcaagcctagtcaacccttgattaagttaagcaaaagtacataattgccaaatttgaatcctcaagaggttgaatcagaagattatatattctttaatttaaagaatatcacaaaaatcatactcacattttttattaaaatttgtccactacttttttattctttaattcatacaaaaaataaaataaaattgtactcacatttttttactctttaatttaagtcatatgtagcttagaagtccccttaaggaatctatttttacaagtcccgaaaaggatttaaaagtcaaacataataataatactactaattaataacaacaactataaaaaaatattttaataaaaaaaaatcaatagcgataattattaaaaaataaaatttggtcatgtcctaattaattttaacatatttgtattataagtttaatgcatatgtgttataattaagttttctatataatttggtcaatgcatatgtgacaaacataataaagttagaggtgcccatcacgccacatcggttcccatattaatacattatatcaatgaattaacatcatatattaagtctattttcactgtcaatgattcttatgataaaactcataagtatacatatataacaactaaacaaaaaaaaagtatcttatatgattggtttgctattaactgaatgtcaatgagtgtatcacaattatccataagtgtctagacaagtatttttctaggctttcacagttttgatttgaatattcataagtgtctagacaattatccatacgtgctttacaacatctttcatggtgcaacaacaagcatcggtttgaattgaggggttgcacagagtaacaaagtcattatatttattattatattgatttcgtaaatattgaattgttttactttgtaataaagttatcaagaaaacattttaataataaaaaatcaacattaataattaataaaaaaataaaattgatcatatcataatacatcatatttttaatatatttatattataagatgtgtcatatatacctatgtttcactacaaaaataatagagttagaggtgcccccatcgtgccacattggtttcaatattaatacattattatgatcataaatggctatgagctatgggagaaaaaggcaaacaaatgagaaaatttgagaaaatttgaactatcttatagttaaattttcccaatgaaatttggtgacttaacccaaacatgactcataaacccttacaagacctaacacttaacaggactcaaaaacccttgcaggacctaactcttacaggacccaaaaaccatgtaagataattttccaaaaaaaaaaaaaaacaaacccctcaaattacaaatatgaccctaagaacacatcacgtatgcatggctagtggatccaagtctcattgccaccattgtcttcaacttctttccctttactcccacttccactcccaccatccttcttcttcttccccgtcgacttgcctttcttgccttcatgttcctcatctccaaccctaaccagggcaaaacccagcttcgacccaaccctaaacgaccaaaccctaaccacatcccctgcacccagtccattcctcttcacaacagagttccagttctttatcagcacatacagaatcgagttcctcttcatcttccacttcttcagcatcacttcgtcgtcctccaaggacggttctaccagaatcacctccactccatttatgttcgcgtccgtcgagtccaacctcctcctctcttccttcgtcacaaagtcctgcctgatttggcacatgggcatcgataatcggttgtgccccgcgctcacgtccgtctcgaacagcatcttctcgatcacaaacgccacattgtctccccccatctccattatcttccttctgaatctctccggcatctccggaggtggctccatgttcggctgctgatatggtctcggcacggtcttacaacgcttcttcgcggcgagggagaggaatgcaacagctttctccatctcttctctcattttcttctctcgttcttcgtcctcctcttgccgtccggcaacgaacgctacttctaccagggcatcaaacttctcccagcggtccttcttcatcatcacatcctccatatcttcaagctttaccatcttcttcttctaaccagaaactggaaaaaccttggattttagagaatatatagagcggaaatctgagtagaaatagaaagtaacatcaaatttcttgagctaaatttgagtcctagtagttatttatagatagaatcatagatttggtgtaaactaagaatttctatttttgtgtaatttatttattttcttactttttttggatggtaatccaattggctcatgagagaaaatagaaagtggacatgaataggaaacatagttgatacaaacttggtttcctaaatcactaaggtttgaaattaggaaacatagttgatacaaacttcaattcatttttagatttaaaattaattaattttgtaaactatttgtgatttgaaagtaacaaggaatttgataaaattaaaaattaatccactaacatggtatttgataaaattaaaaattaagtactaaaatattattttagtccatcaatttgacggatgtataaaattaatagtcatcgatgcctctatcgttttcaaagctattgaactttttatatttcattcatatttttgcaatgattctaaaataaagataaaatattgaacttttttaatttaagtaaaagtaatcttttgatatcgatcaatatgactaaattaaatctattgataaaaaatttactttacttgtattgattgatattaaccaattacttttaacttaataaaaaaaattaaatattttgactttttctattcagtcaaagaacaaataccatcaataattgatgtgagattactaactttattttcttcctctttatcttgttgaggtatagtttaattatatataaataacatattttaaaataaaatgagtaaatattaataatgatataaaattagtatataaatgcaagtatactttttattctttttatttttaaaatatataccatataaaagtaagatattttttaaaaataaattattttatagtttaaaaatcacttttgaaaattttgaaaattgaaatagtaatttttttatatacttcaatttttgtaaataaattttaatgttatcactctttcaatatatgtagattgtgatagttttcacatctttataaaagttatcatttttttctattttaaaaataaaaaacagaaattataatcaaaccaatacttgagtaattaaatattttatatttttactaagtgaatgttaggggtatttgttaagacttaatacttatttaatgacttaaattgactttaagttaaattttatttaacttattgacttaaaacttactatttaatttttactttaagtattaaagttatttgataaaattaacttaaaatttattttaaatcattaaattaacatattcatcctcataaattataactaggataaaaaagatgaagtaacaataaaggtgtcgtggagtagtaaaaaaaattatggaagtaattaaaacaaataagggtaaaaaagtaaaaatagggatgtagacttaataataagttaattatttttacttattacttcaagttattttttattttaagttatatcattaatttgttttatcaaacatacttaatttacttaataacttaaattaattattaaatcactttaagctattaagttgatttaccaaatactcacttagtatttggatttatgatttaacgctttcaacctaatatcccatatttgatctagtaagcaagattttatacattattcgaatgtttattgcttcttcatctttttttatgataagtttttctttttaatcatttttttttatttttctttttatggcatatttcattcaattaagaaaataatattatgggtggtgggttaaaacaagcaatctatctccatagacttcgattgcacattaatgttttctagaactatacaaattatcccacgtgtataagctttcccacaaaattttccatccttccaaacagttcactccccggaaaatatgatcataataataataatcaaatatttgcattttccttgtaagtatcaaaatgtaggcaagtccttggcttgcacttcaagctcacctttcccacaagcaaaagcaagaaactattttcttggtttataaagagcccttttccattttcctttcacttccttctccagacttgtgtagaatccaaccattgaagccaaattttcttcatctctgacctgaattttgcatttgaagaagcagaatgaggaaaagaatcagcatttgcatccgaaaattcctttcatgctctggtatgcaattttttttttttattcatgtatttatttattcattttcatattttgattatgttgggtttatgaaaatatcaataaaaacaaaaggaaaaaaaaatattaaagatagtgattttctcgtatatagtttagttataaaaaatatataattaaaattagttaaaaagttatttatttttaaattatttaatttttatataaaatagctaaaatgagtaaaaaaaagtttaggttagcatgtagaaaaaattattgattttacacctatttttttcttcgtttttttacttttatttttcatttttatttaatttaattttaaatcaaaatttttttatatttcatttaaaacagggcttttataagaactaattatgtgcttatttttatttagaattacttgattaaaagggataaaataattttcaaatttgtaaatttaacttttcatatttttacttgaaaagtaattaatttttgacataaatgacctttaatatttcaagtatttatatgtaggttttaaaagaagtggttatttttacgagaaaaatacgagaatatttttgtccagataaagctagaaaaatgatgaaaaggtgaatttcaaaaattaggtttttaatgacccttttaatcgattaaccctttattttaagtttttttattaaataataaattttttgataaatttatgtacgtcaagagatgaaaaaatatatttttacttgttagaagtcaatccaaacaaggtcttaataaactgacagactgaatttgtccttaaaatatatactttcattttttatttatattttattttatctacactagcctttatttttctcccattcatgccaccatcacaggcctgggtgggctcaaggatttgggctaccacgtatggagccaaggcctaagatactcctattgaaaaagttttaaatgggccacaaaggcccataggagcccattttaatccatacaaatggcccaaagtagtgtctgattcttttcatggttagaaaagaaaaaatcatctcaattattttcttagaggcagtttcataactttttgatatttagatttatttcaccacagaaaataatattaattttacttttaaaaatagaaaaaaaaaaaaaaaaaaaccaatggttctttttatacatgtctaataggaggctttagaaaactctttcaaaaatattttttcaaaaaatgtatccttttcagaatatatcaataatttaatttatatttttaaaatataaatatttaacaatatgaaattaaaaaattttaaataaaattttgttttcaactacttgaaataaaaaatttattcccttgttcccttaaaataaatcttgaagtcccttctattaaaagttattttaagaaaaaaaattaataacttttttctttttttaatacttttcatagacgaaacatagtcttaagttataattatttttctaaattacatcgatttaatatttcaactcaacaaattcatgtttggtgaaatgtaggttcaacactagtttttattaaaattattttatcttattgtagaataaattgtatagttctaaattaccatctacttccaataaagaaaaatatactaaaaatgttttcttttttggaaaaaaaaaaatcattgtcatttctaaaatgatagaaaaagtggcaaattggctaggccctagggagctaaaaaagaacccaaaataagcccaaacaggccacatctaccctagaaatttagtgggtacaaaatgtgagaaatagaaattggtccaacatgagtgaagttaagagcattgattgagaatggctagggttagcataacccaacaaccagaatcccccacagccccatgtcttccaaagatagtcggaatgaaagaaaagagagaacaggggtctaggagtagtctcacatcaccactaatgccattgaagccctgtactgaagaacagggtgtcccatggtatgtaccatgtgcccatttttcagaagttgattgccctaatttgtgttaagactttatatcatggatagggcaagtactttggtatgattttctatgcatgtgattcattaattatatttttcactattagagtggtattcaatagttgaaagtaatttcgttttgaggaaatgtgataatttagtatatgaaaacatcctaattttttgatatagtaatgtccttttgggtgtacccttagaatacgactgttgattgttatgttgaatattataaaaggtttgatttatttttgttgaatgcaaattgatagttatattagatagtgaaagtttgatccaaaaactagtattggagtaaaaaatcgatcaaaacccgatccaataattgatattaggttaagggtaatgagtttgagttataagaatcgtttttaaatcgggaaatggaccacctaaataatgtctattaaaataaatcaatgaggtgcgatgcagaatatcataaaagatttaccgtatttttaacaaacattaattggtttttggattaaattgttgatgtcgggttgtaatttaacatagtatgatgtgacaaattaaaagattgtgatatcccattttgttttttatcatgcagtctccggatccaaccctcctaatcttcctaattatgtggattatcgcgaagaatatgctaatgccttccgcactgaatcatacattgagttttggacacgtgtccttactctaacccatggagatagcgccacgtcaattcccatagagtccaccactgcggctcggctctcatcctaccggctcttcgctgaatatctcttagatccggaccaacccactgtcactcaactattggctttggctcaaagcagacccaaaaaccactctattctagccgaatacttttctgaaacggctaacgcttctttcctgtgtagccttctgctaaaggatattaaccgtatacgtgtttggtaccgatccttgaaatccaccctggaatctcatggagccactgagttactacccgtaaaccgctttccagtaatattggctcgggttcgggtcatccaaaccggctgctctggcttactcaagcggttagagttaggacgtgacaaggctcgagccaagctccagctcgtcaaaagcataaaatgcggctcagctattttgcttgtcgcgctaacggcttcggtggctgtaatcgccacaactcacgccttagcaatgttggtggctgcaccaggtctcatagcggcttcatttgagttagcctcgactaggaaattagccaggcggtcggctcagcttgacgcagctgccaaaggaacttacatactgaacaaggatatggacatgataagccggcttgtggccaggctaaacaatgagctggagcatataagtggaatggttaggttttggttggagcataaagaggataacctgcaagccagtggagaagtggcgcgccagctgaaggagaatgactctaactttagccagcagctagatgagctagaagagcatttatacttatgtttcatgaccattaatagagggagaacccttgtggtgaaggagattatggaccagggtccacccacttgctcatcaaaataatttattttatttttcatttttattattaaaaataatgtcaccaatttttatattggatttcacaatttatttcaatatatatatatatatataataaattgattatatatgaattattaaaaacctaaataaataataattcttaaaatttttcaataactttccttaacccgaactttaaagctaattacatcttatgtcatctttaatttttcaaatatgttctatattggtagttttataaaaatatctgtaatttgttccacaaaactcgagcttgatttcacaagttttttaatgtaatcaaacttgatgcatatgtgttagcctttatcataaaacaacaaattttttggcaatgcaataataaatttattatcatacaaaatctttataggatctttttgtcgatatttcaacttactaagtatcctataaagctaaattgctcgacatatttcaaagttgctctaattattaaccttgtcgcacaccaaaatgaagttgctcaaataggagtataaaatttcatgatcacaagtgtcattgctaaacttactgctcacaaatgtaacatatatttcttttcattaatctactagtaatttctactcttaaagcatattcgatccagtagaaataaaatagtaaagagttcctactacgattttgaaatatgtgaaatttattaattattttgtcctttattttgttattttttatttttaatcagtttgtagtaggagtgcaagttattactaatgatcataaatcattctaaaatgtgtatgatacacttgttctgtaagataaagatatcattatcctattgggcctcgatttttaagaaaataggacattagtaccaaatttattatcttaaattattggatcgttatctccttgaaatcttcaaacatccctttgaaatcttcaatcatctcttgacgatttcctataaaaatcaaataatgttatataggtatataacaattatatcactataagaatttaacttttgtgcagagtgtatgattagaagaacactttcgaaaactttgctacaataaataaatatctcattccgcctataccaagtatgtgacatttactttaactaaaataatacattttctagtttgtaaacttgcttattttgtttaataaaaacttttcttcatttaacattcatttagtgaagttttcactttttcttaattacaagttcaattttttatgctaatgatgtttagtttggcaactagtataagaacttaaaaattatagatacctactatttgtggccttttgccatcaatctagtctaaaattgattatctttaccatcgagtttgtacttcatcttataaactcatttaatactaatagattgtttcttttcaacttgtcgagtagttggctcacatgtattgtttttatcaggtaattgaattttttcatttattgcttaaacccacctctcatcacttacctacttcatataaaaaaattggttacaatcttcaaataaccataggttagctaaacttttattactaattttattatttcataatctcataaacatttaaatgtacaagcataacacgagaacgttttgggcatcctctctatttagacttatgacctatatttgttcgcattgtaaagattttagtaggaaaatacatgtttgaaataaatacgtatgtttcaactaaaacttattgtcatatacttttatttataagatatttttatcaaattaaaatgatatttttttgataattttatttaacattatcaagtaaaagggtattttaggaaataattgtctgacttatgaaaagtgcatatattttaaaatatttttaaatggatgaagataaaactaatttataaaagtcgagattcatttttctatattttttcaaattagtgaatcaaaacctatttttcccttgttcatattaacaatctcgaaaaccaaacttcgagtaatttatgagataaaatatatataaacaagaaaaagaatcattaaaatattaccgtaaaatgattcaagacttaaaaattaccttagtattccaaatttttttcatagattagaaagcaattatcattttttttttttgttttattttggaagaaacaaggttgtgagaaatagaagagtggtaggcaatttccatggtgatctattgctatcaatattgagctgacgttcccttttcaatatatagtggttgctatccatgggcaacgaggaaaaaggattccatgaaagaaagtacgtacatagaaaatagtttgagtttttggttaatgagttgttggcaagtcaaaatcttagtaggtttggataccattaattaatgtgtaattttcaaataaggtcatttcaagtggagccatgtgcttaataaatagtcggttaccaataacataacaaaaaataggaaaaaaaaaatattgacaaaagaatatcaacactatgttggtttattagatgctgagaataaaaagataaaagaaaacatatttggtaattaggaaaagaaaaaatcggagacagggtgtttattataacatttttagtagtttttgacttgtttataaaagttaatttttttaaaaaaaaatatttaaaaatataaaaaataagacaaaaacatttcaagttccaaacttttatttatttatttatttttacaaaacttcaaacaacaattttcatgagtctatgagcctgatttgatggtgtgacttaaaaacaattttttgttttaaaaaatattaagttgtttttaaaaatttctaacattgattggttattattttttggaaataaattttaaaaataaaatgaaatagataataatttttagagagtaagtaggaaaatttttcaccctttttaaaaaccaaaaggaaaatattggcccatttgaccttttttttaaaacttatttttaaaaacagttttttgttattaacttaaaaataattttagaaaacatggctaaacgggccttatatttttattttaaaaaataaaatttaatttttttaacaaaaaagatttgatttttttttttggtgcttatttttggtttaaatactcaacaatatcccttatcccactacacaaaacttgataataatgccttttttgaagcataaattaatgttagaaaaaaaaatgttatcattatgttttctatttaaaaatagaaagtgaaaatgcatacaaatgatcatcagtttgatagagtatataaataaactgaattaaaaagctatattaaatttgagaattttaacaaacaatatcatatattttgtgatttattggttcattaactacaagcaataaatactttacaccccaaaatattactaaatttgatttttaaaaaccatttcttgaaaacataccactaaatgtcaatgtgattattatgacattatgatttttttataaaaaaaaattgagaattttcgaacttgtttgagaaatatttattagaataattttctatttttcaaaacaaaaaatagagaaaacacgtttggtaatctttagaatagaaaacaaaatgttttcagagaacatctcttaattgttttatattatttttacttgttttttgagggttgttttaagaaataattttacaaatatatagaattagatataaaatttctttttaaaacatattttaaaatattaaataagttaaaaaaaatttaagtttttaaacaaacttttgttttacaaaaattaaataatagttttcaaaaattgttctcaaaaactattttttcaaaataattaccaaatagacccttcatctttaaccaaagagaaaaaaaattacataattaatatcccctttttaaatttattttcaaaaagcaactatagtctaaagtcatgtagtaatggcaagaagcaatagggccaaaaaaatcccacatgacatgtcaattctcaatcaagaaagctatttatttagttatttattattttaaggacccaaattcaattttgtttattgttttttgcaccataaattttgatattcaaattccattataagaaatgaagaagaaattgaaattccaagatgtaggtgtagccttgtatgtcaaattgtcaatgaataacaagtcattttccattacctatagagtgcatgacccatccacccaaagagagggcaccatcttcttaatgttaaatagcattgatggggtagatgtgggaggtcccttgaagtgaaccctttcatatgaaccattaattgaaaataatgctattttcattaattaggaatatcaaataaatatttttaatttcacatctacattttacctctattttaatgaccctaatgtcaaatttgaagttaaaccaaaatttttattttaaattaataatatcaaaatgctactcatatttttacgatcatccttttaaaactatgttttaagtaacacaccttaaaaaaataaataaataagacgggtaaaatcttctcatgataggtttttttttttttcttacttctttatgtggtttattttattttgaaaaataagagatgttcatgttttttgcttttttaaagccggatacgaaaaaaaaaacgtatttttgttttttcaatacaatatggagaaaacaccatcaatcagacagtgtcatatgtgcactctctctaatctcatttgtttgtatctttatataatagtctaaatttcactataccgatcatgtaacttgacattatcgctcaagcataatacatataaaaacactatctaacttttgattatcatactactacaaatgcagaccaaaaaaattaacaaccatcccaaatgcccacaaaataaaatctcttaaaagaaatgaaagcattctagcttttaaaaaccaataaaacaggatccaaagtggcataaatgaatcacacatgacagcctcttccaagacaagaaatgaattctaaagtagttcacactaagttgcatactgagtcattcagagaaggagtcggaagggacacatttaaacctcaacaacccctcagccccccatgaccataaagatgagtaattttaattggttcaagcccatgaaaattagctgcaaatgaagttggggatggcccttttacccatgcaactcaatacttctctccatgtgttttccctactcccaaaatgaaaaattcttaacaaagaaagtgtacactgtcaaccacttttcacaacttattaattttacaacctcatgggttcatcaattttaggtctgcatttggcaatggattgatgaaggtcacatttgggaactttttctatgtccatgaggttcctgtcaatggttcactcaaccccaattttgaaaaagcatacatagtcctatcaaaatcaaatttcttcttctaagagactaggactaattattgtggaaaaacttggggcataaaggtaatttagaaaccttggtacaagatttcatgtctattaagaaaagaaattttcgatatttttctaagttctggtttggttagtttcgtagttttgactattagaagttgaagttaaagacaaaatcataacttttaaaaggtaatataaaaacaaaaaaaaaagttccttacgagtcatattagaaattttacataaaaacaacatgtatgaacttatatcttaagtcgataatacctatgctttagaaaacagatcattataaatgatattacgggtatttcccaccacgtatcaatcttttaaatgcagggagttatggttaggtcaaattgagccttgaaattcaagaatgatttgggttttctcttgggcagaatattgtctactaaaaagttttatagctagaaagtgcccccaaaaacttgtttctttgtaacgattgtcaaagccactggcccagggtgccttaattgagattttgtttcttttcaaaaagaagatagtgaaattacattaaaggctctgagagagagaaagtggagctgtgctcagccattccatagcgtctttactcaacttccacccagactaacagaggagaaaaaagagccattaaatggcctacaactgctctcatgcattccataaatgcaccttccaaccatatcaaatgaaaactcccctataagtatatcccttaatccctctctcttcactccccaaa

SEQ ID NO: 11709 - DNA, 15228 bp, Vitis vinifera
  Intron number 2 from transcript GSVIVT01015611001 (locus G SVIVG01015611001) derived from phytozome v7.0 (chr-ID chr3 ; pos 14049438 to 14064665)
aatctccacagccaactgcagctccaattactcaagtttgaaagaagaaacagaatttcgtttcagaactcttttcagagcatgttgtcctctcttctttttctataaagtaacagaacttgcctgtgtaaagttaataattagcatattgagagtgtagtattagttgctgactcattctgatgcgtgtatgttttaaattttaattttagagactatatatatatatagagagagagagagcgagaaggttttctcactccttccaagcatttctctcagcaaaatgttcgtttgttcatttgtatcaaaacacccttttagtatcgaaaataccaaaaagttaaagttcatttgttctaattttctcttcattctacctatatacgacttttaaaaagtgcactatcgtttccaaacccaatgtttcttgatacttccatttaacttttactctttgaatcaagtactaaatgctacccattccttattttcctcactctattggcaaacatatccccataagttttgtcccttccgatcttattaagtttcaatagttgagcaaacaatcctcacaccaaatttttatattcattttaggtcaaagaaaaaattgaatttcttagatatctcaatcaaatgttcatattttaaaatctaattacttacaaatttgagttgttaggtattgaatttcttagatatcattaaccaactgttcgcattttaagatctaattacttacaaatttgagttgttaggtaagatcttatttatttggaggataaaataggatgtattatctaacaacttaaatttataagcaaatagattttaaataatgtcagtacgtatttaattttatattatttttaattattaagatattctattttaaatatgaaacaactatttcctcatcttaaatttttatattaatcttaggtgagagataacattagatttcttaaatatcattaaccaatggtttgtactttatgatctattttcttacaaatttaagttgttaggcaacgacctattcatttggtggatgagatgggatgtcttacctaaaaacaaaatttataaacaagtagtttttaaataatatttgtattcatctttatattattttaattattggttatcttaaacttttatattcatattaggttaaaaattgaatttcttagatattaccaatcacttatttgcattttaaaatccatttccttataaaattgagttggtaggtaacgtcttattcatttggaggacaagataggaggtattacttaaaaacttaaatttataagcaaataaattttaaatggtgtgtatatattcatctttatagatatatattattttaaatttttatggtattgtattttaaacatatgaaacaacatgcaatttcattatctcaaatttgtatattcatattaggtcaaacattgaatttctttcggatcatcaattaattatttacattttaaaatccatttgtttacaaattgagttgttaggtaatgtcttattcatttgaaggataagatgggatgcattactaaacaacttaaattcataagcaaatggattttaaatactatgtatattatatatatatattttaattgttaaggtactatattttaaacatatgaaacaatgatttcgttatctagattttttatattcatcttaagttagagaaaacattgaatttcttaaatatcgatcatcaaccagttgttcgccttttaaaatctatttgcttacaaatttgagttgttaggcaatgtcttattcattcacaggataagatggaatgtattatataacaacaatttcattatctcaaatttttatattcatattaagctatagaaaacattgaatctatttgcttaaaattttgaaatgttaagaaataggttgattcttatccctttggaggataagatgggatgtattacctaacaacttaaacttatttaataagcaaatagattttaaatgtgtatattcatttttatattatttttaattattaaggtactgtattttaaatatatgaaacaacatttaaggtttcttaaatgtaattcaattatcaaatttctatataatttttttatttttcagtttttataatagaaaaaaagttttatttaagctacaaagcagctaatcatcttattgttataagtttcatgaccttattttcatacaccatctccaatcatatgcatggtgatttgagaagcctataattgcttacaagtctcatatggatagacgagagaatcataaacaagaagttctttaattcttatcaatagaccataaacatttattttacttcaaaacattagcgtatcatttcataaatgcattaatggacaaggagtgcaaaaatgtaacccattgtgcgtgaacttcttgaatagaaaatttgtatttgcaactcatttaatagcaaaaattccaacactaaatttggtataaaatactcaaaataattagatagtaaacatgttccttaataaaaataaaaaataaaaaaaataaaaaagcaaaagaaaaaagaaaaaaataagattatttaaatattttaaaaaaaagttatgtacgtcttttagaattcattttaaataaaatattattaatcagtattttttttagaaaaattattatttattttaacaaaaaacataacttatatttttattaaaatatgaacattcatgttgtatactcttggttctcactacactattgaattgctacttatcaaaattgcaattaatcaaattgcaccacaagtgtatagatcccattatttggaacgttgtatacatttgtttcatcatttagtacttcaatttcattgtttatacctatttctatttttttacacttaaggtcttattatttatatatttatttaaggatttagattttaacatatatttttagtgatttggattaaatatattccataataacaacaacaacaataataataataataacaataataataataataataataataataataataatattttattctttatcttgaatatatattcagaaatattgacaaactggccctaagcaattaggttaccaattttttcttctttttaataaataattataaccttatcaattggaaaattgtgacgaaaagattttgcagtactgccctcactgtaagacctttgctctctcctctccaaagacgctcatatggcggactacgaaatgtactggaaagtgagacgactctgccgtaaacttcatgaaggcccattacagagaactagtatttacaacgacacagtcctccacatggtcgctcactccgaacaaaaaaaatctggtactcgaattgctgaagatgttgcctgcagacggcaacactatactccacgaagtagccaccagcaacaccacgatcagtgtggcggaggagcttttgaggagagatgcgcgtaggaacccaaacggacttggaattatgggcctgggccataaggctaaaaactaagggccttattagagggcctggtcagaatgttttgacccaagaagaaaccgggtaagacacatgggagctatgggaggaaaccatctgaagtagtgggagcagttagcccaaagtcaggaatcgtgtgaaaatggcgaagtggaaagcagagtggcagaggatacccccattacttccgccctcgttgataagcagagaagcatataagatctcaatcatggaatgagaaggttagtgttggaattgggtgggtgcccaagttgggttgacccaacccgatccaatatgtcagagatatggggggaatggtttttaggagttggaactgtgaaaaattgctcagaaacctccccactaaatatatatatataaataaaaaaacaatctctctctgactcaatctctctggctctccgactctcgcatatttttttttctaaaagaaaaggatagagagaacttagaaaagaaaagttctctaaagagtaggtgaaaggtttttgtgctgtgaaagtaggtggttcccgatttgattgtggttctattaaagacctggagtattgaagacttgaacagtgaaacaattttattagatattggatttttgttaaaaaggtaatccaaagtttttttttttataacaatggtatcaaagcatgttggtttgttttattttcttttgagaaaggacatagtttcttcttttgatttgtttttggaaagaagagttatcgtaaataaaataaaaaaataataatggatgcagtgagtaaatgatgatggatgtgcatcgaatatgaaaatgatggatgcattggatgcacgtaagaacgcacggaaagaggataatatctaataatgaagtttattggtaatgtcggacgcaaaattggatattataattaataaaataaaataaaataaaaatttgaatgatgggatgagacaataatcctagactcacccataatccagatatatccaaaaaaaaaaggaaataaaatgtagataatattggatataagaataaaataaataaataaataaataaaatgtagtatagtggaaattggatattagaataaaataaataaataaattacgggatatcctaggattcgaacctaagtcggttattttaaaagagttccttattaccatcaaagtaccaacatttgatatgacataaaataccatttattggtcctatattgtttatttcaaatgatgaatgttgacttatgtataaaataagaataataataaaaattttgagggataatgaaagacattttttttaattgtgtatttctaattaaattttggtttgttcaaatatttaattaaagtatgagtatatgttactcattaaaattaaattaaattcttttggtcaggtacaaaatggtacgaatgaagagaactaggagagtactaaggggtagaggaccctggtcgtttttagatacacttatgaattacaagagggaccctagtcattctataaatgaatgtgtgaatcatgtggttaatatgatcaagtatttggaagtgggatatattttccagctagaccataaaaagcaaattttacaaatgtcattcacaaaacctgaggataaagttttagaaaacatatgggaatttgttcaagaagggcctcaaggtttgacaaataggttttttgatgacttggtagctcttttcaaggaacattggcaaatatgttttgtgaagaatgtcattagacgaacaacagtgctttctatttctcttaacttgcaaaatgcaaaattttcaattctatcaggcataaaaatcttagagggttatggttattaaaaacaacttctagagttatagaagacattgtgtataatcctaacattgttccttttagtttcaagggagaagattaatttttcttctatatattattttttcttttatgctttgtacataaaatctaaatattttgatatgcaagacatgacgtgtatatttatcttgttgaattaatatatatatatatatatatatatatatttatttatttattcgcatgtcttcagttctttatatatatattgtcaacacatactagttgtacaatattatttcatgaagtgagaagttttaggttaaaggaaatttatgtaatttcttgcctaaaatataaaatatagatatggtactacttgcatagattatttctaattagtaataattaaaattgtgtataggagctgattggaaacatagggaactatcgtttctattacaattaaggttattacatattagaagataattagagcaagtatgagtatagatatccataaaagtaccaactaataagatttgtgcaatatctctatgtagttgaatatgttgattgcaactaaaaacatcatagcagaactaaataagggtgaaaaactgaatggtgataattatgagatttggcatcgcaaggtttgatacatccttgaagagcaagaagctcttaaaacactaaatcatattatgcaagaacctgaacaagggaactctgctcaacatagaaaagatcaggagacttatgtggcctggaagaaaaagaattctttagctcgcattacattgttaagttgtatgcaagatgatctcttgattgaacgtgaggtgtaccaaactgctcatgagatgtggaaagctttaaaagaaaagtatggtggactttcagctacaaagctgagagaacttgtaatgaaatttggaaattacaagatgtgactgaaccatacaatgaaacaacatctcaaggagatgaaaagaatgataagagagcttaagacatccagacatgtcctcactgatgagcaacaggttaaggtagtcattagatctctaccaaagagctgggaacacatggtgatgaacatgacacataatgagagtgtcaagacctttgatgatatagttcaccatcttgaattggaagtcgagcgacttgtggttgctaggcctaatgaacaagctaatgtagtgattactactcaaaaagtgctatttcatagcttgtaattaactcttttaaacacttttgagtagtagttattaccttttaactcaattggcatgttaaggacccttgcaatcaattctaataaaattgtgttaagttttggtgttttgatagctttttgatcaccaaagcaatccgagattgaggagagttctttggaatccatggcaaaagatgtccggacagggcatccggacacaccatcgaagggcagcggaacgtgggctgtggcaggctgtcggaatgacgtagcaaggtttgtgcactttagtcaatgatccggacaacatatccggataggatatgctatcgcccgggtgtgatgatcgcgagtgccgtgtgcttctccctgagggagtccggataggggagcgcgccacgtgtcctcttggggaatccggatggagttgctccggatagcgatgcgcgctccgtgtcattagggggagggttccctacaccttgcacacgcagacggtcccccttgcgacgttccaccttcttcggatatctcacatccggaattctgtccagctgacattccaccttcttcggatatttcacatccggtgcctgacgccggatgggagaggagggcgtttcaacttccccggtcagacatatctggatcctctgatagtgcttacccgaagagttttgcagccatcttgcatagtgccgcggttttctcctgaagcttctcgatatttgcgaccgacattatgagatattttgctttagatatttgatgtctaaatccccaaactatccttgtaacccaccaattataggattccttagtctttatgcaagaacaaaagggtgaataaccttatatatattgttttgtaattttcattttaaagagagtctgtcgggagcatgttctcagacgcatcctttgtatagttttgcaaggaagtaaaatacagagcacttgctctgcttttcatatatatttttgttttctcgttagttttctttctagccaatcaaactttgaggatttttcctcagaggatgagaggctaggctcttcgtctcttggagtgaagaaagccgggtaagttttcttatgcataaattggaagttttgttattttagattttaatgaagagaaagtgtaacccgttaatggtttttatctttttagttaacttaaaacgccttttaatcacctgggccaacacttgataaggcaagtggtctccgtccattgagatacactagtttatctcttgcgagcctttgggaggtggtttgaaggtaggattttctagaatagccaacacttggtaagattttggactttaaggagacatccattagttatctcttgcgagcttttgatgggtaatccaaggttaaggatcaccttgaatggcaaatgctaggtgagaggcacgagccattgcaagatgcatcagtgaaagggatttagtgtttgaacccattaaagggaagcatctgtaccacaccggttagagaattaactatatgttaattctctaatgcgaggaaaagaaacaagtgatcagaactcttctttttgtatgaggaatctgagcctagtgatctgaaactccaagaaacactttctttgtaattaaaatcagctattattttttgttagcttaaaaccaatcctttttcaaacatctttatgttttcttttaaagctaaccttgaaatgaaaaggcaccaattcagctttgaattaatatcaattgtggagtgaaaacccatcacagtgaacgaccctagagccactatgctatgctagctaaggctatcctagtacatggtgtaataggttataaattttgttgattactcccttctgaggaccacaatcaaaggacaccagctggacacgtatcaaatggcaccactgtcagggaccattgagaggacatgaatcagctgaaacaccaattgggaacgaatcaaatggcgccgttgcatgggatggtgccaatttacagtgatatgaccttttcagagtacttgtgatcttcatcacaagtttggtgacttttcttttctttttactaactctttttatttgtttctttttctttgttcatattttagtataccttttatttagtttttaggttaccttaatttttttcttagaattgtttttcttttgttttcttttgtcttctctgtttgtaattcacaaattgctagttgtgcatgccatgttgaatacgagatagtagaggaagccatgaactttatgagttatgtggctgaagtttcaagaggatgggatgaaccaaatgctagagatatgggaagaatgacatctcaacctaatgctaagggtgagaggtatattttgaatgacggcatagacatgaaggcaaagattgcagctatagcaaggagattggaagagctagaaatgatgaagatgcaagaagtgcaagccatctctcaaacaccattgcaagctatgccttgtgtcatttgtctatcttatgagcacttggtggaagagtgtcctaccattccaacggtgagagaaatgtttggtgattgcaacacctacaattccaattggagggaccatccaaaattctcttggaaaccacagccacctcagtacaagcaacctactcaagcaccacagcaagcctcaaaccttgatcaagctatggtgaatcttagcaaggtcgtgggagacttagttggagctcaaaaatccatcaatgctgagctcagtcaaagaattgatagtgtagagagttcattgaacaaacagatggatggagtgcaaaatgatctatctcagaagatagataatctccaatattcaatctcaaggtttgccaacctcaacaaagtgcaagagaaaggaaactttccttctcaaccttatcaaaattccaagggtatccatgtagtggaggctcaaaagggagaatcttcaatggtgaaggaagttaaaacggttatcactttgaggagtggtaaagaggttgatctacccacatgcaagttagagcataaggtagagagtgaaacagagaaagaaaagagggaggaaatcaaaggaaagagaaaggggaaaagcatagagaaagatgactatatagatgaagaaccacagaggatagtcatcaaggaagaattgatgaagaaacacatgcctcctcttgtcccccaagctttgtatggcaaaatcatacaaaccaaatctcaagtaagggatgcaaacttcatatgggatccgggcaagctaaatcaggatcaaactttttgatggacttagtctttttaaagactagctagtccatatctttttgttttatttattacttgttttaattttgatttcaatgctttaattttgatttcaatgctttaattctaatttttttttatgtaatataggtttttggatgatcaaaattaggaggaattgcaaaagaagtgaatgaaggtctcagggagctaaaaggagctcagaaccatgaaaattcagtggtctgcgaaatttcgcagcccaaaatagccccatgtgaaaatggcctccgctgcgaaatcaccattttgctgcgaaataatctccaagcttcgaaatggctgcgaaatcacctccaagctacgaaatggccttcaggctacgaaattgacttgcgaaatggaggggggtttgtgaaaacaccttgcaaagccaagggatgttgcgaaaatgccaacaaagccccgcaccatgcatctgaagaggagagccccatgcaccctgagatcacacacaagaagtctctcactccatttctgacctccttaaaccatcaaatcccatagctccaattgagagctccagttgaggagactatgccacttaaggagactaccaaaacagaggtcaaagtcttgatccaacccactcaagaggccaccacagatgcatcagctccacaggaccctaccattacttgatcatctcttcattttttgtatttacatattagtatagataattccatgttttgatgttttatattctaggattggatatattattgacgatacatcatatataaacatcattttttgtttaaacttgacatttttctatttcctctactcactaactcttatgttttctttgaaacatgtggtttctcctatatgactcagactccatgtcactcaggaagtaccacttcctccctatttttcaatcgtttttgtcacattgaggacaatattcagcttggttgggggaagagttgaggaaggaagtttttgctattgatgctaagttattttggtaatttagttgctttttgcttaatttttaaattttttaagtttttattctactctccatggttattaaggaaaaattttcaaactaaaatgggagaaattgaatttttgtctttttacttgacttagattttgtattatgcttactaaagttgatgaattgttgaaacttctattgaattcaaccttagttcttccactttaagctattcacacactgtgcacaataggttccgagtataagatgaaaaactatttccctcttgacttaggaaaattttagacctggtacctttgacctcatttaatagtgttgggacaccttataaaaggccaatgagtctttgaaaaaaaaagaaaaaagaaagaaaaaatgtttgcttgccttgaaacccgagcaaggtccgaggggtatatggtgaaaatctttaaaacctggtgcactaagcctttattggttgggagtcaccgacctcaatgctcgttacaagggtgaataggtggagtttaacatactgtaggtgcttgggtattaaaattcattctcaaaagtccggggtaaaattcgaggagttagtggttgaaagatccttaaaacttgatgccctaaaccttaattggttgggagtcatcgatggatccccgttacatggacaatttagaaaagaaatacctttaagccttgtactcctacaataaaattttttttttgagaaaagaggtgcgttcttagcctattggaggttgatcagtttgctaaactcaaaaaaaaagaactaggttggggggagagattagttcaacatactatattcggaagctaataagtaacacttagttgacgcaaaacttttagctttaagcgtaatagaaaattctttaagatgaataagaaatctgatgatgcttcaaagaaaggaaaaatcggggcacgtaagaagttcaagtgtgttaagaaggacaagatcaaattgaaatgctacaattatggcaacaagggtcatttcactcgtgagtgcactgagccgaaataggtatggtcttgttcaaataactcatgtgcttatgtttctagttgtgtaatgttaactgaatccattcctttgtggactgtagactcagccgccaaagaccatatagctagagaccggggagcatatgtagagtttcaaaaaattagttctggtataagatgtatctatgtaggaaacaacttcaaagttgaagtcaagggcattagaacgtgtgaattggagttacgtagaggacgtaccctattcctacatgatgttctttatgcttcggatattcgatgaaatttggtctatatgttaatccttcttggtttaggttttaatttgaattttcatgattcaataatggagttgtatttgggaaacaacatactatggttttggatttattctgaatggttttatggttcttgacattgataattgtgtatcgtctaatactaaagatagttattattcattgatgactacttctagaaatacatgtgataatgtgatcatatggcatgatagacttgggcatattggataagaaagaatgaatagactagctagagaaaatctactaggtcaattcactaaaattgatatgccaacttgtgaatattgcctagcaggtaagacaataagaaaaccattcgaaaaaggaactagagctgaaataccattggaattgatccattctgacatttgtggtcctatgagtgttaaagcaaggcatggcgccttgtatttcatcacatttatagatgactttactcgttacggtcatgtttatctgatttcttataagttagaagtattagattgcttcaaacgctacattaatttagttgagaatcaatttggtaaaaagattaaaacattaagaacagactgaggtagagaatacctattagaacaatttaaatatttatgtgatgaaaagggtattagtagataactgactatttcagggacttcacaacaaaacgatgttgctgagaggaggaatagaatgttgttagacatggctaagtcattgatggctcaagcaaatcttcccatttcatattggggagatgcattgttgactgctacctatgtacttaattaagtaccctcaaagactattgcatctactctatatgagttatggaataattgaaagtctaatttaagcaatttgtgaccatgagggttagcagcttatattcacattccttctcataaatatggaaaattaggtcctagaggaaggaaatatatctttataagatacaatgaacactccaaaggatatgtgttcataggtgagcatgaagatggaaaagtaactgaattagaatcacgagatgccacattcttagaggaggatttcccatgtatgggtgagattgatagggatttacatctttatgaaatgatagatcttggcataatatctacacccaaacaacaattgatgcctgaacctagtaggagtgaactggtacctgtaacaagtacaatgaatgagtcaatattgagaaaaagttatatacaaattattccttgatgatgatttaagattgaaggggaagttcatattgttactcaatatgatgatgctgagcctaagtcggttcaggaggctctaacgtgtccaactaaggatgaatagagaaaagctatggaacaggaattggagtcaatgcaaaagaatagagtctgggacttggttgatctgccttcagattgaaaagctattgggaacaaatgggtttttaaaataaaaagaaaggcagatggatctattgaaaattataaagctctattagtttctaaatgttatacccaataagagggtataaactatgaggaaactttctctccagtagttaggtttgcctcaattttcctcattctagctatagtagctaatatggatttagagctacaccaaatggatgttaagacaactttccttaatggagagttgaatgaagaaatctatatggaacaaccagtaggtttcattatccaaggccaagaacgcaaagtgtgtaagttaaatcgatcgatttatggccttaagcaatcatttagatagtggtacttgagatttcattgtgtgacaacttcatacaattttacaatgattaatgaggaccattatgtttacattaaacaatataaagataaatatgccttattatctttatatgtggatgatatacttatagttagaaataacttggagtttgttcaaaccattaagagatggttatcatctacttttgagatgaaagatatgggagaagcatcttatattcttggagtaaagatccatagagattgttctaaaagattagtggctctttcacaaaaacactatattaagaaaatccttgaacgatttaatatgcaagattgcaatcccattgatactccatttgcaagaggtgaaaattaagcaaagaaatgggtccaaagactccagaagaaaagaaaaaaaacgagtaatgttccctactccaatgctgttgggagtctaatgtatgctacaatgtgcacaagaccaaacatttactatgctgctagaatggttagttgttaccaagcaaatattggaatgatgcattggaaagaaataaagagaattcttaggcatctaaaaggcactaaggattattttctttgttatcaaggcaaagaattgtgtttggtgggttattcaaatgtcgattgggctggtgatctagatgagcgcaaatcaacatctggatatatattcttgcttaacaatggtgctatctcgtggagaagcaagaaatagatttgtattgctttgtcaaccatggaagtcgaatttattgcttgtccagctggaacacagaaactatatggttgagaagatttttgcaaagcttgaaaatagttaagaatgtttttgggccaacaacagtctatagtgatagtcaagctacgattgcttatgtaaaggacccaaaatatcatgaaagaactaagcatatagataccaagaataattttataagagatattattgcacgaaatgaagtaatcctgaaatatttacctacgcatgagatggttgctgatccattcacgaaatccatttcgagagacatgtttactatacatgtaaagtcagtaagactgcgtaggttatactttatgttgattatatgacatggatcattattgattggacataagatactctgtaaatgatcaaatgagacgagtatttgttattcatatcattgaattttgtaaatag

SEQ ID NO: 11710 - DNA, 540 bp, Vitis vinifera
  Intron number 14 from transcript GSVIVT01035663001 (locus GSVIVG01035663001) derived from phytozome v7.0 (chr-ID chr 4; pos 3110676 to 3111215 reverse strand)
tggagaaccattcccatttggcttcagaagtattggtatggtttggcataatcttttgaggagcattcccttttttcttcatttttattaacactcacatctttttagctctaatagagctcaaaaatatagtaattgagctattaaatcctacagatcctttctctagtaacacatgccataccaccatctttctgtgcttatcacatttgcggtggtcaaacaggcttaagattggatttttttttttccctttagattaaactcagagcaatttaattgggctttcaaaatctttttcaagtttgactttggtagattcttagcaaagttcaccaaactgtggcttattcttcaattttcatgtttttttattttcattgttctttcttcctttcagtaggcctattttcatggatgaattcacattattttgccacagccatccaaagcttaattttgcccccctttttttgatgatttatttgttttgaaatctttgcagactgagcgggtactcgacttcagtgactgtggcac

SEQ ID NO: 11711 - DNA, 7427 bp, Vitis vinifera
  Intron number 1 from transcript GSVIVT01003763001 (locus G SVIVG01003763001) derived from phytozome v7.0 (chr-ID chrU n; pos 12470980 to 12478406 reverse strand)
ctcgaagtcgtccgggagagtggctcccggcggtggtgttgaaggcgggttgaggagagggaggaacggtggcggaagaagaaactctgcgcgcttattgagttccataccggaatagatgggtagtttaggaaatgagcgtagtggtattattgtaaatatggtaacggccggggttcatcttctttagtttgttggctgcgaaccctgtgattagtggcgactggccgtgggcatttcccatggcgcccgtttactttttccatctttttgttccttttcttggctgtcatccatacgagggttgtgttacaattttacccctacatggatttctaaatgaaattacaataataaccaatatttggaacgatggtagcatgactgtatgagatccatccaagaagctgccttcccttccccatttgaccgatggaataacaagtcaatgagagataacgacaatgtgagtaattaattggacgttcatcagagaatatacttcattttcgtgccagggtttttggccctccaaaatgggtttcgcctctctccaatcttcaatccatgtgtcaagatacttccctacatttttcacattcaaaatctatggatatcgctcaaaaccacgccacacgagggattcaaatttatattctaagataattcattaaataaaatataatattttcatatttaaaggattcaaatttatattctaagataattcattaaataaaatataatattttcatatttaaatcattcattaaatgaaaatttggttacgggagggatttgcttaaaaaaaattacaaaaaaagaaaaagaaaattaatagagaagacattcttggtcaaatttgttcgtattctttagaagaataatgaactgacactgatgtacatgctaatgtccattaatctgagggccgatgatgatgtgtcattttggagtcaaaaggcgtaaaagattatccatacatttccgataagagaggagctaaatgacaaatactaaaaaaaaaatgaagcccatgaaagcatgagatgtatcatgtatggtactgtcttgagtgtggacctttctcggcatgaacatgattctatgaatatagaaatgggcgtttaaattctaggatgtaggggggattagggttacggaagggtcgatgttaatcattttacgcggaagcgtaggtagaagaggaagagcgaacgggaagcaagcagagcatccccagcagggagctgacgaatgagagagcggcgtgtggggttcggttagagctaaagacatgatgagtatgatgagatttttttctttacagctgtaatctattaacccattgaatgatgagcccctctctttttctttgtgttatttttacgttcgaatctcacaattaatagtgcatgcataagctgaaaaaggaaataatgtgttctaaattttgtaccatttagaggacccatgtgatagagcgatggattgttatcttgggagtggttggagatggggtgtatttgccctgcacggctgcaccctacccaaatgtggttttgcatggattggtccatatatgactatgttttgtttgtgggtcatggacattggacacttgcagttttcgttagggaacagatggaaccaatagacatgacgtgcacctgcttacggcggttgcgatactgttaactagtaagtgcaaacagcaatgcccttcaattcaacttggcaatttgtcaccttaatttgaaaactgtcttccacatttgacaaaagaaataaacaaacaaaaagttaagtagtggaagatttatgagataatttaatattgggagcagtgatcccgcgattatccaagttgcagctccattaataaagaaatcatcacgtgggtatagtataaaaatgccccccaacatatgcaatcagattatgcggaatctgtgaacaaaaattcctctctagcgctccatgattcatgaaactaaagctggttgggagaatccaatgctccgttaaaatgcgagttttttttggcactgggaagagaaacagagatgagcggcacggccatggttttaaccatgcaggtgaaaaacgtgtgggaaagaagagcttcaacttgagtgcctgggggctggggccattcacaaccccacattttaatgtagaaccaaataatttgtgggttggtgctatgttcgagaaatccagaggcgggaggtgggtgagagagagagagagagagagattctctccttttgtggggtggcaattataatggtaccgaggctcagcgcactctcaccttttggccgctgctctataagggacagatttttgaaaagttgaaagttcaaatgacctattacgaatgggataaagttgggtgttaatgacccatcttctcttgaccatgaatacaggatgcgtccaaatcaatggatagagagcaggaacatcaacaacaaggacaacgaagagggttgaatggttgaaaaagtgatcaaaagttgtagctgtcgactgtttatcccatcatcatctcatgaattgtatggcatgaaatcaagataacatcatcttttcattcatggttaatattatatatatgttatcctgtgttcttggactaaaacaattcagaaaaacgattgtagtgggaacggagagatctagttatggatgccgggaagataccaacaagcacacaccataaacgaaacatctaagagggaattttctgttttatttaagaacacagagagtattaatcacgccccagtcaaaagtacaactgatatgtgcgtcacttgctagtttttccatttgttatggcttttgggtcaaattatcaatgaaattgttttccacttgaaatttagagaactttccaataaaccacgtggaaaagtaactgtgactgttgggaaatgagtagcattacttggtggttaagaactctttaaggatatttttccgggacaggcaaattcaatctggctgttcaccccgaaaatcttatattaatgtctgtagtagagaagaaaagattccaatgagttccttaattgcattagggacctacgttctgtagatgttaagacttaagaataggtgagtgacatagtcttttcaaattttggcaagtcttcatccccagttccaagcatcgaccctacccatttctccaagttgcttcaatattcatggcttacattaacttgacataaatattacacctctttggatccagctggtgatcgcatcctaactttgacttgctttcattgtctcttataaaacaaataaaccagtcgtgttctatcaatttaaatttcagatcgaatttgtaattttgttcttttatttatcaagagctttttttcccttatgatcatgactttgttttttttatttctgcataaattttcaatcacatatttttggcattgctattgtgaaaatgcaccgccaacggtttggagctttatagcataccccaaaagaaaagaagagaaaatacatatggcaaagtagcaatcatttctccaccttttggaatgcttgtgaattaaatatgtgcggggcttaatcattcatggaattatcaaatgacctgtggcccaactaactagccaatctttagccagaatgttctggtagatttttctaaatgcatgtgcccatggctgcaatgataggccggccatcttgaattcctctgcactgcccataacattaggggtcctacatgatgttaaccaaacttctctttcagtttagttttcttaagacatttgggaactatgaacacgtggatgtagtccctctacaaacacatgaatctggttttctgaggatattgctcgagagcgagacatatttactgtgcatggccacaatgctgtgaggcccaactctatgagccaaaacaagtacgaatgccgactcatggtgtcggtccatgaacaggtcccccataacccaaggctttatcagcaaagctttcttgcacctatttcttcctcattggccacactcgatcaatcaagcttttttggttgacaaccacgtcaacatttttatctttttcacttgcaaactcatggaatatctctcatcaaatcaagtttgtttttttttgtgctttattatgctgtcattataacccttttttattccagggaccctagtctcactccagtattatttaccaccagataagtactatgaacatggccgccaattattgatgtcttagagaataaagaccagagattttttcgtatgaactggtccaagctcatgaaagcaattgcctcagccaaatagtgtctacggcaacctattttcaacaaacacctgttgatctgaccgtgtaaaggggttttcctgattatctttcatcatagatggatcgactatccaatgtttagtccataaatgaaagtcgtgaggggctgtttcctgggcatggaattagaagaagacagatgtaataaatttaatattcctaggacgaggaaaaagggggaaaaaaaaaaaaaaaaaaaggaatctgaacattgggtcttctgttgcccattttgaccttggacctttctttgaagcacatgcaatctgctccattgttctcatcgacagggttctgttcaaaaggtcatgaaatttccttccattttcttcacaatatactccaagtatttaaatggaattgggttgtcatatgaaaattattttggttcaatttcaggtacttacaattacagagagactttagtaagcgaacttgtctgcaccttcttgaccagtttcaacccctcggaagagccacaagcaagggcatatttaaatcttggctggacgtatctgcaccttgagggattttaatttcgaattttcaaagaccatgagctgaaagctgtttgaatgcgatggtcaaatcgagaatgtggttcatataaactctctccttacagttagaaatgaagaagacggtgatagagagagcataagagcacatcattgtcaatatatgtttgttttatgtaactttcaagccaaaaattgagccaacaccaaatgtcaatactcaaaggaagtggattaaattttcccattgttttaacattttaaaattccttacattgaatttgaaacagcaactcttgtgctggatgggtaccctgctaaggtaatataactgggtcctcctccatagccaatgttttaggatttgtagactttgattcctcaattggctaatgccttgcaggcaagtgatgtgaattacagatttctgctggccacacatcaccgacaaatcatacaaatttatctatcccatgttttagagcttccttgtttgaaatatattaatttgaaaattttaataccattaatgattacaatcatccaaagataaatatttaagaaggatgatatggcattgcatactccgtgaaatatacgataaagctagtgctcccttatccttttgcctgagatggctcaaatcataatccattattcttatgcctacctttccttaaattagcgtgactccaacactcgtatccatcgaggtgaggaatgaggattccctcctttttcctcatattaggaatagattttatgcctatcgcccaccaaggcgacagccaagactttaaatgcgcacggcaccaagacgcctatagcccttctttttaaattaaacttctttctccacacaaacgcacacagagtgacattgacttgtgacatgggtgcttgttcttccactcaaaatacaaagactctcaaggcatatggtggaggacgcggaggaggagatggtgtgaaggccaaggccagggtcatccatgtggacggtgatcagatacaagagttcaagcagcccatcagagcgagaaacatcacctcccagaatccgggctgctttatctgcaactcggagtccatgttcattgggtcatgcgtgccccagttacctgaggaggagctgttacagccaggtcagatttacttcctcatgccgatttctcgggcccgcatcccattgtccctttctgacctgtgtgctctcgctatcaaggccagctctactcttggtaaatgatcatccttcactctcagatgactctggtactgtacggtgtaagcacagtagccgaggacgggtactgggtgtcagagtccagctggttgaaaagacggactctgattggtgagcgtgcccaccgaagattgggaccttagtagcgacaaatattgtacaatctcaagaccgaagtacaggttaaaagaggtttgggttgcttggcctgtggtgtagaaaccgaagtctcaattatgggtttagaattcaatgtttgatggggtcctgttacaaatccatttgattcatgatctactcctgttgaaaagtgaaaacgattatttggataaattgatctgatgccaaaaacagaacaaattacttagtacattgctctcactgatggagccactacccaatttcctttgcaagcacagggacaaattccaaaaaatgaagacaatgcccacttaaaatctaaaggttgcccctcaaaacattctaataaagcatatttttcaaaatttaaaacaaatgggttatatactcagctaaagcataaatgacttttacacaaaaatcatcttctttctattaagattccactccgccacatatgggcctgtgcagacccttttatggggcctccaaccgagcttatcacttcttcacaaccgtgccccctgtccttaaaattgaccagctatgccattagctgcaatagagtgaataatggctgaatctctgtaatttatggttttaaatttttataaatgctcccctaattaacaaatttgatgaaaaaagaaattcttcaatcctacttatgagtagttttacatactataatggaaggtttaaacttgatggaggtaatgtatatatgtaggaaatcaaatgattttaatatatggattatattggagatcttagaattggactaagttagatagatcaatcttggtgatcttctccatctaatgaaataggggtttgcttgggaattgtcggctttgtacttgcctcccaagtatatgcttcaataaaaatcacacatagttccttttgagtatatgattcaacaaaaaccacactataataaattgatctaatagaaatctcagccaaaatgccttcctataacccaacaaataaaagtatattacataatcggttttagggggtgattactcaactattcagtgattttggcaatgaatattcctataaactattgggtgaattcaataataggaatgtttgcaaaatattaaatcaagaacaaggcaaatccccatctaccacaaaaactgac

SEQ ID NO: 11712 - DNA, 5374 bp, Vitis vinifera
  Intron number 6 from transcript GSVIVT01031528001 (locus G SVIVG01031528001) derived from phytozome v7.0 (chr-ID chr6 ; pos 17509661 to 17515034)
gtggtattgtaagtaaccctgaacattttatcaatgagaattttgaatccaaattgacacaaatttttgaatttcatgttggtaggaagttataaattatacaaaataataggtatgggagttaatgccatattattacactgacactacctaacctaattgcattaatgaactcataaagttcatgtcctttgtaaaacgatgtaataaatcatataagtaatttttgtaaagaagaatgaaatgattatttttatagatatttaggatttatttgataatattttttaaaaaatgatcaaaaaataattttttgaggacaattcttataaatcattctcaattatttttatgagtaaaattttatttaaaacctaaatataaaaaataatttttttaacttattcttgataaaaatattatatactcatattatatgtatcaaccatccgcttagagcattttgagaaataattgaaaatataaataatattgcttagagcattttgagaaataattgaaaatattaaaaaaatattatttatatttttaattatttctcaaaatgctctaagcagatggttggtacatataatatgtttctacaacaaattgtttttcaaatgatcctttgcttcaaagtcattaggtattcctaattgtagtaattgtattagggtgtgagacatatggtagtttaattttcaaaaatttggcattaaaaaagaaatgaaaaaaagctaaaagaaatggaaaggaagagaaaagattggatgccatgcaccccacaattcaatatgccaacgttgacctaattcaataccaagttaaagtagtacacacaaaaaataataaaataaaataaaacaaaaatcattttcagcattaaattaaatgctgaaaactagttaggaatttatgttcaaggaacgcccacgtatccaattcctagtccacaaaattagatgtttcctaaatccttccggagggttttgtgtttggtgttttttcaaattaaattcaaaacataatatttaaaaaatagtttgatgaagaaaataattggaattttttttcaaaaaatcatcttgggattttggaaaactttatgccagaaaatgggtatcttaagttttcttggattttaaaaaattatcgtacttagaaaatacaatggattcttcaattataccctttgttctattttgacctcctccattatgtaaatgactcattttctacattagccttttgtctacttaaatcatttttttttttcctttttctccttttttattaatgacaactgtctttgttattgatatgatattagtagttaagggtaattagtagtgaaatcaagactaattcaatcttaagtatattcctaacaggaggagagggaaagggagaaggtgaattgagtgttggttaaattttaattttgcaaaatatttgatgcagttgatgatccttgatgtcaccgccaataaatattgagacaatgaaagaaaatatatataggtagaaagagatgtgaacaaagcttttataagagtttaataatgacccttgtccactcccttatacttcttcccaaacatgaggcgactctactaaatttgtaactttttaaccaaaacccttgaattcttctgacttttagattaaaggttgcaataggcatttacacgtttctaagtgatcccttgcacttaatcaaatcttcctctctcaaggtacaccaaaggagttttctgattaagattgtaaccactagcttaggattaagaatgataaagggtagctaggatcgaaaggtgcattaaatgaatttcacaagtttgagagtaaatgcactcaaagaattaaaaataatctattttctaaataatataaatgatttttagtggttggtaagattataaatgaattcccaaaactttaaataggaattttaagttaaaagtattagttaggtacaaattaaagttacattggttgacttgatgattgttaagattgtaaccactagcttggaattaagaatgataaaaggggtagctaggatcaaaaggtgtactaaatgaatttcacaagtttgagagtaaatgcactcaaataattaaaaataatatcttttctaaataatataaatgatttttagtggttggtaagattataaatgaattcccaaagctttaaataagaattttaagctaaaagtagtagttaggtacaagttaaagttacattagttgatcggatgattgctaagattgtaaccactagcttggaattaagaatgataaaaggggtagttaggatcaaaacttgcaccaaataaatttcacaagtttaagagtaaatgcactcaaataatgaaataaaatttcttttctaaataatatcaatgattttcaatggttggtaaaattataaatgaattctccaagctttaaatataaattttaacctaaaaatagtagttagatacaagttataattacattggttgatgattgattattcaattagtcattaaatgttataggagatcattgagagattgcaaatcaattggttgcattactggtagattagtacctcaaatagtcaagtcttgccttaatcgcttagtgactattatctattaccaaccacttgccattttcagtcttggtcaattgatgccctttaattttcttattttaaaaattttcaagttttaagtttcaaatcaagaacgaccgactacttttgatctttatatgattcttgataaccatttgagctttaatcatgatagatgataggttatttttggttaatccttaatttatctaatttttaaattttaagataccttacaatccaatcggataagaattttctaaaaattgtaagacaaagtgattttgaaaacatgcatataatcgtaacttagtgaaaaacaaatataacttaaactttcatggtgcatgctctttcatccttaattcaaatttttttaatttttattttatcttataaacaatgattttttaaccttatgccttgctcaaaaacaatctaaacacttgattaaattattaacctcaatttgtttggagatcatcaaaatttatggtgtgaaacattgaactaacattagtgtatttaatttgcctattccttccaagaacctatgaagtcaaagcactaacatgatctagggccacatgatcctctaattttaaagttctcctaaattagctcatgatacttaaagatttttgttagggttttattttattttgttttgctttaaactgctttaaaattcactaaagattgtggacatccaggacatgagatgcaagcgcataaataaaaaaggatgataataagtgggtatttaataaaacttaatatttattatttaataatttaaaataattttaaattaaattattttactttgttaaaattaactaaattttatgtcattaaattggcatatttaccatttttaattttaactaatatttatccttattgattttaattcatatttatttttattgatttcaattcatatttatttttattaattttaaggaataaatttattaacaaaacattcatatttaaaatgttgtaaatacataagatgatcataaaatatttattatgaaaaataagttatagatatgaaattataattctaaaatactcttactttgtgggcaaataaggtaaagatgatttaggattaataataaattaactgttttaatttaatactaaccaaaaaagtttaatctatttaaaaatttaaattatgttattaagttatattaaatcattaagttgatttattaaactacctctagattattgacataattgagaagaatggatggcaaatgaggcaaaaattaatttatggccaaatttgaattagagagtgtgtcctcttagggagtctattagaatatcttatctaaggacataaaatctctctcctttatatatatatatatatatatatatatatatatatatatatatatatatatatatatatatatatatattcttatttatttatcatttttgaaaatgggacatgcacacaaaaaggaagtccatttagagcaaagaattagagcatgactcttgaccaaaatgttgtacataagattagcttaattagagcatccattagatatttttgtccttatctaaattatagcctacaagcattatcaatacaagatcatattatttcttcaattagtacttgtttagttgttcacgcatgttaataatttatagttgttaaaattattaggaaataccaaattataataaaaacaaatctcatatgcaccatgaataaattcaaacacaacttaaatttaattaaaattttataatatttaaattggacaagagtcattatattaaatatgaaattttattagttcaagtcaaaaatctaaaaaaaagagaaggtttattacaaaagcaaaatcaagaaactagctaaaacaaaatgttcataccaacaaaaaaatttaaattgaaaaaaaataattaagtaccacaaaagcttaaaatgaagactgattaggggcaggtgtcctcttgaaacttttgacaagagatagggccattgggctaaagcccacgtattttataactgacaaaatttacatgtcttagaagttgctccctctgaattgaaatcttggctccaccattacatccatgcatggatttttctttatttttctttaacaacttttcacatttttggtagaatctgactcacatatgggaattaattaaggaatgatggagtagagaaagaaaagagaaaaattaaaactagtaaatgtaattagataaaaaccatctttcatttggcagtaaagggcttgaaccaagatttaaagataaatgtggtgggtaaacaaaagttggattaatagaaaaagaacatctcattctttttagtctcaaagatatgtgaccatgtgagcatgaaattgggactaattaactagaacaaaatagactattttccatttccattgatgaattaattaatatcccatttcttttttcaattttttttttttaaatgtgaggtaggataaaaaaatgaaaagagtggagacaatatgagatgaggtatgggaagaggatggaggagaaaaggggaaagtggggaatcttatggttcttgggtaggatgacttgagattgaaaaagactaaaaggggtaatttcaatgtcttttgattaagaaaaaaaagttataaaagaaaatttagtttcattcatccctctctcatccatttttggaactatatatttcaggctt

SEQ ID NO: 11713 - DNA, 4517 bp, Vitis vinifera
  Intron number 14 from transcript GSVIVT01019730001 (locus GSVIVG01019730001) derived from phytozome v7.0 (chr-ID chr 2; pos 2797599 to 2802115)
cagtatttccacaactggactggtaacaggttggcttataacccctaatctctctctatgtaatgaaactccctagttttcgaatgtttttaaaaccttttagtctcatccttttgcacttttaacatgaccaccacacttgtttgagattgaaactgtgaactggaacttgatgctgtctcttaatatggacttgctattcacttgtaatggtagttgacacgaaatatgggatgaaaaataataagttctctctctattagattgactatacacacggtttatataggagattacaagagaagaaataggacacaagagacataataggaaactaacttattcctaaactaacctatttctaaatcataaaactatctatttatagaaataggaaactaataaacctatctatttatagaaattaaaactaacataatagggaaaaaaaatttcctattctatttatagctcaacactccccctcaagccgaggaatagatgtcttccattcccagcttgaatacaagatcgtgaaacattgaactgttcagcccttctgttagaatatcagctaattgatgttctgatggaacataggacatacacactactccttcctccaattgttctttgatgaaatgtctatcaatctcaatatggtttgtcctatcgtgttgtatagggttatgagcaatattgatagccgacttgttgttacaataaagcttcataggaccatcccacttgattctcaaatcatctagaataatcttcagccaaagtagttcacacaacccttgagcaatgaccctaaactctgattctatagacgaccttgctaccatattctgctttttatttctccatgttactagattttctccaagaaaagtacaataccttgtaattgatcttcgatccactagggaacctgcatagtcaacatcggtgtatgcttctagagcaagagtattgttcttcttgaacaaaattcctttcccggggttgcctttcaagtaatgtagcaccctgtaagctgcttgaagatgaggttctcttggatcatgcatgaattgactaatcacgcttaccgattaggcgatgtctgcccaagtgtgagcaaggtatatgagtctaccaaccagcctctggtacattcttttatccaccattggttcctctttagcttctctcaacttgtggtttggatccattggggtagagactggtttacacccaatcttccctgtttctgccaataaatcagtcacatacttttgttgagatatgaagatcccttgtgtggaatatgctacctcaataccgaggaagtacttcagtttcccttgttcctttatctcaaactttgttgctaatctctacttcacttcatgcttttctctctcatcatttccagtcactatgatgttgtcaatatagactagaagagcaattactccccttgtagccaagtgcttgatgaagagagtgtggtcaccttggctttgtttgtacccaaactctttcatgacttttgcaaatctctcaaaccaagccttgggagattgttttagcccatacagggccttcttcagcttgcacaccttgttacctgtgttttcctcaaatcctggtgggatgttcatgtaaatctcttcatctaaatcaccatgaagaaatgcatttttaacatcatattgtaggagttgccaattgtagtgggcagccagtgacaacaggattcttacagtattcatttttgcaactcgagcaaaagtctcctgataatctaactccataagtttgagtgtaccctttaactaccaatcttgctttatgtctctctagagatccatcaaccttatatttcagtgtgaaaatccacttgcaatcaacaatgtttttccctttcggtcgttcaacaatctcccatgttttattctttgaaaatccacttgcaatcaacaatgtttttccttttcggccgttcaacaatctcccatgttttattcttttctaatgcactcatctcctctctcatagcatccttccattccctttttgttaatgcctcagaaacagtgttaggaatgattgtggtgtttagactcacaataaaattcttgtgggctggtgataggtgcttaagagacacataatgtgatagtggataaagtggtcgattagtgcattctctggtgtcttttctaatagtaatgggaaggtctaggtctaggtctaggttgtctgttgagtcagtggaagtttcaccgggttgtgtatgtaaaggtgggtctgatcttactgtgatttcattcccaaggtctgagttggattcttggacctacttttgttttggaatgaccttttcccttgaatacaccttaggaaactgtggaaaattgtgagtgacactggctggaacagaggatgacacaggttcttcatcaccatgggttgagacatgaggaagatcaagaggttgagtgacactggctggaacagaggatgacacaggttcttcatcaccatgagttgagacatgaggaagatcaagaggttcaaaggactcataaggactatcttccatcattgaaatctccccctgaagagaggacttgtggaaaaaaggtttattttttgtgaaggtgacatctgcagagatgtaaaattttctagctgagggattgtaacacttgtatcatttttgagaggatgagtaaccaaggaagacacattttatggctcgggggtctagcttgtctctatgttggctgtggacatgaacaaatgcagtgcacccaaataccctaggagtgagcccatttgaggttctgacgtgtggatagaaactcttaagtatctcgacggggcttttgttgtctaatactcgtgagggaattctatttatcatgtatgtggcagtaagaacagcttccccccaataggacttaggaacattcccttgaaagagtaaggctcgggttgtgttgagtaaatgcccatttttcctctcggttaccccattttgttggggtgtgttaacacatgatgagtcatggagaatgccctatgattgaaaatagggtgacaaaatctagttgaagtaatctctagcattgtctgtcctaaagctttttattttaaccccaaattggttttgaaccattgagtggaaattaggtataacaatgctaacatcagatttttgtttaagaagaaagatccatgtatcccgagtgcagtcatcaattaaggatacaaaccaacgagccccagaaacattaggtatagtcgagggaccccatatgtcactatgaatcaaatgaaaaggatgagaacttcttttattgctaataggaaaagatacatgagtatgttttgccaattcacaagtttcgcaatgaaactcagaaatatctaatccttggaacaaatgaggaaacatgacctttaaaaccctaaaagatggatgacctagatgtaggtgatacaaccaaatggtatctttatttgaggaactgagaagagataacgacaaattattactagttttatgagatgattcaaggtggtaaagaccgctcatttccttagcaagtccaatcctcctccccgagccttgttcttgaagaacacaataagaagggaaaaaaatagcataacatttaagatcatgggtaagcttttgaatggaaacaaggttggccgacaattttggtacatggaggacatttttaagaataagggtaggtgtgatgtatatgtcttcgaaacgtgcaacggtaactaaagagccattgaccactacaattttcttgttacttgggcttggggtataggtattgaaaagttgagatttggaggtcatatggtctgtggcaccggagtctattatccaagagtcatcataaattctgtgtgaggcatttatgcaaaaagagaatgaaggtgtacttgaattttccaacatcttccacgaaaaaacttgatctcttggaattaaggcagatcgcgaaacaaaaaaaaatcaacagcaatgaaggctggtaaaagaatacgtgaataaaaaaaaaatccagctgtgaaggccagaaaaatggcgatgaaggccagaatgatgcccaggtcttaaaaacctacagttctgatatcatgacacgaaatatgggatgaaaaataatttctctctctattagattgactatacacacggtttatataggagattacaagagaagaaataggaaacaagagagataatagaaaactagcttattcctaaactagcctatttctaaatcataaaactatttatttacaaaaataggaaactaatagacctatctatttagagaaataggaaactaacataataggaaaaaaaaatttcctattctatttatagctcaacagtagttacttttgtatttcttttttcatctagaatctgaagttttgggttgcattgcaacttgtgttgactatgtatctaaaaaccattgcagagtgac

SEQ ID NO: 11714 - DNA, 5105 bp, Vitis vinifera
  Intron number 1 from transcript GSVIVT01016074001 (locus G SVIVG01016074001) derived from phytozome v7.0 (chr-ID chr9 ; pos 18405214 to 18410318 reverse strand)
agatcctcgactttgagcgggacaattgcgatcttgtaatctctctgatttgtcccttttttttattgaatttttttgacgtgcgatttggttttgagcaagagcagtggtatcatggatccaaattgcttttctgaatagaattgtttctggagcattacaattctacaatgccacgactctgttagattgcatgttacgaattttttatttatttatttatttttatatcgttttgaggaatggtaattttgttttttcatttatctgattttttttggatccgtgttatttagttttgaacaagcctaatctatttcgaaggatgaatttgactgtcctcatagtcatgagcaatgattatctcgcggatgaggttgcatggtgtggttgtaggtatttcttaatttttttggtttctttgctgattatttttctctgtttattagattttttatttatttatcagattgcatgtcttatttgtaggttttatgttgattattttaaaaaaacttttattgtcttttggttgtggtgatgacattgttttgtttattggcatcagttcgtaggaccttttttttctgggatttttggaatgagatcctagttgatgaattgctcatgatattgcgacagttgcaatctcgtaatgactctgttctgtgttgctgtggttgccttttctgtttgatttgatttgatgttttgaattatatgaattggtttggatgtattatttctttggttttgtgtggttgtcatttggtttaatttatcttaattgctttgaatttattgtcgattttcagctatggttagtggcacgattttccttttcctgttttttgtttttttgtgagattttattttatttttattttatttctgatatactaatgctaaattactcaaaaagctcacataatttggtgctttaaattgacataagtaatatccacccctgatttttcaaaagacttatacttttgtcatcatgtctgtgtggagaatcaattttgagccaaacctttcttgttatttagtgttttctctaaagttcttggtctctttcctttctatttttgattgtttctttgtttcattgtcatagtgattcggtttctaatttgtttgaattcttttggatcttttatttggtttcaaacaagaatgtaattttattttttgttttaatttttttctctttggttttggagatgtatcaaaactttgttactccattatatagcaaataatttgaaaggtgaaaagcaaaaactctcatgtcatgaagaatttgctaattgcaaagtggtgatgtttcaatgcttttggttgtgtgatagtggcttttttttatactttatttgaattggatgaatatgttttttgacttttgaggaatgtttgaagaatggtgcttttttggccttttagtttttggtgatattctacatgatgtggtgaaggttttgaaagataaaaagcaaaaattatggggaaattcatgagaaatttctctaattagggagaggtgactcaagatctacaagggcttcatgatgttgaaagagatataatgttatttgtgatgttttcttttgttttgtttttgtttgcttttttcttggataattttcttggtttttttttggagaaggaaactccttgttttccccttccctttgggagatgtatgaaatctaagttgtgaatggaaatacaatatggtgaagaatttgaaagatgaaaataaaaaattgtgaggaattctaagttgatagcggttgcatgtcatatgtgcaattttatttttctttatttatttttaattttgtgtgatggtgattttgattatctgaatcaggatggtactctttgtttattgttactcttgttattaattttttggtgtggtagggagggtatgttttcatgacatatgatctttgttgaaaatttctgtatgataggaggcaattcaaacacttggtttattcttggtaaaaaaaaaaaaaaaggacaagggggttgctggttgtgtctatcagaggagctgtttgtatgaaatggcattgttcttcttcatccatagcaatatcaatagcaaagaatatgaaagttaaaatagaataaaatatgagcatcatgaaatattcgcctaacgttgaagtgggatagaatttacaagggctaagggttgggtgcatgctgaaacataggaccacagttctcagaggcttacaaccttgaggcttcaaggggagctgaaggagcattcaaccttgagacttaagtgaactaaaggttcccacttcaagctgtaggggcttacttctcacttcatcaaaggcaaaaatgcttcaactctccttcctctccttaaaattgtacccaggagggccagtacataaaaaaatacctgaatggacgagtcccaatttttcctttaaagtgaaattacagcagtgaaattatagctgtcctcgcttagagatatcaagagtgggtgagggggtggctttgagagagttgttaactgctatgccataattatcatataagttacaagaattaaagttatattctttgaaattcattgagggtcagacgaaaaagatttatagctcagcaaataatactgatatctgtgcaaaataacattcgtatcatgggtaattcatgaatttttaaataacatggaacaactcaggaaagcatcacaaggcacttctagtgaactaagaatcccttcaatttgttttagacttttactatgttgttttaatgtggtgatattctgaaacatgcatgtagaaaagtcagtttaagcaaaaccatgtcatgcagcctatatgtatttctgtattaaaagaagctatgagaagatgaggaggatgaagaggtttattattgttttacaagtgagaaacttccaaatgaaatgtttggaaggatagaagggattaagtggttggatgataggatattaactaacaagtaacaggaagtagattataaccctattaatagttaagtagccctttaatcaaacttgttaaaggctaaatgaagttggcatacattgttggcctgttatctaacaactttaagtcaattggtagcttatcatgatatcaaagccttgtttagcacgaggtcattagtttgaacctcactaaatgtttatttcccctaatttattgagtctaggtgcaagccctaagaaggtttcctgtagggtgggtgtttgggctaaagctcaaataagcttgatatattgttggcagtagcttatcaaaactaatctcaaccatgaatcaaaacataattagaagaaactaaaagtctaaacccttattgattcattgttacaaatttgtgaaatatattcgctagagtagtttactgtagcaacacaagcatctcccactacaatgaggatgcaataattttattttctcttgttttaaaatagaagttatggaaaactagaatgtatgaaatataaggtttaaaataaggcattgaaggacccaaattctatgaatttttttttttccaaagcccaaacttgcatttcttgattgccatggagctcacaagccttaaattggccttgtaaagtcttatcatatttgtttatctagttgatacctttacatcacttcagtacttttctcaacactgggaaagagcttgtccttgaattggtgccttggtttttggcctttgacctgctcaactcctctttgagttccttgagtgacatacattcactgtactcctttcttagttgaaaaagttccacaaacatgctgcttattgacatatttgaatgggtaaagttcccttgcttcctttatcttttgagggtggaattattcttttaaagaatataacaaaaatataataacaaaatttgatgcaggcatgcttggttcacaaacaatttcaaattccaaggctttttctaacttaactttagtttgatcttctgttgattccacattctttaaacctgaggttcccaccttaatgacctagtcaattgaattattcttcaattttctgataggaatcaagaataaaaaatccatcttgagagcattctttatatgtttttatatgttgctggtgactcctaatctgtattctttctccaaataaagataaatctacttcaagttcagtgtgatgtcccacttatagaagtctatgatcccatcattcaaggtattggatagctatttattaatttatcagttcccattatgaccttgatctcctgctcaaggaaagaactagctgtaaatatcaatgtgatacagaaaaagaatcatatcttgttttttgttggctacaatggttgccaacctgcattttgatggatttcctgtaattaatggaaaaaaaggaaaaattttgccacaatatgatttttgtaattagatgggaaaaccaatatgtatcatcctgggtctataacaacctgaccttctgaaccttgattattctgaaaaccatataatctaagcccttcagcctacttaaaacgtcacatgccatatagaccatataacaggctataaaactagaataaaataaatcatgggtagttcatatggtcttttgcaagcctctttgagcatgatcttgtttggcctttgcaagcctctttcatgctttgctgtacattgtttatccagtcactaagtgatgagttttaagtagatttagttgtttctactagcttgagtcataccactaaattgtccatgatttcatttgcagttctgtaggatagttagggtgatttcaatgagtagacttgacttattgctttttctgggaatagttattctggatctgggtgatatataaataaactaaattatgtgtttgaacttgggcattccattcaaaaagttttaataaaattttaggtttgggactctgattttacaatgaaactgattgttttcaaatttgtacatttggttaaacctattttttatcttgttgataacatcgattagctgttctgacacatttttattcactttactcagaataatatttctcgtgaagcgcaaaca

SEQ ID NO: 11715 - DNA, 10458 bp, Vitis vinifera
  Intron number 6 from transcript GSVIVT01036069001 (locus G SVIVG01036069001) derived from phytozome v7.0 (chr-ID chr6 ; pos 21097573 to 21108030)
gataaaattggtcatggacccgagcagttgatgtctcattgtatatatatatatatatatatatatatatatatatatatatatatatatatatatatatatatatatatatatataatgtattagagtgcagttaactctttatagatgggtattgagtcaacttcaaaattgaattatcaaggagtcagtaatgtcctatgggtcctaatggtcccatcttaagctcatattccttgatgacttggtatttaattcacttgtgtgagtaagggtgttttgataactatgcaaggttgcacaaggctaagtgagtggtatttttagactaagctaattgaataattggagttttgtttggttaattaatcgattaacaacctttttgggttaagcccatggtaagctcaagtcacttaagcccaataggaagtctataaatacctttcttagggattaggacttcaaccttgttattctttccttgtagcccaaagagacaaccctaacctccaaccctaagatctccaccatctcggtgcctaaactcaaggaggagtcattgaatgaaacaattgagcttataagatcttctatgcctatgcggctttctatactgataggtgttgggattaaaccctagaaatcatgacatgatgtatcaaatagagattcatttataaatttatttatttatgtttcttggttttccatttattatcttttttgcattaattggttatgtgagcatacaagtcctaagttccttgcaaagtgatgagtagtccacatttggttcatggatttgggcaattcatatgagattgtagcgcgctacctcctaattgaaagaatgacttgtcttagtagttaggatagtttgcccatggtgagtgcactagtgtatgtgatgtacattggacaggacctatggtgaaacatagtgtaagacaatcaattgtcataattcaccaagatactatactacatgaactctcaaccttgagaggatattgagtttatgccaaagttaataggaggttgtgacttaatagtgagatcctaaggtggtcatatatccttatggattgggtcactgttgatagagcctagtggcaacaaacattctcgataaggacaccataatatatcatgaaatgggacaatgtatccctttaggtgatctaaaggatatgtgatcttgaagactatggccataacattttctttagtggaaatttgacatatgcaccttggagctagattatgttgttgataaatttcaataccacgactttcccatatgaaaatggtatctagataaaaccatactaggtatagaggcttcaattacatagtctttttattgaaatttgagataaaggattctacaatcttgatttggaatcaatactgagtgtcaaccttcacttcgttactattcacaagctttatcaattttttttttatatgcaaaattgatactaggcctttttgtttaatttgacttgaacatctccatcaccaattctaaattttaatatgtgctttgtatatgatttgaatttcttagtatcaaaatgacttctatgcatcaagatttatatttttcctaaattttttcatattttcttgtgcatttaagcttcctcgccttgcttcccatatccataagactaattctctttgatatctctataaattgcatattttatctttttttatgcattctttattaaataaattcatcaatacttaaatttagggcttagaaaatatttaagttcaaagacctacaactatcactcaagttgtatcaaaatctctatttttagcatttataaattggtgatttgagagctaatcatatccctcaacccatagattgctaatccttatcagtaataagagataaacaagctcataattgatatttctttgcacctgagcatcattttaaaatcattcattcccaaaccaaaatgaattttaaaagttaggtatactatgagtttaagataaccacgttttatatgcaacaatttaccaaattataaaaaacatggataaattgtttaatgtacccataatattcctaaggatcctactattcattccacactagatctagctagtgtggatattttcatcccttggttgtgactttaggaggctaactcctctcaaccaaggtaaggcgagataaaatccttcccaaattggtttgtatgaaacatttattctcctttttagctcttatatatatatatatatatatagaaatcttttcttacttcattttttatctaagaacatcagcatgcatgcttaattatctttcatagttaggaaattacttctatgtggataattaggattcaccaatagctcccaagtatgcccctaagtatagtaaaacccctatatataaaataatacttttggaaccaagagaaattattattttagtggggttattaattcatggataaataaatgatttattaactcattgataaataaatatatattaatttataaagagtattatgtttctactatttagtacttctacatgtataacttataaataaaaaaataatagatgtggtataaaattaatacattaaagccaaaaagactcaaaataaaagattattattaattgtaaaaggtagaaagacttctaaaaagaatatatgcgatgtcaaaacttaatgccctaaaagataaagaaaagtttcgtaaaagataaaaaggtttcaagtatgagataattctaagaagagttgacttaaaaaaatagaagttataaaaagttactcaatactacattatgaaattctatttgctatattatgaatttttgtttgctatatatatataccctaaggatttctaaaaatattattatcttatgtgtttagtgaggttattaatttagtacactagcccgagttgggaccagaaggttttataatttaagcgaggttattaatttatcgagcattcatttatcaaagttttactatacttgtttttcaataaaccagaataattatcttttactcaagagtgtttatacttttttgattcataaaaatatacattagatatttttaaaaattaagaaacttaaggtttttgtcaattacagtttatgttataattaatttgttcttattaattatctattatgcgttatcattttgtgtttaatgtgtctttttgtcaattgtatttaattgttgttacatttaattcattcttattgattatctaaaaatatataatttgttcttattatatatatattcttattttttgtttaatatattaaaaatgatttaaactaataaatatgaaaagataaagaaatcgaaaaattttgaaatcaaagaagttttagaagagaactatagtcgcttcaatatattaaaaaaaatagcaatacatgatgtggaagaaaaacaaaaacggatggtaaaggataaaaatgaaaagaatgacaaaagagaaaatgagtactcatttctttaaaaataatttattaaaaagaggcttagtttcatagtgatgtatcatatcaaaattttaaaacattaaaaaaaaaattaaatgacaatcatgagattcttatttaattactattcaaatgaatatttggaggataattttatgtgaggatagaaaccttaaaagcatgatatgaagtaatagatttggaattcataattcatttaatgatattctagtttaacttttattctttatgagcacttttccctaccatcaattgaggatatgagaatcaaatattccaaagactgcatttcatacaaggtatggacattatgagtttgttgccatgccatttggattagctaatactccaactgcattcttggatacgatgaatcatatttattgaccttacttggatcgttttgtggtagtgtttatggatgatattttgatatattctaagagtcaagaagagcatggacatcatgcatttgtcacttcaatcacttagagaagttcttaagctttcttggttttcttgattatggatatttgatctctttctttttcatgattcaatatgaaattttgatacgttttaatatttttgatgaataaaggatttttgggttggttcttgaagggtttgaaaattgcatatctttaaccatttgggttttgctgaatattgcgattagtttttattcatggagttggtgaatcaaagattgttgtcactttgttcggcttactatgcctttgtaataaaattttgatttgagttatttaaaatgtttctaaaatctttcttgtaattgtatggcattgtagactccttgaatatatttttagaattttattgaagtttaaaatcaattttcaaataggagatatgaattaaacttttagtaggttcagttttcgttcaattttggacatctgaactattgttgtaaatttaatttatttggtgaacttattaaattattttgatatttttttctttgttctaggctccttgaagttaattttagtttcttgtttcattaaaaacaagctccctaaataaaagaaatatttttcccttcctacacccattgcactaatctaattttgaacaaatgggtggtttggttaaatttaaaaataatctacttgtacacttacctttctatttttttttatataaattaacattttgaacacgtttcaggatttttggtaggattttatcacaccgctagataggttaattaatttagtttgtgcatgccttagaattttgtctcgctttggaccatttgaacatttttgaaaaatgggattaattggggccttaataaattatttagccacttaggagataatctagacacataggatagtctctccatttttttttataataaattacctttctagatattttttttaggatttgatttataaggccttatgttctgactacgtgtcggtaatcctgtgtagtgtttaatttgatgttaattcgcatctcatcacatgattttggcttctatattgtaatatagacataatgaggatgttacataatttttatcataatgaaataatgctcttagatatttatttaggattttttgaatgcatctaactgttataatcatttgttgaatactttgaccaagtcactaattttggcatctctagttcccttgtaaattaatttaaccttaataatgagttttagatgtgtcatatatgagagtaagtgcttcttcataccccaaactatttttattttatttttttaatttatgaggacttgcattgtgatttcatgcatgctagaaatttacatctttgagtttagatattttgtgtcactcaaacttgttgagttcgtatcacttcatttaagtcatatacatgccatgtatatataagattagctatgacagttatttgttatcataattattttgttcattatcactagtgatgagctaaccctttcaattcttatgcaagtgcattgtaagctatgtaagctatcaaggtatgttccttgcaccttttaatctctttaactttgtaaatatacatactatgtgtgtgaacattctcatggctgatcatgtgtagccatgccttcatcattgtttgatttcttgaataaaatgaaatgcatgttatatgtcatattatctaaacaaaccttaacacctttatgaaagcactttgtgttgtagcttaggtacacttgtcttttcttcctatgtgtatcctttgatttttttttttttttttttttgtgaataagatctcactaggctttagatatcaatactcgtgttattatgtggtatccttgttttatcaattaattattatagttgcctcaacctagttagtagatacctattttagggcttaaaggggtattatcttatgatacctttccaataggtaacctgaccctagacgtaaactagggttttcaaaaatgtgattttccaaatcagaagtcatctttttagggttttatttttttcttttaaaaataaataaaataagtggcgactccaattttttttaaaaaaatcaaattttccctaagaaaacaagtctcgccattgaatcgggacatatgtgggaaatgcaggtccacaccaatactcctatggatcttagtggtcctcactttgaacttatataccttgttagcatgggttataagtcaaattggctttaggtttattttgtgcataagggtgttttggtaattatgcaaggttgcataagagtaagtgattaatgtttctagattaggctaattgattaattacttggctatgttagattaattaatctattaagacccattttaggttagattaagtgacccacgcccatgtgaactcaagtcacttaagcctagttaggaaacctataaataccccctaggggttaaggttttcatcaccttttgtcttccaccatccaaaaaaaagagaaaatcctaggctccaccctcataaaccccctatcgtttgtgtgctaaggaaagaggttgagtcatcaagcggaatatcatatgtttactagactttcgatgacatcgatttggttctttaacacttggatttaaggtttgggaacatccaaaccataaggttagtactttaaccctaactatcaatttttgtaaaaattggtattatttttgttacttagacctaagatgccaataggtcctgtccctgagttttagtccttaaagacatgaggttagtcttgtccttgggttgtagtcccaaaagacacaagtttagtcttgtccttgggtatgagtcccaaaagacatgggatatgaaatgtccttacgtgatagtcctaaaatagtcattatttatggtcaaacatcttttagagtattgatggttgatatgtacattgatgaggataagcagtttatcacgtgtgaaagaatggatgaggcaaagtagagatgaaaccatcaacaacatgcatgcatatttgacattattgtatatttgttaatagttataaaatatttatcatgcatgctactacgtgtttaattcaaggtttttaaggatatgcataggataattataaactttcgtactaagttgtgaagtcactctatccctttcatttctagatacaagtcagaagacaattactagggttaatgcttgagttttgcatgtgctattgattggattttttttttttttttttttttttttgttgcttatttgagagtgttttaaggctcttacctttgtattatagaaagacgaaatcattttaaagaaatgatataatttatgtttgtttttatacacttatagtatgggctacccttagtgaaccatgaggttttagtgtgtacaaagtaatattgtacgggttttcttgacataaaatgaattatattttgttaattaatggttccaaaggtttatcacatgatacatatttttttatcataacaggtttccacatcctcattttggacaaaaatcaaacttatcattatttatttatttatttatttattgtctcctaggttttgggagcactaattttgtatttgattaataataagtctaaaatccaaggtgtaacaactggtgttgtatttttatgtttatttttaaataatctattttaaaacatttttttaagaacaaaattctacccctttaagccaatgaaaaagaaaaaaaaaattaaatgatggctcaaaaaccctaaagataatgttgccacatccttttcctcaacaattcacttggctttaagggaccaattttggcattgactcacatatattagtcattttggatagtagctcttctcattttggttatttcttaggttaatgatagtaaatgcctaaagctctatttaaaaaatatttctgaaaattgttttatagcatttgtaaagtaaatatctttctgacaacccaaaatatttttaacctatttttcttataatttctaaaaacatgttttaaaaaggacttttaaaatgtagcactttatttataatcattgtccatttcatatttttggttaacaaattaaatcatggtaaatggagtaaatatgttaaaataccaatatttttaattttattaattaaatgttattagcataatatttaaatattgttgatacaatcaaaaaatatgaagtaaatttttttatttaagtttatccatagaataaactcattttcaagatgttaatttgaacaatttatttatattatgatttaaaacaagtaaatttgacgtcattattatagtaggcaaatttataatttttttatttagaaattttatccacctataatgatttttagaactttatctccattatattgtgtatttattatgataatcacacgagtgaaagaataatgattcctttgaaatgagtttgtaatattgaaaaagggatttgaatctatcctctaacgtaattgtccctagtttacaatcttgtccccaaattgatttttttacttgacaacatagggagggtttttctttaggaaagaaagaacattgagggggtgtttggtacgtcggaatagggaatgaaaataatattttgtttcctttcctatttcttagtggaatggaatgaatttgatgattccatttctagcatttggatgaatttaggaatgcaaaattggaatgattatttgtttccattccaatgtttgataataataagaatggaaatgaaaaagaaataaatttataataatatccttacatataattaaaaatatttttttatttttacttttattttaaaaaaataaaatttgagaggttttttgttattaaataataagactaaaaaaaatatatatatatactcaataaataaaaaaattaaccataaaaaatcgtataaccctaatgcacaaatattcaattattatttttattaaaaatttgaataatttgtcatgcttaagtagttataaaattatatttttcaaaaaataattatttattataatatttaaattctcaaagctagcaaatgtttttcctattttcaaaagaggaaataaaagaattcaaatttattctaattttcaacaagtatcatatccgataaaatccataaccttaaaaaaattttgtttttatttgtttttttctttttatttttttcctaaccattaaaaattttcaatattgtaaacgcatgaaatccatttcaatttttctctccaatttccattgatacaagctaaagaaacatcaaagattccaaacataaattaataaaaaaaaattaatcgatttatagagaagaagaaacacatataaagaagtagaagaagaaagagaaaataaggtaaacctgatcgaagatgtagaagggagttttcagaacctagttgcagcaaacaatgatgaatcctagatccaacaatcaaaatgaacatccaaaaccctataaattagaaattgatttttttttttttaaatatcgtggaaggtttaattgattcaatttggaagaatcacttgttgtagagaattggatgatgagtgggtctctaactttgcaaagaagataagaattggatgatgagtgggtctttaactttgcaaagaagataagaagtgaatgatgaatggatctctacctttgcaaagaagataaacatcgggtttgaagaacaagataagagggtaaaatagtaatttaggttattttatattatcaaataggtttaatgaatcagaataccacctatttttaatgaatgcaaatccgattcataagctggatttgatttctgccggaataattttttatttcatttcgaccttcttaacatttatccaaacataggaataaaggagaaacggaatgagatgtctattcccactccctattcccgtgtaccaaacaccccctgaatctattcatactcattttcttaagttaaacgaagttcatgattcttatcgggttagagtcttatcccctgaattggattccacgtggaactctttttttcttttttttttggtttttgaaaagatggatataatataaaaagtgagtgagtttttttttttaaattatcccctgattccacgaactcatttttttttttgtttttgaaaagatggatataatataaaaagtgagtgatttttttttttaaaaaaataaatttaatattaaaaaagtggacatgataaaaaataaaataaaaatagaaaaacaaacaaacacgcctctttccgaagaggaccctcaaattgcctgaagacacagaaaatttcacacgataatgcaaaagactgaaaaacatgtcccacgttttcgtcggtgatgagtccttttctaaggtgtgcatttcatatcaggacac

SEQ ID NO: 11716 - DNA, 12459 bp, Vitis vinifera
  Intron number 5 from transcript GSVIVT01024270001 (locus G SVIVG01024270001) derived from phytozome v7.0 (chr-ID chr1 6; pos 441001 to 453459)
ctgcatttggagtattttgtggcgaatttggtgtggaaatttgaatggaaggctgtgggtgaagacggagttgatctttcagaaaggcctcttgtgtctctgctaccaaccaccatgaagaacccgttgcaagctcgcatttctccaaggttatcagccaggactgcaatggagtaattgcacacctgtccaccatattttgatggtgtactactactaataataatttaataattacaatgatgatgataattcatgggaggtgctttccatgagtggggatatgagctttttatctataagatcatagattcataatgatgaaataaattagtaaagatgagatctttgcttagacggggcaaaattgaaaaatattatgaattggaaattatcaagaaaataaaaatacctcttttagccatgtttgattactagaaaaaattattggaagaaaaaagttgttaaagtaaaatgattttctcatgctcaaatataatatatatatatatatatatatatatatatatatatataaagtctaatataattaaaattaataaataataatatatttttaaattatttaatttttacatttaaagagttaaataggtaaaatgaatttggagtaatatataaaaataaatttttgactttaaaactattttttttttctctttactttttttcccacacatttttttttttaactttctagaaccaaacatagtcttaatgatcgatacctatttggatacattttatatagaaatattttatcatatataactaaataaaaactgaaaatatattaaatgcatcaaatgcatctattttttctctttatttctttatcatttttccttatatttcatctagaactaaacatagcataagttaatttttggctgtaaaaactgagggaagtaaaatatgaaggagaaagaggaaaagaaaaaggaaagaaaaaaattatagaatttttatcttatatttaaaatttttgagggaataaataaataaatatagaaaaaaaatgcatggagccatgagtggatatggatgaagtaatggggtaagaagactaggattgcagtgatgaatggagaggtggggttgagtaggtgatcatgtgagggaatggatggcaagagtatggagaggcgcaggctgattggtgggataaacgaggccggccaaatatggagtggagagaaagagatagagagcaaaataggaagtaaggaatgagagatgggtagtgttggtgttatgaatatggggcagtgaaaagcaagggaagttgttgaggtcgtagggaagtaaccaaagtgggaatgtgtgagtgggggatgaggaggcttccatagttggctcaaagagacaatcaaacgacgatttattgtcaataatgtgtgaaaagtctatctatgagataaacgacaattttaaacgtgaagtatcaaaagtggtgaaggtaaggatgaccaattaatgtagtgtgagttctgtttttgttgaaggttgacgttaccaggaccactccagtttcctgatttacttgcctcctcaactgaagaagatgcttcattccttttacctgcaaaagatgtctggacagagggttcagacacaccctctgatgcctttgttagttttgctttctagcatactgatatttttatggggcccttctccttagagaatccttaccttcattgactgtgtgggggccttttatagtgtcaggagcttcgtccctttgaatagtgggaagactttttggctctcatgatggtgcttagagggtggcagagccatcattatcctgcaggcggttgttagagattgctggagggatggtttgtcgtcatccttgttttttcactctgcaggcggctcagggcaggttgtggcaggtcgcttgaagtgactcaggaaggtcctgtcgagcatgcttttggtaaaatgagtaatgattgcctacgaaacgcggtcaagaatcttgtttgagacgttagccactaggtccggactggacatccgaacaggggggtatgtactgcttgttagtccatgtgctcgttcggacagagagttggacatgccacgtgtcagtccatgtgaacatctggacagaggattggacgtgccacgtgtccaatggaggagtgccttgtgaggctgtcacgtgtacgcttaagggtggtccctacagttttgacaatgtatgtcgattgtgatatcggccaaggcaatgtgttaggtgtatatggaggtgagaggagatgttggatcttcagtaaatattatcagtagaagatttagaaaaaattcaacaattttcttaaactttggaaagaatgtgaaaacttaaaatttatacaataaagggaacaatcatgaatatttgatgaaatgatcatcaaatgatcaagtgactatgaagactattttgagagacaatccaaattcttgaatgacaagtgactaagtctcatgccatttgtaaaaaaaggcttcaacatttaagcaagttctttttatccaagtagtagaagtgtaacggtccacatcagagttggagattgacttataatggtctactcgtgtccttatagctttaaaaaacatttacaaaattaagaggagtctatacttatataatgttacgaattttctctcatatccaatgtggaatatcacaaaaagatgattaactatatttttggtaacgagatagttatgattcaatgtgtataattggttggatttgactttgaaaccataaagaggtaaagaagttgaatgacaaaaagtatgtgtaattccaatatactcaagtcttttaaatatatatataaacatgactatacaagatatacatagattatacaaagaatacatatattgttcctaaaatacatttttttaaaaccttcatatttttaacattctctctctcttttaatatgataattatttttttaatattttttttcttgtttagtgctttttaattaaaaatcaaatatagcctaaacaatttaaaaatattcatatttttgtttagatagatcatatttaagatttttcaaaaataagaattattgtttttcaaatttgacggttattttatttttttaatcaaatatcgctaatgaaactagggttgttttttgaagttacctctccaagttcatttttcaaactaacattttgccaatctcatcaccacatacatgaatcaatcactctagcacttcaataaccaaatcaaaggttcaatctattgctaaagtaagcagtagtataaaaaaatcacacttttccctaatatatcttttgattccttcaaaaataattgatatttatttctcttatgctaaaatcaattgctttagccctttagtaaaattagtatgggtaattatcatgaacaagaaaaagaggattcaaatggtgcacaaatctactaaagtgagtcttcttcccatctcaatagaaccaatcctccaccaaccttcccattacctcataaccaaatcgaaggctctattcctaaagcaagtaacaatatagaaaaaatttcacttttctttactattgtttttccctcaaaagtagagtaaaaacaaagaaacttacctttgttgccactatgctatttctataaaaaaaattaagttaaatgatttcagaaatggtaaaagcaatcgccctaacatttcagtacaattcatatgatgaataaaaagaaagaggattacgatggaccactaatttactaaaaagaaaaagataatttacattaaatgatcttataaaattaaataaataattgaaatgttgaggacgaatttaatgtgtaaatgccggggaattttcttttaaatgttatttaaacaaaattattacaatatagttatttaaaagatgaagacaaaaatatgatatttttactattttttttctatttttatactaaattcgtcttttcaaaagacgagtttattttttatcttaaaacttttttatgttgaactcaatatttaaaatacgaattcactttttattttattttatttaacatggcttttgaaattgaaaaattatgtcccttgaaaagacgagttatatttgaaattaaaaattaaaaattacaagagttttaaaattatttttgacggcacgaaagccactcatgatgaaaaccctctttaaggggatggggtcctcaaaacttactgaagttgcactatatttttccccatttgatcagagcataggcttccaccaccagcttggtagagggacgtctcattcacacgccccatcatctcattataatttataaccaaattaaatgttctgcagtctgtagctaaaataagcaatggaagactggaaacagacacccaaagtctagaagatgatgatgataagatttttaattcatctctctctctctctatctaatgagactaaactcaagagagaggtcaatctaattgtatgaaatttagaactcgaaattaaatatgatcagtcataagctctaagcgcaataaatattgttaattagttttaaataaattgttagtcacgactacttgatcaccatgctcgactgatcacttaaaagtggaaaataaattaatcataataatttgagcataaatgacaataattaacaaaatcattcaaggttttaaaggtgttaaagagtcggtaatgccctaattaaatgatcacttgttaggattaagaatgaacaagaaatgagatttaacaatattttgtgagtgattcaaatctttagtttttctcgttaaaaataatcttaggtttttcttgccagttatgtttgatttatgaaaaatagtgagagaatgaaaaaaagaatatgtttttatgattgaatttcatcgaaaaataaaaaaaatatattataaaagaaaggataaaaatgttaaaagagtctttttttttttttacttttttatcgattaaccaaacatcatataaagttttattaaattttcatactttttactttttttttttaatttatctttatttttttctttcaaattttatgtggcctaacctaacctaacctaacctaacctaaattttctatgagctagtttaaatctattattagatatcaatgttagctgattaaatatttagctgaggtaacgatgatataattaattgaagtattagtaacaaattaaagcattaattgaagttcaaattatgaggaaagtaatgaattcgcataaaattaaatgagaacatgggaagagaaattgacgtgctacacttagagaactcaatcaaacatggcagcaaataatggctttactggaataggttagatgaaaaatgagatgcaaatgtatatatcataacaaacatcatatagaaacttgaaaaaatcacgtggggatcttagttagaatcgaacttgggctagaattgaagtaggaaccaaattccatttaaaagaaattgaagttacattatgaaaaagtaagatgattaataataaaataatattggattgtgaagtttgaatcagttttgttgcgttttgtttaggatgttggtggttgagctccttgttgagctcatggggatcgaactgattggtcaattgaagaggcaacacattctaatttttttttatttgatgaatgacaagtttgctcttattatatatttaatattattatttttttttttaaggtttgttttagatggcacaaccacaattgagaagttttttggagatcttcatcattgtaatatttttttttcttctgattagtgaattattgagtgttagtactttatgtggatatagagatcatattgattttctaatcaccttcaaaatctatttttttttaattttgtttttattttcttcttgtatatatacatagttttggttaacaaataaagagtagtggtctacaaatagagttagtttttttgaagttcttgaattcaagggaggaaacttactaggttaaaggatttatttagtgatcaaaatgtaatatttagtcatcaagatgtaagtcaagtgggaaaaccataagtaaagacatggtaaatttatccaagggtcagaggaatattttaaagaattgatgtaaaaaaaacaaaaaaaaacagaagacttaatcttatggatcaaattaaccatgaataaaaggtactttgtacctttttgaaaaaaattatatgtgaaatcacaattgaaaaactcccttaaaaggagttaagatggtaaaaagaactaaaaggtaaagagagaaaaagggatataattttagaggtagcaaatatgtattttttgtgtatgaatatttagcaaatttgtattttttacatatgaatattttatttaaaatcatggtatttttcaggtttttgatagtgcttattaagacatatcaagtatttcattgggaagtattcaaaatctattttcattttctaaaaatattttttaagaaatgcttaattactttatattagtgaaaaaaaagcttcatctagaaggtttagtgtaaattagtttgaacaaaaatgtcattcattatggtcatggttgactttaaagttagttaaagaaaaaaataaaattataccttcctaactttttctttcacaataaaaatgataatttaaatattttaatcaaagaaagagattatcatttttgttagagaagacttttgtgccaaaatagagaggtttcttaaataatctactctctctctctctctctctctctcttttatatataaaacctttttaaaacttacttgcgagttgaataacttgataaaaattaagactattaggcatatttagttagggatgacaaagtttgatatgattcaccaatacgacatgaatctaacattttttttcgttggtttggattgaatataaatgagcttgaatcaaattcgtgtcgacctgcataatctgtttaataataggtcattttttagtaaacttacataatataaatttgatttgagtggagccattcaataatcttactgttaacctaataatatttttaaaccatttaaccacatttgactcattttaaatttgtttttaaataaataggtcaattgagtcataaatatgcttggttgagatattaattatataaatatataagagaacctgattaataaatgggttacacgacgtattatctatttaacaattagataacatttgagtttatatttttgacatgattattattcatatcgggtttaggttatgtaatagaatatctaatctttttaacacgagacaaacataacccactagtacaaattacaaccctatgtttaaccctattaatcaaacaaattgatgcaagttgcatgtaattttcaaaatattcacaccatgctttgaaattagtttatgtggcacaaaaaaaaaaaaaagggtcatgaatcacttcatgtgcctgtacgactaactttgttttaatgctcatcttccctgctcgtttctttatattatacgtcattcaacacataataaatacagtcaattaatgcttccagatgatgttacctccctaaaatattaacctaatttcccaagatgtcaccttctcagtcaatattttccttctaagtgatgcctgtttcaacaaggatatacgacttggactggacatcatatctagctagtagacaaaacaatccgatcagcccattaatttaaattttccttgcttgaattgttggttttctcgccattgaaaagcatgaatctttgattcttttagtccatcaacttacatcaacaaaagaaacagacatgcatataaatctattctgattcttacttgtctcccctctagaaattaatataaataatattagttttttagaaagtctctgggaccttggatataatttaataatttaatgccggcttggatatatataattttttattttttatttttaaagtaaaaaactttcatgtaaaagtaaaatatatgatgtcaaaaaatataaatttagctcaagtctttataaattactttaaaattttttagaatttgagacaatttttcaaaactattattattttttaatgtaaatctttaagaatttttatattttatataaaaaatattattattttctaatttaaaaataaaaaacacgacatgtattcaatcaaagactcatagtttcgatgttttatcattaataatagaagaaaattcatatctactactaatccctccaaaataatgatgatatcttcattgtaaattatttaatgtcaccaacttcattcacatttcaataccgaaataattatagtttttgttaaggtactaattaacttaaaaatttaaattactagataacggaagaccaacgacatcctaaatttatttgaattataaatttaatgctctatgtcatggacaaccctttttatgcttgcacatgaatatatgatgaagtttgaaaatgtgaaaaagaaaatcttttctaatttgaatgaggagattcaaaccctagaccaagaatgtcccttgtaagccatgtgaaagtttgatcacagagttaaaactcaatgttaatctaatttaagaaaaaatgtataagtactaaatgtatctaagtttcattacaacccattccatcttgttgagaaatctatttggcacaagacatgccttgtatccttgtattgaactatgagagcaacatttatacgaaaattccagttattgttgggaagactatgcagacaaggtgtaatggaaaactgtacgtgggcattgaactcgtgacaccatagcaagccttctttctctatgcttcattgctcgaatcaaagatgcagcgtcacatttggctgcggtcaaagacacagtttaaatcgttgaataatgtttagtgaaaaatatatattaagtttatatgaatttcaacccttagaaaagcatggtgatgacttcattgtgccatgactaacataaagtgggggaaaagaaagccaagatatttaaaacaaaaaggacaaatatatttacctatatagagaatgattaaaataaaacatcataaataaaagttatttttaaaatttatttaaaacataaaatattataaattaataacatttcaaatttctaatagacttttattacacaaaacatcagcaaaccattttagaaaactggtataaaaaattgtttttaaacatattttcaaaatagagacttaacctttgtttgagaagtattttggaaaacgactttaaaaaatagtttttgaaaactattttttaatgtttggtacattgagaacccattttccatgttttaaatattttaaaaaataatttttatatgtggttttttcattttcaaccattcttttatatttgtataattaaaatttttttttcaaacatgcataaaaaaagaaaagaaaataactaaaatatatcatcaaaatttatttaatatttttaagaaaaaaaaccattttatattttctgattatcaaacatgtttttttttaggaaatatttttgaaaacaattttaaaagaaatacttgataaacgttttttaaaaaccgttttataatattttatagaacaaaagatttttagttattaacctgttttttatattattaaatatatattatttatttttatctgtggtgctttattttcaataattctctatatttatataattattttttaaactaaacctcaataaacaagtgaaaataattcatatatattcttataaaactatgtttttgaaaacaaatttaaaagttctgttttttatttttagttgtgacacacgtttttctattttttcttatttttaaaaacaaaaaattgtttttttacaacgtacccttacatttccttgtctttttgtttactcttatattcaacatatgataacaatcgaaaaacaggaacattagtcaaatgaatggctaactcaagaagaagaggccacctttagaatatttagtgcccatttctggaagatattaccttcctaaattaatgcatgataacttggacagggcgtcgtgatatataataataataataataataataataataataacaatatataatataatgattttacaaattattgtttgattcttatagttaaaaatataaagttattatattttttattacatagatttcataaatcttaaaatgcttaattgtagaatgtaacggctaaaaaaaatattaagataaaaatatttgtttttatattttttactacatagatttcacaaaattttctattcattttacaatataaccgttaagaaaattttataattaaaaataatttagaaattttgaattgtttaattttaaggagtatagggaagttattgacaagtgtttgtttaaaaaaaaattaaaaattaaattaagttatgccttaatgtattatatacttgaaatattaatgttgtaaaatcaatatatttgtcatatttataatttggatataatattagttctattaataatataaactaatatcataaataatagtattaatgaggtattaataataatagcaataataatttaaccagtcttattgtagtatataaagcataaaaaacaaaaaaaagaaaaagaaagaaagaacaattttttaataaagcttacaagcctaagaattaagaaactagaaattatcttttaggggttttgttttttagtagtaataataaaaatataataatattattttaatataatattaaaaatatgaataatcataaaaataatagataatattaataagattcatattgataataatatgaataatgcaaaatcctagtatcataaataatattaatagttaataataataatgtgtaaaaaattacaaaagaaaagcaataaaaatataaagttagataagtataaaaggaaataacaaaaaagaaaagtataattagaattttgaaatggttaacttttcaaattatgacccgagtacttggctaagaatttataaacagggtgattcttttgggtcattatcactcttagctcatcgtatacaatgattctctcaaaatttattggagaggagatggaaacttgaataagactaattcaatgttagcgcaataagtcatttcatcgattaattttttaagaacttaataatgacctttcaattaattatgatgcatgcatttactaatatggattcatattcatatttactaataagtagctttcctcactacctttgaaattttattaaactatatatattttttggattgatatggatcatgaatggtttaaaatcttgaaaggttaaacatgctttgataatctgagtataaaaaaggcataatttattgttgtaaactgtctcaaatattaatttttcttgagtcaacttattggtttataagaagatttccactggttgaacagaatgcttgtttttgaatgtgttgtcatgaacgacaatttggagtagtggttgcttggtgtagggcctgtcaatcctccaacatgggattattgattagttattttcaggaagttaattagttatttctaagattagcaatattaggtgatgggttattggatcctaggatttttacatctcaaaaagacagtagagattaagagcaagagctattgttggactgtggcatcatagtgttgtgatgggttaaactatcttccattgtttggcaaccaagaaaagagagacctaggaagtaattgggttagtttgggctccacaatgatgtgtgatcaccaagtgaacacttaattaagtgcactgtaaaccatatactagagcaagataaatattagcaggtgaaagatagcttagttccttttccaaccaggcctcctagttcatctgcagatcaagatagcttgattagtcgtaggatcaagaactgtgttagcaagtgaaactatggatatgattggttagtaaaccaacaaaggaaaggattataacccactctgcaactcatctttgttattgacctcttgaatccagaaggacaaaatctgataattagagaggacctttacatacttttcctaccactcatgatcttcagtttagatgtttatttttgtagaatgcttactccgatatgattagtagttttattttctatataacttatattataggtggatctgtatgaatattgttgtggttactggaaagcttcttatgggtgtttaaatgatgtgggtgccttgattaggtctagaactaaatgtgaataggaaattgccgcgtaaagccaactgttgagttaaataatcactcccaatttgttccggagttgct

SEQ ID NO: 11717 - DNA, 1150 bp, Vitis vinifera
  Intron number 1 from transcript GSVIVT01012275001 (locus G SVIVG01012275001) derived from phytozome v7.0 (chr-ID chr3 ; pos 12926912 to 12928061 reverse strand)
ttaaatatttaaatcaattctataattgttataaatatttaaataaaaaaacataaataaattatatgatttaacattttttttcaatcaaactgactataataaataaggttgataatccactccatccacaaaatcaataaacaaaaagtatagttttatttttttttattttttataattattcatttaaacaaactacactctttgtctcttaccatttcaaatattaatattcattttaaaaatattagtatacattatattttttaaagtagtactattgattttaatttatatatatatataaattgtaataatcatttttaaaagttggtgatttgagaaattttgtttctaatattcatgaatttaaacttatgccttttttctcaaaataaataaataaatattattaatttattatgaataatgttatttttttaaatataatgtttgattatttaataaaaatattgttatttatcataactttttaaaaatttattctctatttttaattcgaagaaataaaattttaatattcattttgaaaaaatacccaatgatgtgatgtgaaaaaatacccaattataataaagtttctttctatttttacttttattttttatttaaataattatttaaaaaaatctgaaactaaaatcattgccacgtaggccatccaagtgagatgcacaatatagatgcaataacttggtggtaataggatgcatatattgaaatattataccgatttaaaaatattattttaaattaattatatgtactattaagaaattgataacaaattttattatgtagataaaataaaaaattgactccattttcatttagatttttattttaatttatgtaaaaattcaatttaataaaattaattctcattatttatttttattatataaagggtcaagtgatccccttgtctctcttaatttattggacgaacacaaactcatttggcctttaaggagataggtggatttaggccgtcttaaatttagatttgggtatagaacatgactccaagctcagtccagcccaaatagatcacatcgtattgggtctcaatttgggcttattgagttgacctgggccaacccgattaaattcaatgggaggcaat

SEQ ID NO: 11718 - DNA, 9575 bp, Vitis vinifera
  Intron number 2 from transcript GSVIVT01026692001 (locus G SVIVG01026692001) derived from phytozome v7.0 (chr-ID chr1 5; pos 4885473 to 4895047)
ggtttggtcggattagtcttccaagtaataggtattgatttctatgtgggtttgttctcaattgcaattttttttggcccgaatatggatacttttgcatcaatttggctgataatggtgaaattggatcgttgtttgcttttcaagtgtttggtagatgctcaattggtttgatagttgaagcatacatttgtgcaaattacttgagagtagtctgtcaagtactaggtattgtttgctatgtggttctcaattgcaggtttttgcccgaatttggatactgcatcgattaagctgcttgtgctgaaatcagatttatgcttgctcttgtatgttttgggtcaattctcaattggtttgatatcagaagtgtgagatcctccctaaaaattgccacgtggctccctctcccttggacacgcagacggccccttgcgacacgtggcatcgctcattccacccggacggaaattctcactcattccacccggacatctcatatccgcatccggtcgacattccacccgggtatctcacatccgaaattcttctccgccgacattccacctgggtatctcacatccaaaattcttctccgccggcattccaccctgatatctcacattcgaaattctgtccggccgacgttctaccttctccagatatttcgcagccggtgcctgtcgctgggtgagaaaggaggacgattcaacttccccggataaacatgttcggatcctctggtaacgcttacccggacagcttggctcgtcagacactcgcgattcgccggatccatttccgcccacaataaaaaagataactctgacaatactaacgaccaagtctcctgaactgtcactcatctttaatgcaagatacattcgataagacattcccaagtcttctcaggtctcctgacacatccccgatatttaaagtcataaattgaggcgacatccaccgcctacatatcctcctgatagctgccatctcgcaccagaaacgtcatgattacttcgccaccttatgagtcgcaatcatgacaatgggacccgctagcatagcgaggccatactttctgactcatatataaactctaaggaggctatcagggaggtaagcgaaaaagagataagcaacaagggataaacatcctgctaagggataaacatccttgacgaaaatcacagagcaacactcccaaaggaaaaccctattttccagcaacttccaaaatactaacttaatcatcggagggtgtgtccggacaacccatccggacatcttttttgtaggaggaaggaggattcactgtaatgcgttgatcgagattccgttgctggtgattactattgcagcaggggaatttttccatcaacattggcgccgtctgtgggaacctttcttcttctcagtaaatcctataccttccaactgtaaagatgacttcaccctcaaggagtcgctcctccgccagaggtgacgaaagttacttcgaatggcgaggcagcatggaaagacgacagcgagaaaatgaacgacagatgcaaattctgctccaagaaacaaagagactcagggaagaaaacaatatcttgaggattcgaagctcttcccaacctcaacactatcaacggatgcaggacccctgtcacaaccagggagttccactcccccgagaggcgagcccaaccctcggggcgcatgaagcatggcctagtgaaaccccagtgcacactcgccatgtccgacgaggcgaaagttcaggctctactcgagtctcatccaagcgacaacgtgagaaaaggccccaaatatctgacgcagcgcgcgcgtttgggaccccaaacaccctataaaaacaggcctcataccgccatatcactggatgcacactccgagccttcaagctcgcctactttacaaggacatgccgcccaccccctcatggtgcgggtcggtaaagatcgctcgcacacaactcctccgagctctatcagcaggcgtctggatgacatgctctccacgcctttcagtcctcgcatcattaaatatgaacccccacgagggttcatcgtcccgaaattctccacatatgatggatccagcgatccctttgatcacataatgcattatcggcagctcatgacccttgacatagggaatgatatgttgttatgccaagttttcccagccagcttgcaaggccaggctctttcgtggtttcatcgactgcccgcgaactcgattgacaatttccgggatatgtccgaggtcttcgtgggatagtacttatgctcagctaggcataagcaaaatatcagcaccttgtagaacatcaaaatgcaagaaaatgaaactctgagagagttcgtgaagcgtttcaaacaagctgttctacaagtagaatcgtacagcatggacgcaattctccaaatttttaaacggagcatatgcctagggaccccctttttcgagttcctcgccaaaaaacctcctacatccatggacgatttattccggcatgcgagtaaatactccatgctagaagacgatgtccgggccgctacacagcaggtcttggtagttggccaagccacaagaagtgaagccaccaggagcttcaaagcacccaaccatcttaagtcatccaacagggggcaggatgagcgacgcccgccactcattcggacacctctcaccaagtcgtatgaaaaactgcttcctataatctgcgatctgcccgacttcaaatggccagaaccaataagaccgaacccctcagaaaggaaccacaactaaagatgtgattaccataaagatcatgggcacaccactgaaacgtgtagaagccttcattacatggtggaggatctcctaaaggcgggacacttaaagcagtacgtccgaacagcgcctaaaggtgaaggatcttcccatggtcgagacccatgcgccccaacggctcctgttaaagcagtaatcaactacatatacggagaacccttggatgacgagtacagttccaaaaggaaaaggcagagactgctacgagcagccacagttcgggaacacgtgagctccatccggtcgggattatccaatgggagcatccatcccacagatggaaccattgtcttccccgttgtgaatcccgcccgagtgctgtagccgcatcgagatgctctcatcctagcattaggggtgggagacttcgacgtgaaaagaatcctggtcgacccaagcagctccgcggacctgttgcaagtagcggtcataaaacaaatgggtttcgaaccctccagcctggagaatcccagaagaaccctgtccggattcaacggttcttccacaacctcacttggggatgtaatactgccggttcaagctgggccagtcatcctaaatgttctattctttgtggttgaggatttatcccctttcaatgtcattttgggacgcacgtggttgcatggtatgaaggtcattccgtccacataccatcaaatggttagcttcatcacccaagatggacaaattgatctttacggaagccaggtcactgccaggcaatgttatcagatcgcccgcaaggctggacccaattccgatcacgaacactcccccaaagaagcaaatgcttctgaccaatagcaattacagcacccggcgctcagatgctaccaggagggcaacgccttagggtaagagtcttgttgccacccaagttcgaatcctggagacgtcactctaggtcgctttggcaccagagccaaaaatcgggtcgctttggcaccgatacaaatggtggcaagatgtcactctaggtcgctttggcaccaaagctaaaaatcgagtcgctttggcactgatacaaatggtggcaagacgtcactctgggtcgctttggcaccagagccaaaaattgagtcgctttggcaccgatacaaatggtggcaagacgtcactctgggtcgctttggcaccacagccaaaaattgggtcgctttggcatcgatacaaatggtggtaagacgtcactctgggtcgctttggcaccacagccaaaaatcaggtcgctttggcaccgatacaaatggtggcaacacccaaatgttgcaaaaaaaaggtcgacgtttagttgcctagatggtaccaggagggcaatgccctgggataagagccttgtcgccacccaagctcaaatcctggggaggccactctggaacagactgccttggcattgcgcacggccgctcagaaactgcgtccctatttctaagcttaccccataacagtactcaccaatcaacccctcagaaatgttctgcataaaccagacataacgggaaggatgctacgatgggcgatagagctgagtgaatatgggatagattatcaacccagactatccctgaaggacaggtcatggcagattttataacagagttgcctgaagcgcacgcgctggacaaagaatggactccggatcattggtggtctctgcatgttgatggggcctcccgctcatccggatcaggagtaggactcctcctcaaagcgccaaccggtgaacagttggagcaatccatccgtctagattttcccgcctcaaacaatgaagctgaatacgaggccatcctatccggattggaccttgcaatcaccctcaacgcctcaaaaatcaaaatccatagctactcccagctcgtcgtggggcaaatactaaaagagtacgaggccaaggacgagcgcatagccaaatacttattgaaagtacaagagtcactcagccagctgagagagtgggtcattgagaaagtctcaaggggagaaaatttgcaagccgacgctttagcgggtatagccgcatcatttcctgtgaaagaatcaacgatgctacccgtatactttcaagccactcccaccatcactgaatcacacgtttgcaatgtgagcccaaaggaattcaactgggcgattgacatcagggcctatttacaaacgggggcattgcctgaagatcccaagggcgcctcactagctcccacaacgaggaagcgccacgtgccattgttgtccatatgaaagagaaattttgtaaaggtaacatttttatcccatcttttctgatcaggccagataggcgatataaaagggggcattgtgggatcttccctaaaaattgccgcatggctccctctcccttggacacgcagacggccccttgcgacacgtggcatcgctcattccacccggacggaaattctcactcattccacccagacatctcacatccggatccggccgacattccacccgggtatctcacatccgaaattcttctccgccgacattccaccctggtatctcacatccagaattcttctccgccggcattccacccagatatttcacatccggaattctgtccagccaacgttccaccttctctggatatttcgcagccggcgtctgtcgccgggtgagagaggaggacgattcaacttccccggaaaaacatgtccggatcctctggtaacgcttacccagacagcttggctcgtcaaacactcacgattcgcctgatccatttccgcccataataaaaaagataactctgacaatactaacgaccaaatctcttgaactgtcactcatctttaatgcaagatacattcgacaagacattcccaagtcttctcagatctcctgacacatccccgatatttaaagtcataaattgaggcgacatccaccgcctaaatatcctcctgacagctgccatctcgcaccagaaacgtcatgattacttcgccaccttatgagccgcaatcatgacgatgggactcactagcacagcgaggccatactttctgactcatatataaactctaaggaggctctcagggaggtaagcgaaaaagagataagcaacaagggataaacatcctactaagggataaacatccttgacaaaaatcacggaggaaaaccctattttccagcaacttccaaaatactaacttaatcatcggaaggtgtgtccggacaacccatccggacatcttttttgcaggaagaaggaggattcactataatgcattgatcgagattccgttgctagtgattactattgcagtagggaaatttttccatcaacaagaagcacattagctatatgggtttgtttaatttactagattcgatgatttgctatcttttggtggaagtagtctcccaagtcatagatactgttttccatgtgatttgttcttagttgcatattttacctaaatttgggtactttttgcatccacttatcatattttgtatttgcttcgtgcatattgtggatgtgctccatcatcttgacagctgtagcatattaacattgaattttgggtggttgtgatgttttatttagtaatatatggtaatttatattttgaagtgattttggaaggcattgcatgctatttgtatgaagttgaatggggaaatccttcatttctcatatcatctagatatttgataaagtcaaaattcaacaactatgaattgttgggaaaaagagcaaaatgttgaattttccctaccttaaaagatggtggagtaagggaatgaagtttgatctccaaactaaatatcttctcattgatcatggaggcgttcattcaccccttcatcctctaattggttatagtagcaaagctctccatggacaagcatccacttaatagtttgccatataaaaacgaagcttgcctagttaatttgtgggtcataaaatcttaatcaacatgatcataggctttcttaaaaccaacctttatgattgctcctcactccttggattggaattttgattaagaattttattaggctataactctatatgtgaaacacacttcacaaaggggccataagttggagcaattattttatggattatatcaagttgagaatgcatatgaagtatgaactactcttgcatccatcttgagttttttcttttcttttttctccctaccaagactagaacccagaacctcccacatctccatcccaactctttgcttttggagccaaacctgtagggtgatgatcttgtatattttgtgtttaggctaatggttctaaagcccttaactccatatattcttttgttaatctgaacaattgctatgaaaagaaagttaaagcttgaattaggaacttctacgaatggaactcggaactcttaagagactcttagtatatcttcttttagatgttctcctaacaatctttgatagaaagtcatgatgaatgccatctaccctcaatgccttctttctattcaattgaaagattacctccatgatgattttcattttttaggaaggtatctccaaccatcatgccgtccttagcaatggttctttttatttttgttacgtacatttcaatatttcatagaagtatttatcttgaactatttgttgatgattctagttcttgatggagatataaacataatatgagctttgtgtcagagaaagcgtgtcgagaaaattggaatgctctgtgatatgagtcttcaatgaggaagctcaaggaaaacaagatggattatgatttatttatagtttctcaatgaagttaaggatcttgtattggaatgctagagtggttaagaaggaggagaagaggaaggttagtaaatctttgtttcatcctcaaaatgttgatttggtgtgcctacaagagacaaaggtggaagctatgttgatggccttggttagaagcataggggtgggtaggttcttggagtgtgggtgccctaaaggcaatgggagtagctggagggtggtggccttttaggatagagtgttggagctacttgagatggagatagttcttattcaatctttttttagttcaaatgttatgaggaaaagttcacttggtttttcggaatttatggttgtaggattgggatagaactcaaaaaattttaggaggagttgggctccatgaaggggttatgggaagatccttagtgtattgagggaatttcaatgtggtcaaaatcctagaagagagaaagaattgtgtcagaatctcctagaccatgaaatgtttctcctaagttatagaggaattatccttggttgatctccccttgacaaggagctttttcatatgatgtggaggactgaattggaaattgctgtctagaattggttgtttcctaatcacaagtgattgggaatatcaattctcaaatacattgcaactccttggctgtagctagtgtttgatcactcccttatcttgctagagagatgggggtgagaatgggcctcttttagattcatgtggcttaaggtggaggaattcaaagatatggtgaagggttggtgggaagggtatcggtttactggatcctcgtagcttcgttttaggtttagagttgatagtgttaaaggaggactttatagcttggaataagggagtattcgaaaatgtagtggcccacaaggcttaggtgttggatcagaccaattattgggatgaaaaggggagggaatggtttctttccttagaagatagcaaagctagaagggtggcattagaaaaatctaaatcattgggcctttaaagaaaacatcttggttgtggctagggtttgttttataccccttaagtgttaagttttgtaattataagcacttcagttgtacaattacctttactttcttgggtacacaataattcttgcttttaatcagatattagtggattgttgtatgagagaaggatttcccatccttctgtatactcgcttattttataataataaaaatgtttacttttggtttaaaaaaaacctgaactaacagaagatgactaaacaaaatgccaaggaaacatgcaagttgagttggaatggataaagtgatatgacttaagaaagacttgtacacatttcatgtgagatgaatgagaagtcctgtttttgtttcttctttcttcatcactatttccctcataactagtgtttttggtgtttttcctttgtaagcttccatgcatcctttagcacaagtcatttgcttttccctaactatgagttctttgaatatcttttgattatatggacttctggtcactttatatgaagggaagacaggaaaattgcaaaagaataggaaaccaggaaaaagggacagtattcatgaatcttgagaggcatggcctttttttgtgggtttttgatgtttatatttttctggtttgtgtttttttttttttttttttgttgttttttgttttgaatcaaagtaatgctaatggttttctatctcattgataaccctatgtgcaccccaaataccatgatgctgatttattttacatggatgaatgcagtattattgttatgtagtgctttttttttcccctatttgtcaatgaattgcatatattctttccatgctcagttaaaataaataatctcacctgtgataaatttcagtggattggcattttaccacaatgttactctttgcataggccaacaacgg

SEQ ID NO: 11719 - DNA, 7747 bp, Vitis vinifera
  Intron number 4 from transcript GSVIVT01021383001 (locus G SVIVG01021383001) derived from phytozome v7.0 (chr-ID chr1 0; pos 4725663 to 4733409 reverse strand)
acaggtatttcatgctcttcgaattcttctttccatgaaatttgattatatgtcaagatttatgagcaatgagaatttcttatccatgtagggatgcatgaaaattttaatttgtgatttttttaaaataaagaaataatgttttataaacaagcaccaaaaaggtaaaaaaaacaatgcacccaaggattaaaatattagaaataacagaaatatcgatccttgaattttatggaaatattagaaatattggtaattttttttaaaaaaaatatattgataagattaaaatttatggaaatattataaaaaagttttaagaaataataaaagtaataatatacatattaaagctattttactagaaaaaaattacataaatatatttgatataaaaaaaagatgatttatgtaattatttttgtttaaaaatgtttatgacttatttattagtttaaatttatatgcattttttttatgataaaattattcattataaaagttattatgatgtttttatatcatgagataattaaaattaattgatttattaaaaaattatttttatattttattagttttggtcacatcgttgcccctggaaaaccattgcacttatttttctgattttttctacacacttgctttgtggtgggtgatgggacaaaaatttgtttttgggaagatctatggtgggaggatcaacctttgtgttcacaatttccaagacctttcaaattcgtcactactgaaaacatatttgttttagctattttgggcaatgattcatctccttcttgggatcttttctttccgttgtaatctaaatgatttggagattgaggattttgaaagattaatgacttctctttcccatgtacatttgtctccatttgttccaaatacgaaagcttgagtaccttcttcaggagtattctcagtgaaatctttcttcttaggcttgaccaaattattagttttagttcctttccttccaactaaatttttatggaaatcaaaagtcccctctaaggtcatgaccttggcttggttagtggcacttaagaagataaatatcaatgacatgttataattgagaagacctttcaaagctcttagtcatgattggtgttgcctatgtagggggagtggagagacgattgatcatcttttcctacattgttcaattactttggggttatggcacatgctattcttgcaagcagggatggagtgggttcaactaaagagtatttgcaatatgatggctatttcctttatgtgttttgggaactttgctagaggcaagactctttggaagaccgcctctctcactttggtgtggattgtgtggagagagaggaatgctaggatttttgaggatgcttgcaagatgcctgagataatgtgggatttgattcatttttgtgcttttttttgggcctattgtgttgatgttttcaaaattttctctttaagtgccatttagtttagttggctcttggtttgtattccttagggttgggcggcctatttggtgaggagttgagtgtgctttcgagtgtattttgttagttttttttattctttttatacaaatctcctgataaagcagaggttttcatgggtttttttattaggtttgtattcatggggaagatttctcatcctttttatgttgtatttatctataattaatacatatttggtttttaataatatatatatatatatatatatatatatatatatatatatatatatatatgtatgtatacgtatatatatatgtatgtatgtatttattagttttggaaaaagttttaaatggcacaatcagtatatatagtatatatttaatatatgtgtcttaaaataagtaagggcaagttgccttgatggtgagagttgtgttttgcatacctcaagtcatgggctcaagccttgatcatgttagaaaattttgaatgtggaaagaggtgctggttgagcgtgtgaggggttgaaaaattggtgataattgctgaaaaaatcggaaaaaatccgttattccaagaaaaattagcaaaagtcgatacaactgaattttcatggccaatttcctatctgcccttattgaaatctgatttttttggtgatatttcgtcgataaaatctgatattttataatccatgaatgcaacaatgtacaaaggatgcatacaatgggcaccaaaggcctagctaaaaaagagagaacacaaaaaacaactccctcctttagggaaaacccaacaaatcaacaaaatcaattaaagacattgaaccttcttctatgtatgagtttacacagaagaagagataaacgaggaaagaggtttttagaacatggttagactactcctcattatcaaataacctttgatattttttttcccaaattgtccacaaaaatgcacaaagaattgactttctaaaccttctttagtcttcttcctacaaaggatccatgtcaccttaaaaagtctttttttttttttttttggattagaaacaaactaattttttatttgaatttttaaatactagcaaaggaaaagaaaatctttcaaaatacaaaaactagaaaaagaaggaacttcttcccaaagcgactacaaagagaaaaaaaagaagaaaaaaggaacatgtaaaagctagagacaatctaaacaattgaggggtacaaaatctcctaatttgcaagacaattaactaagtccaaaagaaagaacaacccaaattagtagcaacatctaaaatttggcaaaaccaattatcatactttcaaggacctctttgatttagacacctaagagatcttatgattatttttttgataagtaaagaagagtatatgttagaaagaagtgccaaaagagtgacccaaggtgtatccttctcctaaatagctcaaacaaaaaagaagttgcaattaaggaggtactaccacaaccctaccctcaatgggagcccaaccaattaatgaaactaactagtgttgaaggaccatcatttactaacattatagtcttcgactaaagaaagcaacaaaagaggcttttagcgtttggatggagggaacatcatcttcaaaatcaattctattctttaccatccaaactattcaaaagatgcataaaaggctcactttccaaactttcttacactttttgcccacaaacgaaccatgtcaaactaacagagtctctctaactgatgagagaaacacctatgacacactaaaaagagcaaaaagcatccctcataaagcccttatcctcacatagtgaaggatgtgatctatagattcttcatccatttggcaaagataacatctatttgctagggactgccttcttttctgaatttagtccaaggttggagctttttcccaagttgccttccaagcaaagaagctcactttaggctgtacccaaggattccgaatgattttcattggaaagaaaactgaaatgcccgtctccaaggcattataaagggacttaattgtgaacttgttgctcttagtctctgtccaaagcaccttgtcttcctcattcctagcactatcttcccatatggacaatagaaatctttccacaatatccaccccctgatcattaaaagctctagtgaagctagggttctaactcctccctaccaatgaggagttcctaacatcctccatccacgcctccttggatacaactagagcaaacaaagaagggaaaaaaaacacacaaaggagtaggccgacaccacttatccctccaaaatttggctctcctcccgttacccaccaagaaggaaagtctacacttgacaaggttctagtccttccttatctctttccataacccgacctcatacccttccctcacttgccgagaacgccagccccctctttcttccccatattccccattgatcacttgattaaaaaacactcctctcttattcacaaaatgtctactccacttgtaaataagggccttattgagaatagaaagacacttaaccaccgatttatttttattttattttattttttatttttttatttttttgtctaagcaaacagttgtccactttactagatgagtttttgactcaagagccccatctccccatagaaagtccctcttaatctgctttaacctcaatttaaccatccttggcatacaaaacaaccacatgaaataaatgggcaatctagacaaagtgctaaagtgccctgcctctaagtgatccttcaaaattcctaaaaaaaggtaatcatcatattagtcacattgctaggaagaatcaatctatcttaaaatgtataaacagactatatcaaaaccttagccattgcatagagtaaaaaagaggatgataatcaattgatcagtccccctagcacataacgcaacaatccacactgtgactgttgtaaggcctcctcagtcctcatttatatcaatcattggtattgatcttcttatcaactaccagccatgcaaaggctttaatttgaaataagacttagaattctagatgaaactggctgggaagaaagggttctgaacttatgaacttagatagagctaaaaaagaggatttgacaaataggtaagagagatgagaaatccaaatttacctgaatcaataaaattgggacaaaaactgatgctccaagagataaaagaagagtacaaaactagaatggatgaaatagattagcctttctaataatcattaattattactctgaaaagatttggaaaatgagcacaaagcagttaattgcaacttaaaaagtcttcccaaaaacaaatctttatcctatctcacaacaaaaatgagtatgataggaaaaaatagagaacttgtgcaatagccttctctatgcaactatgtgactacctaacctaaccattaccgtgttacttataaaagcttgatatgatgctatgcctttaagaattgtcctccctaggaaacctccacaaccacttccctaagagaggttaattccttcaagaaatcttccttaaatccaaccttttttctccatgggcttacacgcttagttccaattaatgagatgattccccaactcctaactagatttgttacattttctcaatccttgatgttacacttagaactttgtacattgggatgtgaaacaagactttacatgcaatattcaacaacttttttcaaccatctagtctttgggaaatcttgtagattactgagttccaaaatgaagcagctctcacgttccctctaagaagaggacacaagtatgatatgtcatctattacacagtggaaaatgaatgactaaaactctatacattctttgatgagctccaatagcaatgacaagaacaataatgatatataaagaaaaacctcttcttaagggctaaacttgatcgctttttattatttagtggaattttctgcattccataattgttgaagaacaaaactaagatttcaagtcagattaccacacatttatcacttcatcatttccttatgagattgcctttttcttacatataagacgagacctcttgaggaaatttgtttcatagccttacataatataaacaagcaatattagctatgaaggcttttaattgtcttttgaagtgtgtcagggagggaggttacctgttgggattagggcaaggaggagagatggtgaagggggaagaggtgtcacatttgttatctgcaaacgatacccttgtttttgtgagacttatcagatcaaatggtctatttaagctagtttctgatgtggtttgaagccatcttgggtttaagattaacttagaaaagagtaagttgatttcaattggaagggtggatgatacaaaggagctgacctatgaattttgggtgtaagataagacaacttcaatctactagtctagggcttccattgggtgttccttctaaatctttgagatggggtggaagagcaatttcgtaaaaggctgtagatgcggaaaaggcaatatatttttaaatgtggaaaacttattttgatccaaagcacattatccagtttgcccatatattttatgtcattgttcagtaaaaaaacttcatctagttaagtggtaaattgtttgcacaaagaaaagaaagggggtttgggtgctagatatctttcgttggttaaaaaagttctttgtgttagtggaattggtgatacacatatgaaagaagagctttttggaaacaacttataagtggaaaatatggaaaggatggaggttggcagtcttgtgatgtgagagataggtatggtgctaggttgtggaaagctattaggatgaattgaaccacctttagtagtagaaccttttttttgttgggaatggaagaagggcgaagttttggaagcataggtggtgcaaggatgaaccattgcgtgtttctttcccatctttatatgtcttaggctcatcaaaagagacctaggtggtggatttgtgggactagataggtgtgagagatcattggaacccttgtttctttagacatttgaataattgagagctggacaatgtagagcaattattctctagtctacaaggaaaggtagtgaatagagaggggaggacatggtggtgtggatgaattcgaggaatgatacttcctccattaaaatttctatatgttgttttggagtcaaggagtcagattcctttcccggcaagtgttatttggaatccatgggcttcatctaaagcaagtttcttcatgtaggaagcttactagggaaaggtgttggtgctaaatcaacttaaaaggagtgggtggtcattagttaacagatgctttctatataaagttgaagaattcattgatcacattctcctccagtatgtcaagacaagggtcatttggcggttactcttctcattgtttggctttccttgaatgttatctagcatagttataaaaaacctggagagttgtttaaaaattttctttggttgcttgtaatcactttgaggatgatatcaagcatttaatgtgctttttcacttatttctgattgattgccttgattttctaagcattattttgtgtttattagtcgttagcaagttgtatgaattgtatcaggtggggagttctggcttggtatctaaaacatgttgaacccctcaaacaaaatttgaagcaactgaaatgacctagaatagcactgagggatgctgggtcatgctagggaacaatacaacaaaaatgttactgaactgaaccattgtggatttttttaagagttggtttaaacaattgcttgtttggttacggcagacttgtctattacttgtgtgtgctggaccatggtttgcatgtttgttcttattatatcttatgttgttagattcagttattatatatctctgtatcttcattattattgtgacccttgtcactgaattgtactgttctcggtgtttattgcatcagcttcttagcccaccctattacttgtctttaaactctataattaccagagtagatataaatgcataagggtaaatacaaaatatacttagaaatgcctacctggtaatagtatatataacaattcgcaccaaaaagaaaaactatagattcattaaaaaaccatttacttatcagacaccatttccattttatcttcagtttcaagaaattggttgccatttgtcaagaggaga

SEQ ID NO: 11720 - DNA, 7179 bp, Vitis vinifera
  Intron number 29 from transcript GSVIVT01037358001 (locus GSVIVG01037358001) derived from phytozome v7.0 (chr-ID chr 6; pos 15169545 to 15176723)
aagcttgcaaaggttaattctactttacaatgctatatactggttttgagtcttttgacaaataatatctggcttccaataatattgttctggtttctaatagaacagagaaaacattatttggctgactatatttaaggctttttggaataaaataaaatagttgtggtttcaatgttacagatttcctgaatttaattaattgagccatgtgacagtaaaaagttaaattgtgtaaccttttaaaggatgaaacatttaaaaaaaagtttaattgtgtaatatattctctagttgattggtttcatctatgcatgatatagtcatagttttaaaagacaagagaacataaagccttttgtccttctgttgcaccatgcacaagctttgaagcataaggtataaaagtcttagtgccaccccctttttttcccattgatcaattaagttttaaaaaatatttaattgatgaaaatttttacgatttcaaagctaaatgccacaaagaaaactcatattcaattactgatcaatattggattatatatattttgcgtacaagtaatagatcttgagtattgaaatgaacatataatgagagccccatactgcaaaatgtgagccttttgtcacagtcttatataatttttaaacacccatatgacagacgacttcatgtcttcttgagttgctacgtcagcttgtcccaaccaaatgctagacaatgccctggcatgtgaaagctaataaagagcaagcaagagaatacttggaaacaagaaatctacaagtgtattaccaaaggaagctttataaaatgttagatcttaaatgcctaagcactctcaactccaaggtactttggccaaatgaggcctccacctatttgtaggcatctatagagaatgctagaaccttgaggtctcttgagaccctccaataccttcaacactagccctaatacagtactatgccgttctcaataaaattctaaagtattctagatactcccagtctctacatagtcccgtagtcttccacactgttatggagtctccgactcaatgcttgagagatccacacatcttttgagaattgcacacttctgggaaagctactagagcatttcagtgttctcctgaaagcttaagtaaaggttctgagcggtcttatatgcaatttcttgagcagattgtgactgtctctaaaaccttttggccccatcatcttttgtgcaaagcaagactagtaggttgttaagcctcaaagttctgcaaagtgtatgtctcaaaagccttctgtaaccatgattttactagattttaaggcttatgggtgccattataaatgccaaggatgtttgtaacatatggaaactcattgtttcttgtaatagaagtcttaacaaatatttctgaaggtagaaagaattgaattgaattctattttgatcaaccaggttacagagcttatatacacacctaccctcctagagtaaaatggaaataaattatacaagggaagtgttacaaagacaatccatacaattactctaaactgttgacctattctaaaatatatacaatcattaattgattctaatttaaattaattagacttaaaatagaaactagaatcaggaaatcagccacattttctgacaatttctttagcaatagacacaaaactcatggtttctttcagaaatatgcacacaaaacaatgattaaaaatgctgaacaaaatgatcctatcatttctgtcatatgcatcctctgatttttgtaaataatgaatttaaatgcatggaaatttcaagtcatattttagcaatgattatgcatcatagaaaacaaattacaacctattgatatgctatgcaaggattgctgaatgtactgaatgccttaaatggaaatgtcaccaggtatgttgaaaaaaaaaatacagatatagtgatgcatatactggtactggattgatgctaaataagtatctgacttcacagaagttcttgccaaaaatatatcaatttcatagtattagaaatatttatgaagagtgtcaatcaacaaagagaactcatgatactgttaaaaggaatatgcatagcaagaatgttgtgtttcatagtaaaattagggaattgatcttcaatacttattatgagaaactctttgtattgtcggcattgaaaggttgatctacatttatactgcagtttagcaaactagaaaagtaatatgtagagaaaaaagaaagcaaagatatacagctgtactgtaaaacagagagtaatgttgttgatgcaaaaattgaatagtttagataccaaatgagaaaagatggatgatataattgtttgatgtacaagttagttttgaatgtactgtcaatgttgacacagcaagaatcaatcatcctttggaaatgcctgagatatcatgtattgcagaattaaccaaatgatgacaactataacaaagccatgcaatagaaaataaaaatggaaataaaatgttatcaatgatataagtatgttttcaatatgctcagacataaaagagtatgtatattgatacactgcagatgtagacaaaatatctacactattatgtaaaacctactctttttataggttactatgcagagaaggccagcccattagattccataaggaccctgatttctttgtccattctgggaaattaaacatataagagaattctttaaatgggtgcaaggaaagaactgcatcaaagtgagaaaaaaaaatcaaattttgtcacatattttaatttctagtaagtttcatcataaatgaaagcaggacatgtgaaaccctagatttatttattttatttatttatacatttatttatttatttattttgacaatgtggcgacccatcatttcactttgcaaaactcaggaaagccatataaacatgccctctctatcaagattcatatattaggcaactttgggactcaaaacttgggagggctttctatttgagctacttgtgggaacacaagggtttagagaacgaatatcataaagaatgaaaaaatgtatgaataaaaaatttaaagaaaacctgattatttcctaatagaagcttttaagaggttgtgatatgactaaaagcttttagggctacatacggtttcttactgtagatgttcttttcctaataagtcatcctttaccataaacaaatctgaagacatgcacggagcatgcaatgcttctataaattagagctttcttttctcccacatcttcttatgtatattagggtgcctagacaatttgtaagaaaaaccatgaaattaccttttatgttctcctctacaattaactaaaaataagtactcaaattggaaatgatacaaaaaatgatgcttaatataaatgcatcaatcaatagtgccttatcctaactgcacaagtttgagtgaaatgtttaggagccaagatctcaatgcttcatttttatctatggtttgtaaagactaatttgtagttgaaagtggaagggttcaaagaacctattagaaattggtaggtgggctataatgtcaaggattcatttagccacatcttagcaatcaaactaaaagagttgaagaaagatctaagaatttagaataaagaggtatttgggaatgtcacaaccaataaaattgcagctctaaatcagattgccttctgcattgtcaaggaaagggaagttgctctgctcttccattagaggagccaagctaggagggaggcagtgtttaaattttttaagtgggcagcaatggaagaagtctcttgggcagaaatcaagagaactttttctaagaaagggagataaaaatataaagttcttctatatgatggccaatgctcatacgagaagaaaccatttggctaaaatgcaaatgaatggagaaatgttattggaaaaaacaaatattaaagaggagctttgaacaaagaagattatgttaggatagagttcttaaaagcatgacatgatctaacaataaatggattttactattatttatattatgattccagttttctctttcattatcccatttttgcattgtgtatgatgaacattcaaggttgcatcacttgcattgtacatgacttgagtgctttaagaaatactcagaagatccaaatcatgagttcctttcaagttgataagtatttcacagcaagttcatggacttaagcaatccatttgagactatagtgcaccacctcctaattgaagggatgacttatcttagtcatcaagatgggtttcccatggtgagtgtactaatgtatatggttacacgttggacaagacttacaatgagtcataacatgtactatcgggtaatcatgacttcactaagttactatattgcatgatcccataactttgaaagaatattgagctagtgttaaggtgtccaatggctttgacttacgggtgagacccttacaagatcatatattccttataaattgggttactattgattaaggcaagtagcaatgggtattctcaagataggcaccatgatatctcatggtttgaaacaatgtatcctcttacgtactcataaagagatgtgatcttgaaatatgtgaccacattaattccttaagtgaaatttgacatatgctcttaaagaggggtagagtatgtcaattaatcacataataagaggatttgagattcaatgattataaaggtaatcttgacaggttgatagcattcaccttggtagattgtggattttaattcatagggagcttgaatgcaatcattagtaggtcaatgacttgagttttctatctcgatctaatattataagatattagagtacaattaaccctttttagtggtatgttgagtcaactttaaaattggattttgagatagttaatattttcctatgggtcttaatggtccttactcaagctcatattccttggtggtacattattgaggaatggttgggttctttattcttatgtgtgtataagggcattttagtaattacacaaggttgcataagagtttataaatggtctttctagattgtgttaattaattaatcggaatccaatagagctaattaattgtataatgaatagggcaaaaaaatgaggttttatcacaagttttgcagttaatggaaaagaaggtctaggaatgaaggtattctatttgttgtttgttgatgattcttttatcctttatgatgccagtcaagaacatatggagcgcttgagctggtcttgcaagcagtttgaggcaatcttggctttaaaaatcaatttggagaaaagtgaatttatcctaattggagggtagcaaatgttgaggagctaattggtgttttgggctatcaggtgggtaccctcctcactattaatatgggtctattgttgggaacaacattcaaatcgtcatgaatttgggatgtggtggaggaaagattttagaaatgactggctttgtggaagagacaatatctatgaaattgaggagtgctaactctaataaaaaatactctatgtagcttctcaatatactttatgtccttatttgtcatccacagaaggtgatcttaaaattggtaaagatccaaagggatttcatttgggggagagatgtccttgagaataaaccacatttggtgaattggttgacaatttgtatggacaagagaaatgaaagcttaggtattaaaagtctttccattcttgacaaggcatttttcgacaaatagtgttggaggtttgctactgacagattcctttagaaagcaggtggttacaaggaagtatggggaggaggtgagcagatggtgctcaagaggatggaggaaggttatagggtgggtttttggaaggcaattaaaaatgggtgggaggttgtttgcaatggaaggggttttaaggtgggcaataggcaaatggtgaaattttagaaggataagtagtgtggtagcttaccataggaagagtctcctgagttgtcttccatagtcattgccaaagatgcatgggtaattgatgtgtgggagcaagggatgagggttgttgaaatcctcatttctcaaaacaaatccataactgagagtttgaggaggtggagactttctgtaggagactacatggttagggaagtagaggataaaatgttgtggctaagttaaaagtgtgacaattttgcaattaaatctccctacccctctttgtctaataaaagatttgaggtttttcctttgaacgcagtttgtaatccttaggttccattgaggattgagcttttttctaggaagctgaatggggaaggatcttgaagttgaaccaactcaaaaataggggatgaaatatgttgaatggttgttatttctataaagaagttgatcacatcctttttcattgtgcgatgactattatcttgtggtaattcatttctactttatttgtggtaaagtgggtcacacattcctcagatagaagcatctttttgagttaacatggatcttttgttgggaaaaagaggaaaaaatattagagtggctcctttgtgcttattttgaaccatttgaaaggaaatgaataggagagcttttgaatacactgaaaaagtggatcaagcaatcaagcaagcctttgtgtgtaattttttaaagtgggttagagtggatataggagattcctcaatgttcatggtagacttcattgattgattgagttataagtagggagaggtaattattttttttttatctctctccactttgtctagccttttggtgcctttttctatcccatgtatgctttcacatgctcttttgttaggtgcttttaatatattttctttttgcctatcaaaaaaaaaaaggcattgggtaaatgttcatacagaatgaatttcttataatgtttgtgcttaatgtttgtgaacatgggcatattcattaggttctctgtagcttattatgttaatcatctacttgtctttctgattatgttaatcatgtatttctctttcttgtgtttgggaattgtaaaatatatttttctaatttaatagtgttgtaaaactatgtttattcttttaccaatataccaagctgttttgcctgatttgcagggtgcaggca

SEQ ID NO: 11721 - DNA, 15612 bp, Vitis vinifera
  Intron number 12 from transcript GSVIVT01032403001 (locus GSVIVG01032403001) derived from phytozome v7.0 (chr-ID chr 14; pos 27008882 to 27024493 reverse strand)
aatccagactggtactgctagaactttggtatcgtcagttttatattatcttatcttattatggttttacttgtttgttggcttcttaatctcaagtttaacctctaggaggtgattgggaagagccgctagaacctaatagctggtttgcttccttttgaactggagagacttttgaacctaatagttggtcacttaattgaagttgtaggaataagattgcttagtgatgcatgattctgattgcatttccatcaatcttgtggacttgttttaattctattgctactattctgggaaatccttgttaattcaggagaactggacaagctgagtttatcatgttttatgataatgtaattattaacaatgctccatgcactgtggttcaatggctatattgtgaactttatgaggctccatgcattgtggttcgatagctctaatgtgaactttatcatgtttgttaattaattattcggcaggaatcccattatttctgatttgttttgctaggaactctcccaaaattgctatttggtaaatcattattattttatttggtgcttcctggatttttactgacacaagtagactttgattttcatgtaagacaatatatggattcttattttcctttttgcactctcattagattctgttggaactatagctattcttgcattaatctttcatatattgtttgtattcttatagttgttttgggtattcggttgatgaaaactgctgatttctcagaatcaaattcttggttgcattttttttttcttgatagataactagaaaaattgtattagtggaaataaagaaaggaaaattttatgggtaagggtttgctatcctctaaccaatacaaagtagaatagggaaagtacaagcatctaagcagaaatatgccccagaacacccaacatacagccccaaccaatacttcttaagcacacacttggtgtggcaggaaatccacaatgagtgcctccaaagaagaggctccatgttaggccaatctatcaggcatctgaataaaaggagcttacaaaattcttgaaaggtcaataatcttgcgaatattaaaaatccaaaacacaaaccctcatctcccccactttcttccctgtgtaatccatgagacagctacagctgattctctccaaactaaggttattcttagccaatgagggcacctctatcaaatcttctgatacagcatgagtctcttgacaaggcttctgtaaattaggattagtgtgtttatggaggttttctaacatgtctacccagtatggccattactaaaagactcgttccaaatgcccaaaggagtcctatctagaatgaacctctttatcggggacctacaacttgtgagactaggaattgtttttctttcacaattctgcagtcaactgtacatgtaaatgtctcagtaaaaacattattacttcctttcataattttgtggtcaaatatgcataaagccaggcttattttgaattctagttgttttttttttgataggtaaaaggatattgtattaaaaaagcatacacaatgtatacaaagcagcagaattctaataatgagaagtgaggtggttgagaggaagacggtaaaggtcctgattgagaggaagaccttcttgattaggctggaaggagatcaaggaggtgaatggtgttcgatgacagagataagtagaggctctgtttttgcattaggttttgaaaaggaagcagttgggtggttggttgaatacttgaagaaagccatagcattgaagagtcatatggggttcaacaaaaaattcaggggaaaatgcagggctcatctgttggaagttggcttcaacaatcatggaaggttcataaggatctcggagtttgctaccaacagaaaaccttccgttctgatcattcctgagggcgacaagggcagaggttgggagagtctcaaaaatgcgttagatacaatgctggtggtcccatatccgtatgcagaagaaaaaagaaggaatttaagaggggaaagctggcctcactacaaagtagcctcgatgcacagatcatacgcgaagacagttagtgacgaaggaccaagaggaggtggtctagttccagtggggaggtgggcgcgtgctgtgatatgtgaaagcaagtttgacagggagaattgggctgaggttggaagattggtggcgagaagcttagggaagaatggagttgtaacgattgtacccttttcagctggaaaaggtgtatttttcgttgaaacaaccaaggaagccttattcctccatgatttgaggaagttaagggttggggaaaggaacattattcagctgcgaagatggtcgccgaaggaaaatgcggaattagaccggaaatttagagaaggatggatcgaattaagggggttgccatttcacctatggtcggaggttcacctgaagaagattgtggatcaatgggggtctgtaaaagaaattgattggcggacgctgaagttattcgatctcagcagtgcgagattaaagattgtaatgagggatagggcaatccttccagccatgttagaggtgacggatggggattgggcgttcacagtcgtcgtcgtggtggtcggagatgaagaaagacggagaggtaacgagaagggtgagtcgactcgggtggctgtcgcttctcacatggagacaggtggaggaaggcgaggggagtgcggcagatcaacggatgagggaaggtaccgtgtcggggaggataacagacataggaaggagggaaataggggtaagggctgccagctcccgtcacagtctcgtttgaaatcaacagatgggatggacgggattggagaagaaggaggagttcgggccggagaagatgaggctattgctgatgtgggctgtcgggcccgagagaggaaggcccaattgctggcaaagactgatccaagtggagctgtaatgggctgcaagattaaaggcatgctgggcttgggcctaagcccagatggggttaccccagttgttacagtggcgtcgtcacgcgaggaagaagaagacgcttcttctgcaaacgaaaaggtgaaatcaactcctggactcctcgagtttcagtcgagcaggttagcggagaagaaggtgttgcacggttcaaggaagcggtggtcaactttctttcccccaagctcagagcaccgacaaggtattcggagcaatagcgagcccatttcgcgcggaaaaatcaaggtggacagcgaagaggacccaaagacagatgatttaggcgccgaatctcaggcaaacagaggagtaaatgcaagccctctcttttctccgtgtttatcaaggcctcgcaaggaaaatttaggggaaagggactcgtcgccgagaaaggaagcagatctgaaaattttttcatccaacgaagatatggaaggttttttgggccgagtggggtctgattctcgtggctcagcagtcattgttaagccttcttcgccagaaaccagaggtaaagggcctagcttgatagggaactgtgttccgagggttgcggaaaatctggaggtaacgtcttcactttttaattccatccatccatttataccctcttctaattccctcttgaatcctcccgtacacattcagtgtccctctacccccatgtcccccgactcatcttctcaatctctggcacccatggaaaaccgagtaatctctaaatttttttccaaaaaaggcaacgatgaaggtcaatttccggttgatattcctagtttagaaatggaaacggaggtgatccagcctgcttgtccttaccagatgtctgagagtgtcaattctctctcagctattttaagatcaccttgcaaggagtccagtaaggctacagctcacttgggaggtattgcgggctctccttcgggcgagttccaaatagaaggactgtcccctagaaaaatggcaaaagtacgcgaggttttaaaaaatctggatatcaaggtatattccaggaggaagagcagatgctccacaggattgtgagactatctggttttggttcggagattagggtcacaatagtttcacatgaagataatcagttggaataccaggggattgggctcaaagaaaaagagaagggtggttaaggattttctgagatcagaaaagccggatgtagtgatgtttcaggaaacaaaaaaggaagagtgtgatagaagatttgtgggtagtgtttggacagccagaaataaggattgggcagcccttccggcatgtggggcttcgggtggaattttgatcatatgggatgctaaaaaattgagcagggaggaggtagtgttaggttctttttcggtctcaatcaagtttgcattgaacggttgcgaatctctatggctatcggcagtttatggcccaaacatctcagctctcaggaaggatttttgggtggagctttcagacattgctgggctggcttctccgcgttggtgtgtgggaggtgactttaatgtcataaggagaagttcagaaaaattgggcggttctagattcaccccaagcatgaaggattttgatgatttcataagtgattgcgaattgatagatttacctttaaggagtgcatcatttacttggtcaaacatgcaagtgaatatagtttgcaagagattagatcgtttcctgtactcaaatgagtgggaacaagcatttcctcaaagtattcaaggagtactaccaagatggacatcggatcattggccgattgtcttggaaactaatccgttcaagtggggtccaacgccgttcaggtttgaaaatatgtggttgcaacatcctagttttaaggagaattttggaagatggtggagggagtttcaaggaaatgggtgggaagggcacaagttcatgaggaaattacagttcgttaaagccaaattgaaagagtggaataaggcttcttttggagagctaagtaaaaggaaagaagatatattatctgatttagttaactttgattcattggagcaagaagggggcctatcccatgaacttttagcccaaagagctttaaaaaaaggggagttagaggagttgattttgagggaagaaatacactggagacaaaaagctagggtgaaatgggtaaaagaaggggattgcaattcaagattttttcataaggtggccaatggcaggagaaataggaaattcattaaggagttggagaatgaaaatggcctaatgatgaataattccgagagcataaaagaggagattttaaggtatttcgaaaagctctacacgagtccttctggagaatcttggagagtggaaggcttagattggtcccctatatctggtgagagcgcgtttaggttggaatccccctttactgaagaagagatttttaaggctatatttcagatggacagggataaggctccggggacggatggctttaccatagcagtgtttcaagattgttgggaagtgataaaggaggatctagtgaaagtgtttacagaatttcataggagcggaattattaatcaaagcaccaatgcttcctttatagttctgttacctaaaaaaagcatgtcaaggagaatctcagactttagacctattagcttgatcactagtctttacaagataatagccaaagtgttagcagggcgtataagaggggtacttcatgagaccatccactctactcaaggagccttcgtacaagggagacaaattttggatgcagttttcatagccaatgagatagtggatgagaaaagaagatcaggggaggaaggagttgtattcaaaattgactttgaaaaggcctatgatcatgtgagttgggattttttggatcatgtgttggagatgaaagggtttggtattagatggaggaaatggatgagaggttgcttgtcctcggtttcttttgcagtcctggtgaacggtaatgcgaaagggtgggttaaggcatctagaggtttaagacaaggagaccctttatcaccgttcttgttcactatagtggcagatgtgttgagtaggatgttattgaaagctgaggagagaaacgtcttggagggtttcaaggtgggtaggaatagaacaagggtttcccacttacaatttgcagatgataccattttcttttccagctctcgggaggaggatatgatgacccttaagaatgtcctgctagtgtttgggcatatttccggtttgaaagttaatcttgacaaaagcaatatctatggtattaatcttgagcagaatcacctttctaggttggccgagatgcttgactgcaaggcttctgggtggcctatactttacctgggtcttcctctgggagggaatcctaagacgagtggcttttgggatcctgtgattgagaggatatcaaggagattagatgggtggcagaaggcatatttatcttttggaggcagaattactctcattcaatcttgtctcacccatatgccttgttattttctctccttgtttaagattcccgcctctgtggcagcaaaaattgagagaatgcaaagagattttttatggtcaggcataggggaaggcaaaagagaccatttggttaattgggacgtggtatgtaagccgaaatcgagagggggattgggttttggaaagatatctataaggaatgccgctcttttagggaagtggttgtggagatatcctagagagggttctgctctatggcatcaggtgattttaagcatttatggatcacactccaatggttgggatgtcaacaacatagttagatggtctcatcgttgtccttggaaggccattgcactagtctaccaagagttttccaagtttactcggtttgtggtaggtaatggggatagaattcggttctgggatgacttgtggtggggggaacaacctttgggtgtccaatatccaagattacttagagtagtcacggataaaaatgctcctatttcatcaattcttggttatacccgccctttctcttggaatttcacttttcgccgaaatctttctgattctgagatagaagatctagagggcctcatgcagtctttagatcgtctacacatttcatcttcggttccagataagagatcttggttcttatctccttcaggtcttttcacagtcaaatctttctttctggccttatcccaatattctgagtcgcctacaattttccctaccaagtttgtctggaatgctcaagtcccttttaaagtcaagtcctttgtctggttggtggctcacaagaaggttaatactaatgacttgctacaattgagaagaccctacaaaacacttagccctgacatatgtaagttgtgcatgaagcatggagaaacagtagatcacctcttccttcattgctctttgacgatagggttgtggcacagattatttcaatcagcaaagatggattgggtttccctaaggagcatctctgacatgttatctagtaattttaatggttttggattttccaagagagggattgttttatggcaaaacgcatgcatcgctataatgtgggtggtgtggcgggaaagaaatgcaaggatttttgaggacaaagcaaggaattctgagtatctttaggactctatttgttttcttacctctttttgggctttttgttctaaggtttttaaggggattcctcttaacatgctacaacttgattggttagcggcgtgtaactagagtgtcttttctctttatgtactttcttttttgatttcttgtagttttgtttttctttgctgggaggattcctcatccttcttttgtacctctttttatcaatatattcctttgtcgtttcctatcaaaaaaaaaaaaatgtatacaaagcagcaaaaactagaagggcaaatcacaaaaataagcaactactctctatggggaacctaaccaattcacaaaatctaacaaagacatagacccatccccaatgtacaatctaatctaatcctaaaataggtacaaaaaagaacttttaattatctcatcctaactttcacaattctcaaaggctctattatttctttcccaccaaatagaccaaaaaaggcataaaggggcaactttccaagcctttttccattttttgccaactgaggagcttccccaactcaggaacacccctctcacaaaagagtgcatcatctattgaacatcaaatagaacaaaaatcagttaccgcaacatgcaagcttttggacagtgtaggagaatatggtcacccgtttcttcatttgctttgcacaaatgacatctgttaggtatatttcatcccttgtttctgagttgaccttgagttaaaatcttagcttatgttacaaagagggacctgtggtaaatgagtaagctggataaagtgctcttaatcaaagtttgtcttctaccttttgaaagatattgcctcttccacaaagcaaaccctttttggaactgctcttccaccctttcccaaatcctaatagacttgtaagaagcaccaaaagggaggcctaagtaggtggttggtagggcacccaccttacagcctaatacctcggtaagctcctccaaatttgggacatccctaattggaatcaattcacttttctccaaattaatctttagcattgaatacgcctcaaaccacatgaagacccaacttaggggctcaagattttccttactagcatcacaaaatatgagagtatcatttgcaaagaacaaatgggagacttccactcctacatcatcatttcctttgactaggaatccctcaataaaaccacattcctttgccctagaaagcatgtaggagaggtctccatcactaagaaaaaaatagggagacaaagggtttccttgtctcaaccctctagagcttttgaataaacctgaaggattgccatttaccaagacagagaagcaggttgtagagatacaccatctaatacaacctaaccacttggagccaaaccccattttttccataactgtaaggacaaaaaatctaatttacgtttatgagccttttcaatccaacttgcttatgatttatcttaaattgtctctaattttggaatcaatggtttcatttgctatgaaaacaacatccaaaatttgtctccctctcacaaaggcatgttgaaaatccgagaccaatgtacccatcactcttttaagtctattagctagaaccttagctagaagcttgtataaatccccaactaagctaataggcctaaagtcctttaggtgtttggccccctttattaggcaacaatactaaaaaggtagcttttgaactcctgttaaaggatcttgactcatagaacgctctgaagaatcccataacctcacttttcatgaggatttttgatttgggtcgtgtggcgggaaagaaatgtaaggatttttgaggataaagcaaggaattcaaagtatctttgggattctattcatttccttgcttctctttgggctttttgttccaaggtttttaagggaactccccttaatgtgttacaacttgattggatagcggtgtgcaattccaaagggttggtctaatctagagagtttgtatgtttttactgtgtattttcttgtttttgtattcttgtagtttagttttctttggtgggaggattcctcatccttctcttgtacttttttttttctatcaatatatccctttgtcgtttcctatcaaaaaatgaaatcccaacatcgccaaaaagccaaggtaaagccatccagacctgaggtcttatcaccacacaagctagataaagctataaaaacctcatctttggtaaaaggaaactccaaggctgctgaacctacagatgacaatgagttaaaaaccagcccacctatactcgatctccactcccccacctcagaaagcatcgaaaggcatttgccaccccttctagtaaatcaccatttactcttaagttgtccaaaaaattcctcctttgggcattggccattttgtgaaaaaatcttatgtttttatccttttcttttagccacaactctcttgatttttgtctccacaaaatttcctccaacattgcccatttttgaaactcgtttaccacccctcttttaacctcatatttctctgttgttagggtcttttccctttcctttgcatcccacaaccctagctccaccaaagcctcaagttttttggtggaaacattactaaaaacatctttatttcatactttatgggcttgcttcaaggttttgagctttacaaccaaactgtgactgtaagacccctatacattgtacccctcctactagttcctaataaggtctttgaaaccttccacctttaatcacatattttcaaatttgaatgaagtctttctttccttgtcctttcaccatctaacatgattggtgcatgatcaaaggttggattttgcagggttctatggaccacgccattgaattgatcctttcaatcatcagaaatgagaaaacaacccaacctacaggctaaacaattgtttaacccaccacaccaagtaaacaaaccactagacaaggggagatctttaaggtgtaactcttcaataacctcctaaaagtgccttatggaagttgacattctttgacagtacctgctttgctccagaaatctcactacattaaagtccctacccacacaccaagggtcgctccggagacctctaatagcacttaactcagcccaaaagtcttccctctcctcaaccaaaataggcccataaaccctcgaaaacatccaaacagagttatccttagtttctgaaatgacatgaaactaagaatgcaccatgctccatcttaataagcttcagcacccgattatcctaaaaaaccacaatccccccttgcttggcccttagcatccaccgccccccagtccaagcacttacccacacctaggctcctcaccaaacaagctaacatctgttgaaccttcgtttcttgacgacaaacaagattggctgaatgcgaacatatcaaagacttaatggctttgcgcttgtcccccttattaatccctctaacattcaacgatagtatacgaagtttcattgacacactttggtcaattccccaaaacttttcctccctcttctcccaccagttgaatcgatcttgtaactaacagagcattctaatttctgtagctccttctcaaacttttttttttgataagcaagcatatatattaaaaaggcttaaaagccgcaaagcatacagggagtatacgaggcggctatggcctcacaaacaaaacacaaaacaacccaacccctaattggaggctaaccactccaagaatcctattagggaattcgactccatatcaatgtacactttagcccaaccccaaatattgtacacaaacgaagtttttaacttctgaaatgctaacacccccccttaaaagttagcctattcctcttcttccatattgtccaaaaaatgtatagcggaatggacttccacaattttttcctttttctccccacaaaagagcccttccagctacatagaaccttctttacagattctggaaagacccactgtacaccacacaacacaagaatgatatcccacaacccttttaccactgtacaatgaattaaaatatgattgatcgtttcctcttcacacccacacaagaaacatcggttagggaattgccaccctcttctctgcagcctatccaaagtgaggaccttcccccaagcagcttcccaagcaaaaaaagcaattttggttggaactttgtccacccaaacattgctatgagggaaatcagctccttcagaatttgccaacacactatacgctttcttaactttaaacagcccatcctctccttccttccaaaacaccgagtcttcctccaaagttactctatattccctcaactcaactaacagattgcccaccatacccaactctcaatcattaaagtcccttaacagccttatattccaccttccttgacccaaattctgatcccaatattcctccactgtgacattcctttgggcagccatggaaaagaggtccgggaagccttgggacagcacattattcccgcaccaaggatctgtccaaaaccttattttattgccttttcccaccttgaacaccatattttctcaacaccaagcagactccttcaagatctccttctaaactccaactccaaacaccccatttgccttccttgtcctccacccaaaatcctcttgcccatactttgcctcaagcacttttttccaaagctcctctttagcacgcgcaaatctccaaatccatttgcctagaagagctttgttcaaacaaacaagcttcattaaccccaaccctctcttttctttatccgcgcacaccacctcccatttgactaagtgtgctttgttccccccattggctcctccccacaaaaagtctctttgaagcttttcaagccttcttgccactgatttaggcatacggaataatgacatttgatacaagggaatgctggccagcgtactctttataagagtgattctccctcctttggacaaatattggcgtttccaaagggcaaacctcctcctcactttctcctccaccccatcccacgcggaagaggccttattggacgccccaaggggcagccccaaataaacagcaggcagctgtcccaccctacaccttatttcaacagccatctcatgcaccccttccacctcccttactggaatgaccatacttttatccagattaatctttaaccctgaggctgcttcaaaccaaaagaggatccagctcaaatacgtcaaaaactctttctttgcctcgcaaaatactattgtatcatccgcaaacagtaaatgagaaatattgacagcctgccctcttcctctccatatcctacaaccatagatgaaccccccttcaacggccctcgtgattagcacacttagaacttccattcccatgacaaataagtagggggaaagagggtccccttgccttagcccttttgaacttgaaaagaacccagctagtaccccattcaccagcactgagaacttggcagtggagatacaactccacatccatcctatccattttggcccaaatcccatcttttgcatgacctttagcaaaaattgccaattgatgctatcatacgccttctcaatgtccaatttacagattagacctttctctcccctcttttgccaagaatctattacctcgtttgcgattagggagccgtcaagaatctgtctccccttaataaaagcattctgatcagaagaaatcacctttcttatgacttttttaagtctgttggccagcaccttaaccaataatttatacaatcccccaagcaaactgataggcttatagtcacccaagtcctccacccctcctttcttcggtaacaagaccaaaaaggtatgatttaggctcttattgaaggagttctgttcatggaactccttgaacatatccaagacgtccttcttgacaatctcccaacatctttgccaaaaggccaccatgaatccgttcggacccggggctttgtccccattcatccccattaaggctgcataaatctctacctcagaaaatggaagctcaagagcttccgcttttgattggctgatctacttcaacaaaagaccccctatatccgccttccaacccgagttttccgagagaagctgttggtatgcatttgcaattccttccctcacttcttgttcctcagtaatcctgaccccatttatcttaattttatccagggcattgactctcctgcgggcatcggccatacggtggaaaaaccctgtgttcctatccccttcccttagacataattcccttgatagctgtctccagtgcacttcttccatcgacacccactttgcataattctccttggcttcctttttgtgacctaattcctcctttgttaagcttctctcttcttccactaaatcccaacgctccacctgctgaagagcttcagctttgtttctctccaatcttccaaaaacctccttgttccaaatttttaaattttgtttcaatcccttcagtttagctgctaacctgtagctcggcctgcctctaaccactatcccttgccaccacccctttatcaggtctttgaaccctttagctttgagccacatattttcaaatttgaaaagggaaggacctctccttagccctcccccctcaagcagaacctggaagtgatccgatgttgggcgggacagtcttctttgatgcaccctactgtattggtctagccaactgggagtcgctaggaacctatccaacctggcccacgattgattattggtagctccttctcaaacttagagccaccaactttagacttttttgtcccttgcctcacggtcttctcttttgttctcaattctagttttttcaaaaggcccaaaatttccttttcaaacccatcccattggaagccccaaaagtttgttgaaggacactagtatgctgaaattaccttgagagcaagatgggtcccatcatcaatcctttgggatgccaccctttaccaaagtgaaaggctcttcctcctccccaactaaaaaactgggctcaaagccattgcaattagactggaagttcaccgacgaccattcttaaagatcatagaaagagggccacttctacccccttcttctagagatggggacttactttccatcatcaccaagtctccctagcaaattcaccccacatcatgacgagcctccctgacatgagccccgaaaaaaggagtagaagagaaagacccataccccaagtaggaagaaacaagattcatcgtagcttggaaaagagcggcttctaccaccaatgcttcatcaaaggaagggagagcatcccccgatgaacacccgcgaggcccttctactagtgtctccccccacttagggcaaagagcagccccacaaggagaagggggattaagctgggctttagtcccaaacttctccactacattcagagaaagtattcccttctagatggaggagaatccttttaaaaagaaagggcaattcccttcataactttcttgtaaaatacacatcaatattcatggaaaaagattcagtgaaaatataagcattatttcactgtacacaatttttctaggctcttgtccctgtaaaaatgtgattttctcactacttgtttaagtttattgtgcatagaaacttacagtagtataatattttttttctttgtcattttaagtggtactgtgatatcatggtggctgtttgactttgaatttaatactttttaggttttgtattcctggcctctggtacctctgaaagtgattagaatgtgatatgtgccttttccccgtcctgatgtttagctagtaatattggacatgtgctgagctgttgagtgtttacttctcagtgcattgttcgtgcaactgttatcggttttgctgg

SEQ ID NO: 11722 - DNA, 13908 bp, Vitis vinifera
  Intron number 2 from transcript GSVIVT01011328001 (locus G SVIVG01011328001) derived from phytozome v7.0 (chr-ID chr1 5; pos 8543540 to 8557447 reverse strand)
ggtaagacaatgactgtatgttgatttcttgttttattttttatttttttttccctaagtaagcttacctgcactgtgacttctattctgagtgcttttaaagtagaagaccaagttattctaatgattactactcaaaaagtgctatttcatagcttgtaattaactcttttaaacacttttgagtagtagttatcaccttttaacccaattaacatattaaggacccttgcaatcaattctaatcaaattgtgttaagttttggtgttttgatagcttttttatcaccaaagcaatcagagattgaggagagttctttggaatccatggcaaagatgtccgaacagggtgtccggacacaccatcggagggcggcggaaaggcttgctcactttagtcaatgatccggacaacatatccggataggatatgctatcgttcgggtgtgacgttcacgagtgccggatagcatggcggcgcgtatcctcttggggaatccagatgaagttgagccggatgggtccttacaccttacacacacagacggtcccccttgcgacgtccggatatctcatccgaaattatgtccggtcagacatgtccggatcctttgatcggatattttacatccggatatctcacagtcggatgggagaggaggacgtttcaacttctccggtcagacttatccggatcctctgatagcgcttaccaggagagtttttctctcagtatacagtgccacggtgttctcttgaagcttcttgatatttccgaccgacatcctaagatattttgctttagatatttgttgtctaaatccccaaagtcttcttgtaacccacctatcttaggattccttagtctttaagtaagtacaaagggtgaataacctcatataaaaagtttgcaatcttctttacaaaaagaattattatgtaataagcggagggaagaaatataattcacagagcacttgctctgtttttccttcatataattgttttctcgttagttttcttactagccaaacaagctctgaggaagtttcctcagagaatgagtggctagacttttagttccttggagttaaggttgccgagaaaggttccaagtgcaagaattagtagctttgtggtttcagtcattaatgaagagaaagtgtgatactttaatgatttctatgtttttagttaacttaaaacaccttcaagtcacttgagccaacacttggtaagacacgtgatctccgtccatagagatgcacttgtttatctcttgcgagcttttgggaagtgacttggaggtaggattttctagaattgccaacacttggtaagctttttgactccaaggagacatccattagttatctcttgcgagcttgagaagagaagtccaaagttaaagatcaccttgaatggcaaatgctaggtgagaagcacgagccattgcaagttgcatcagtgagagggaattagagcttaaattcatttaaaggttacatctgtacaacaccggttagagaattgactatatgttaattctctaatgcaaggaaatgaaccaaatgaccagagctctatttttgcataagaaacctcccctgtgaacctaaacctccaaggaatgtttttcttcataagtaatttccattactttctttttagctagctttaaacaaaacctcatttaaacaaagtttgtgttttatttcttaagctaaccttgaaatgaaaaagcaccaatttaactttgaattggtatcagttgagagttgaaaacccttcccaatgaacgatcctagagccactatgctatattagctaagctatcctaatgcatggtgatataggttataaattttgttgattactctctcaatcaaagagcaccagttggacatgaatcagctgagacaccaattgggaacgaatcatctaagtattgctaataatttctagttagttgaactaaatgtatataagtatgctttctcataattccatacaaaaaagaacttataagttgtatattttagattcaatcgattagccccagttttcctaaatgatcaaccctcaattacagtttattcataaaattataaaaggaattattcttgttgacactctgatttaaacattagtttgaacttggatagaatcaacttcaaattgctagtcttgaagtgaaacatttcaaacgccttcaaaatataatagctaccagtgttgattttttattataaagagatgttaaaatatgtctatttgtaattttcacatgcaagtgtgaagtgtgacagctttaaacatgaagaataagtgtttttctttacatttcgaccttatcttttaaattaacatgttatttattgactttttaataagtttgggggccaaatgttgctccttaacaaatttagacaacaaagtgttgaattttgaatgtaagagaataaaatataaaacacatcaaatgttgaagaaaaaaaaagttagaagaataagaaaaagaagtaaaaggttgaaagggtaaagtgtattcaatccaaaaaattaaaaagatcacatgagaaaaattttaaacttaataccaaaatttacaaaaaaaaattaaatatgtttttcaagtcttattggtaaaagaggagaagaagaagaagaagaagaagacggatttcaagtttcattagtaaagagaagaaggaaaaaaaatgatgatgatgatgaaattgtgatgggacttgtgttaaaattttatgatggtgaaattgtgatggtagacttgtactagaattttatacttttttcaagtctcatttctaaaggggatttgttaagtctgtcatctatacttgattcacttgagccctaaaagaagaaaaaaaaaaaaaaactctttcatagaagaccaccaccttgttaggtaaaatccaatctctataaatctctccacaaattataatcaactacataaagcaaatctcatcggatcatcttgattataagatcatttgtagtattcttgagtagtcacttaataagtatttactcggttttagaatttatatgttgtgtcttttgattaaaccttgtagcttctttatataattctgtaaaaaagatgcataacatgagctttctcgtttcacaaaatccttttatgatattagggcatcaagccaaaaccaaaaaatatccattatgactaaagaaatttctacaaacaagcaagttgcctttatcacttaatccttccaatttcatatccataaatgtcattatccaacccttttgaaacttacatctccaaaccatccaccatggtgggctcaattcaattccttgctctttggttatcatctaataggctatttaaatttgtcaaaaaaatttctatccaaatgattgtaggtaatggaacatgtttagtgaatcaagcctacattcattaagtgatcaagaccacccttgctttaacctacatttgccacattatttgaactagtaatgcctttgattgcatatacacaaactacacgtgaagtgttgaataaattatcccaggtacatgcaaatcgctcttgctctagggtaatattccatctcaatgagtgcataaatctagtaatcccacagcctatggaccaaaagtattgtctaagtagcttcaaatgaataagagtatggagaatgatgctctgttgcctagatatgatcttaggaagagatctaagattgacttaattgaatttgattcaaggtggagatttttaggaagtgtctcaaattctaaccaggaaatgtttctttttgtaaaaagaatatcatataaaatatttcctaagtttatatgttattgtaattaggttccttacagaataaggaaaactagtaggaatatctttataaatattataagtcatgaaaggaaaaaattatgagagagaaatgaatttgtgaggctatatgaggtggatagaaatgtgagcaagagagaggaacactcggtggaataagagggctcaccaagatgtagatgtgaataagaatgagagattcctagtggaatgaaagaacttgtggttttgggaggagatatacaaagagtaaggaaaaatggaatgtcttaggacctaatagttgtatctatttttgtcatatgtaattctctatcatataatggaatgttctctcttatctatggtgatagatatggttgatcaaaccatgttaaaaactcgtgtattttatgcatggtttcctttatttttgtatttttccattaatatgtttatattaatgcttccattggcacaacaagttgtattagagcttcttcatattcaacaattgtatcataactttggttgaagatgtctaggggagctttgattgaagattctagaaaaatcttggttgaagatgtttagaaaagccttggttaaagatgtatggaagagttttggaagagtgaagaataataaaacataaatggggattacaaaaaggaacttggttatgatagaatgtgatacaagaatattgtggcacacgacaaaactgtggtgcacgaaggtaactatagcacatgagaagagcaaggtgcactaaaaaaatcatagataatgaagatccaatattgacttaatggaatttgattcaagtttgagattcatgggaagtgtcttaaattcttaattagaatatgtttttttttttttttttgtgaaaggaatgttatgtagaatatttcctaagtttatatatgattgtaattagattccttgtagaataaggaaagctagtaggaacatcaccataaatattttaagtaattaggggaaaagttatgagatagagatgaacttgtgaggctatatgaggtgaatagaaatatgaggaagagtggaagacactcggtggagcaagagggctcactagggtatagatgttaggaagagcaaaagacacctaatggagtaaaagagttcatagttcagtgtagaaatacaaagagtaggggaaagtaagatgttttaggacctaatagttgtacctatttctatcctttgtaatattttctatcatataatagaatgttctctctcaccgatggaggtatgtatagttggttgaactacattaaaacctctatatcttcatatataattttcttttatttttgtgttctttcattaatatgtttatattgaagcttccactgacataacaaatggtatcagagcttttgttgatgatatttagaagaactttgtttattagagccaaaatctgtgctccaatgtcacatatatgatatgatttatatatgcaatataaaaagctcaaattatctaacttaacttaaattgatgctaagaccctaattatggatctaacttctattttaaacctacttacatgtttaagggatgaaaagaatgctaagtgcaaaagtcattgttaaccaaggaagtaaaaagagttcaatataattaaatactcatgaaacatgaggaaagacaaaataaggatgacatgaacttgaaagatgaggaataaccattatgaagtaaaaaaaaaaaaaaaaaaggcatgcaaatatggaaaataaggcatgaagcaaaatccatcaagttcacatggaaatttgaaactcaaaatctaacaacagcatatacttttattttgaagtaaaatctggaatactttcccaaggttaattttagtcaaactatatatcatttcgaagtttttgaagttgagagtttaatgctttaaacaatagatgaattagaggtgaaatgagaaagttatgcatgtttgaaatgaattgtgcaaagaataatgctaagttcgaaattgagaacctaaattcaaaatggtttttggttatttaaaattcaaaggaatgcaaggagacttttgtcaaaggttgagtccaaatcgccccacctatttcaaataagaggcacacattttgaactagaaaacatggtgaactttaataggcagtgggtaagttcaaaattcattgtgaatttcaaactcaccatggtgattttgaattagacctttttcctacaattgtgagttcgaatttgatttggaattcacttaaattttaaactcaaccactgatgatcgagttttgagctctaaaacacatcgaaacgagttccaaatgcccatccaattcaaaaatgcattatactcatttagaactcataatatttgaagtttttttaagttgtttatgacttttctttataataagtggctaaggggagtgcactacatgttaggctattgattttactatataaactctcttagttctagggtttaggagtcctaattcagagttttgatgttgtaggtggaggaagacaatgactttggtttatttcctttttttctaatacattagctttatttttttattcaaattatggatttttactctattatggattgtgaatgtgacatcacccccataagaggttaaaaagccaatttggggcttgaaacatgaaaacctaagggttagaaacttaaaggaataataggttataacattgagatatagtagattattacccaatattagtgattcttaataactcttaatcattaattatctcaattttccctattgttatctactccaaaataaactacaaagagtacgaagagttataaagttaaagtttgaatagataatcaatctcgtttatttgataattttaggaattggtttagaaaaggaaaaattaggttttagatgcaattataagttataaagctcagattgattgtgagcaaccaaatatcccaaagccctaagatcatcctacataagaaacccttgttctctcttgtttctatacttgaagttggatttgttgggattaagcccctaaaagcaagacatgatgtaacaaagttaaacttaactgtccccatgctatccttttggtgtattggctttaatttgatcattcaacccatgtctcttacattgtacatgacttggtgcattaggagttgtacaaaagatataagtcatgggttccttgtaagtagataagatgtctatagttggttaatggatttgggcaatctagtggagactgtagtgtaccacatcctaattaaagggatgggtttcccatggtgagtgcactagtgtatgtaatgcacattagacaagacctacggtgaatcatggcacaaggctatcaattgtcatgattcaccaagttactatattgcatggactctcaaccttaagaggatattaagtttgtgccaaaatcaagatgaggctttgacctatgagtgagatcctaaagtggtcatatatccctatggatttggtcactattgatggaagttggtagcaataagtattctcaatagaggtaccatgatatctcatgggattgagacaatgtgtccccttgggtgatccaaaagacatgtgatcatgaaatttatggccacagtaattcatttagtaaaatttgacatatgctccttagaactagagtatgtcaattaatcacataataagtgaggtctgtaatttaaggatttgagaggtaatcttgataggtgatagcactaccttgttagattatggacaccagttcataagaagtctgcatgcagtaaatagtaagtcagggatctaagtatttggtgtctcgtaatatacatagggtactagagtgtagttgactctctatagtaggatattgagtcaatttcaaaatttgattctaaggaagccagtactcctatggggtcccaatggtccctgctttgaactcatattccttaatgacacagtttatgagggttggatgggtttttagttcacttttatgcataaaggcattttagtaattatgcaaggttgcataaggatgagtgagtggcatctatagactgggttaaatgattaattaaggccttgtatggttaattaatcatagcaacctttttggggtagattaagtgacctaagcccatggtgagcttaagttacttaagcctagtagaaagcctataaatacccatttaagggttcaggtttctatgtcttttcattttcgtcctatagtccaaatagagaaccctagtcttcacccttgaggtctctaccatttcattgcctaaacacaaggaaaatcatcagatcttgggtttatgagaatcacattagaatcacacaggccgtaagcatgagaaccatataggatacacataggtcgcgtgcataggaattgcacgggatgtgcacaagccacctgcatgggaatcttacaggacgtacacatgggtagcaccatgaggagagattctcctatttttctaggcatgttctttactacaaagaattgatctaggaacatctaaatccaagtatgagcacttttcctctaaatctttatcctaatatggtttttcaaggtattcttttccactacgttagatttagagagccctagggatagatgcatgcaccctacaagatccagggcatgggaatgaagtaatccaaggttcctaaaaggattatggaaaaaaaaataaacttgaatcatctgaattaaaaatcaatatttaaattgctattagtttatttttctttatttaactctatgtcataaaaaaatagtacattttaggacttaagtaaaagcaactcatttgacctattattgacaatttccataagcttatccctgagctactacaaatgtcatagtagttatttctctggtttttcttacacaaagctattgtgtatttaggcttaagtattttggtacaacaaagaaaaccaaattagttatttgaagatttcaagaagagtaaattaagaaaataaatcatagaagaggattacaaaagaaattttagttaagagtgaagtcaattttttctctcaatagtgataaaataagcaaagggatagtggcataaaacaagacaattgtacacaaagggaacagtagcacacaaggaggacgtgcctaagaaaaccatagatcatggacaaatggaagattgacttaatagaatttgacctaaggtggagattgttggaaagtatctcaaattcctaattttgtctataaatattctaggtcaagaggactatatggagtggataaagatatgaggaagagtgagagatagccaatagagcaagagagctcaccaagttgtggatatgaggaagagtgagaaacacctagtggggcaaaaggtcttgtggttcaaggtagagatatgaatagtaagtaaacataacatatttcaaaacctaatagttgtatctatttttctcctctaggatgttctctaacatatggtaaaaggtcatgcctacctcatccataaaggtaggtatggttggtcaaaccacgataagaccttgtgaacctttcttggtggtttgtttcatttttgtgttctttccttaatctatttatattaatgcttccattagcacaaagagttatgttagatcttctacatactcaacaaagacatgatcaactctttaacatcaagcatccttgccaatgttaggataaagcccttaaaagtatgacatgatgcaactataatggatttattatttaataataagtttcatgtttaccttttccatcttatccatgtattataccttttgagcattttggcctaacatatcttgcattgttcttgaattagatgcattaagagttccacaaaaaatctaaatgttgggttccttataaatggatgattactttacaattgatttatggacttaggcaatccatttgaggctatagtgtactacctcctaattagaaggatgactagtcttggtcatctggatggggcttccatggtgattacactagtatccaaggttatacattggatatgacatatggtgagtcatgaaattggctatcaagtagtcatgatctcatcaagctattatattatatgatttctcaaccttgagaggatacactacttatgttaaagtttgtagtgactttgactatgggtgagaccctaaggtggtcatatattccctatagattgggtcactattgatggaggctggtggtaataggtattcttaatagaggcatgatgatatctcatgggattgagatagtgtatccccttagatgatcctaaggacatatgttcaataaatttatggttatagtagttccttaattggaatttaacatatgatttttatgagctaaattttgtcaattaatcacataatataaggatatgagactcaagaattgtagaggtaattttgagaggttgataacatttatattgtaatatacaaacatcaattcatttggagtctgcatactgtggataatagtccatggactggagtttttatatcttattataattacacatgatgctagagtgtagttgactttctatagtggaatgttgattcaacttcaaaattagattatgaagagctatcattttcttatgagtcttagtggtccctaattgagtttagttttcatggcaacacatcttatgagggttagttgtgttctttgttcacttgtgtgcataagggtggtttggtaaatacataaggtttcttaggagcttgtgaatgatttctctaaattaggttaattatttaatcaaagtccaataagactaattaatcaattaggacccatgtaggctaatttcagtaacctaaacccaagatgagatcaagttacataagctcacagaaagcctatataaaccccctttaggggtttagagcttcatttttgccactcttgcctccaaatctccaaagaaaaacaaaacctaaccattataaggaatgcttgaattgctctattatttgcccaacatcttagaagattcattcaactaatcctattgccctctagatttatgtatagcaaaacattcaaaaacctagatctagagattaggtgtttaaccttagatccagatattcctagatcaattctaatgtggtgaagaggctttataagtgtcgtaggtttcgtaaatggaacaactttccacttaatcatacattctcataaatttaaacactagagaatggtagtcttctctctaaaggaggaggctagggtttctctctagagtctaaaaaaataaaagcatagaatgaagccctaaatatatgcttccctatgggcttaagtgatttgaactagatttgggcttggatcatttaatctaactcacttaggtcctaattaatttattagccttattgggctcaaattaattaattaacctagtccaaaaaggtcatttataagatcctatgcaactttccatttttaccaaaacacttttatgcacacatatttattaagaacccaaaattttctttaaaaaatatactatcatgaattaagagctcaaatagggataattgagacctataggaaaatcttagctccttcataatctaattctaaagttgacttaacatcccactacaaagagtcaatagcactccaataccctatgatattacaatgagatacaatttagatctatgacctactatcaactgcatgcaaactccccatgaacttgtgatcacaatctaatgagatagatgctatcaatttctcaagattacctctctaatccttgagttatagttcatcctattaagtgatcaactaacatactttaactcatagagcatatgtccaattctaattaaggaattactatagtcatatttttccttatcacatgtctttaggatcacacacggggacacgttgtcttagacctagagatattatggtgccttaataaaaaatacttgttgccacctaacttaatcaacaatgactcaatccataaggaatacttcaataacattaatttaaatggaaagttgaaaggacaccacattttaaaagtctataagagatttatgagataacaaaagatcaaaacaatatatctaactctcctttgtctttttacaaattatgaaccaatcaattataaagaagcaattctatcctacaaatgaggaagtaaaagaaataagaaagaatgatgcatgagaaataaaaagtgttttttataagctaaaataattaccaagagtatggaataatagaattgacaaatatttttaagataataattttattaaatgtgctcatgaacatactctctacataaaggtgaatgagaaggtatatattacttgtctatttgtttgtggatgacctaatcttctttggaaataattcaattatgtttgatgagtttaaagaagtaagggtcgagagtttgggatgattgatattggtatcatgtcattctaacttaagtgaaaaaaccaaaaaggatgtttttatttttcaaaaaggttatgtataaaaaaatggagaagtttgacatgaatatatgcaatctggtgtacccatcaatagaatgtagagttaaattgtcaagacatgtagaaggagaaaaggcggatcaaatacaatacaaaagttgagttagaagcttatgctatttgacttgtacaaggcatgacatttctttggatatagtgatagtgatagtagtagggccaaagacttagatgatgaaaagagcactactggctagtgtttttttataggagatagtacattcacttagagattaaaagatatatatacatatatattgtgacactttcaacttgtgaagtgaaatttgtttcaaaaacatcatgtgtatgtcatgtaatttgactccaaaatttgttgaaagagctcaatttgtcataataggaaccaataaaatagaaaacaaattagcattgcattatcaaaaaatctagttttcttaagcaagtacattgatacaagatatcttttattattgagtgcattataaagaaattagtgcaattaaaatttgtaaaattttaagatcaaattatggataattttttaccaatcaagtttaaggaagcatgttggaaagttaaacttgatttagaaagtttttaaaatttagaattagatgtagacaatacaagtcaaaaagaatattttattttgagtagttattttaatttctatatttgaataatctaatcatagaacatttatatattttattattagtatttcttattttgttaagtgtaaatatttataaataaaatattatatgatatttgaataagagagcagtggaagatagtaaatttccaattttacctttctttatgtaattgtttatatttcccatttaaccctaatactctagtagagacatccttgtcttctgtcactgagacaattatgaatttgtctttcttgtgaccatgttaatatattcactcaaacttgtgaagcccaatagtctaaatttcctcccttttttattgtcatggtttagcaatagagaaaagttcaactgattttgaaatccccttcctcatctagtgattatcattacatgtacactatatagcctccttaatacaagtactcatagatttaacatgatggcaaactaattatttatcttcttcatcttgtcattaaaaaggaaactttggttatcttaccatatcaaatttaatggtgaattgacaaccttctctatatcttctttgattattttgactttccagtctttcaaaatgaatcttagggtttgagattagtccttttaagtcaatgaacatataataaggggacataaatttcagcttgaaggtatggtttatgtactttatatttgagaatcatcctaactacatttttcttcgattgtagaatcaggtcaattatttgtcttaat

SEQ ID NO: 11723 - DNA, 1673 bp, Vitis vinifera
  Intron number 29 from transcript GSVIVT01003951001 (locus GSVIVG01003951001) derived from phytozome v7.0 (chr-ID chr Un; pos 13997781 to 13999453)
ggttctgctcttgttgtgggcactactcccataaggtagtcttaaccctctttttctgcatttaatttatgtgggttcttgccctatttaaatgcgtatctgctattttttttttagtttggctactgtttagttgctcataaattgaggacacaggtgttttggtttctaattatcaatgcgcaactgcatttaacccaaagaacataagctgtttggttgatgtcccgcgctaattctgcttcattttttcccaaattttttatctgggtttttgatagctgtcatctggctaccaaatttaaattggtatcttctagttttattggtggcttccgtttggttgctgaggatacggaggaatggagacggcaaattttgaatcttttgtcctctatacttcggtttgaaagcataaaatcctttagccaaagaactatccctgcgaagtttcatgctaattctcccttatttgtttgattctctgaaattatcagttaaaaattgaagtaggtattacatttttttcctcccctttgcctttgttttgttgttgagaaaatggaggcaaatagctgaaatgaaaatcctgatttagtcccttacttgtttcagaacaaatagactattgactcaaataatgcacaatctttagagtaaaaaatttcagtacgtttgttcttgcatcctcagcaatcattgttaccattgggtcttcattttgtttatactttagtgcatttgatattcgatccatttttcaaggtgtcacctcatgggcagttccaatatccatagagcaacaatttataatactcatttgcagaataattacttgcttgtgtaaattaatatttaatattttttatgtgtttgtcaatcaattctcacatataggcactcttgcttttgagcatagcactttcttcaagtcaacccagtttcagctttagcaagctatagcctgagtagtttccattgtttatgtttattagtcatctgtgatgttatatgcctgtcaagatgcctcttgagccggttgccctatggaaagtggctgcttttaatttttgtcttccagattttatctcttggttagtataacatggttggatgtcccaaattgctaggaaatgtctgtaacctaagaaattctgtcatttgttgcactcttctaggtgtaatagtgctgttgcagtatccataaattgcctgttccttaaggtaaagaaaatcaccaaggaataaatggatagggacactttttactgagcaggtttgcaggtgatatttctgtaatctcaagtattgccttaagtcaatgatttatggatctactttatgggttctgcttatcatggttaactgtgatgaagctcactattatccttgtgacttacattatcatgaataagtgtcttttcagagtatggagttgcttttctcttgagttttgattttcttctgtgaactttcatgtcttgttcactactttttataatggctggtctggtgtccatctttatatatgaccatctttcttctttgtcctacatataggtttctgtccaacactatatcctgaaatctgtttgatttatgtgtcataacatcaattaactcataaattgtttacagggaaatatacaagtttcaacagtcaacccaagaga

SEQ ID NO: 11724 - DNA, 6240 bp, Vitis vinifera
  Intron number 1 from transcript GSVIVT01011387001 (locus G SVIVG01011387001) derived from phytozome v7.0 (chr-ID chr1 4; pos 29255441 to 29261680)
ccagtgggcttagtttcgaagaactgtacaggttcgctattaaatattgtttttgatcgaatatatagtttaatttgtgtgttttttttgtattatttagattgttcattttgtcattttctgttaattacttcgggatttcatatgattggggttgtttccttttgttggtttctattgatcctttttttttcattatctgttatgcgaatcgattagtttttcaatttctgggatactatgatcatatgctgatcatgattgaatgagtttctttgcacgagtgttctgtatgtttctctatttatttgttttaacgataattccatcttctaaatctgcggatgttggctttaagctctgtgcttgcacttatttctatatttaggatggttaagagtgcatagttctggccaaaataatgaacatggagatgaacgaataatgacaagagttgggttttagaacctgttgaatgttatgcctaacttgagtcagcttgtttatcacttatggagaaccctttcttcttctccacaagagcaacgaatgaatagtactcaaatatgattaattcatgggattgacccaaaagtatcccattgtgtgttaaatagcagttcttgcaactcggctaatgttccatgctggagaagtagcaaattgatatgggatgcatttgtattacctccataaatcgatcattcgaagagatatgccagtatagcttcagtggatttagtaggaatgagattctatggccaattaagtatcttaagagtgaagcttgcctaaccgcataagtaggaccaagagctcaggaaaagctatgacttgtgagcagagggtggctatagatgtatggtaaatatacccaatggcagtgggatctgattcaattttgttaactcaaaaaaactgaagagtgatgtctaaaaaactagatgtgagcagcattggatcatggagcaagttgggcatcaatggactctttcatgagtataactgagatgaggatcttgagatttttttttctttttttgattactgaggaactttccacgaccaagcccttaggactgagatgaggatcttgagatatgaatggaaaaacttagaaaagacaaaatcctaaaagagcatattttggaaaatttaaaactatggttgcaagtttattttcaaagaagtccctttactatttactctccaacctccatatgtatagcaatattaacatatgtgataatgttttgggaattacgagctttgaatcatataaactatgatattagtattataattctcatcataagagttactaataccataatcctgatcacaaatggataatttggaaggaacgaaatcaaagaacttttgaaggggaacaacgcactatccaagccctaaaagattccttcataactaatctgtatatgtggtctcgaggtctccttttaggagacaggcaagaaggcccaacctctttattagattttataggatgggcgggctcttctttttaaagtgggtttgtagctactataactggttttttgtttctcatttgtatactcccggtatactatatttgccactttagtttggcatcctttttatagttattaatatacatactattatttgcctataaaaaataaaaataaaaatcttgatcacaaatattaaaaatgatgtacaaatttacaacaaattccaattaaaagaaatgaattatatctaaataaaacaaatgttggagttgctcatcaacatgtgaaactgtttactttatttttttgatgggtaaataagagcttgtattagaaacgcctagaagcggcgaaacagtacacacaaactataaaaataaacgcccaagaaactaggcatgaaactgtttactttataaaattacaatcttataggagttcaatttgagaaaactcaaaggaaacagttttcaacaggaaccagttttcttgctccatttgttatctcttatttatgtctagtttgggacaacttttatttttttagctttaactagaagttaaagtttaagttgaagccataatttgaagggttaatcttgatgcttctaaagttttaccaaatgtaaactgcttttttgcctaaggtaaaaggaagattccgtgagaagcaatattgtctttgcttctctattaagcattttttcgaggtagaaatactttttattaaaattacccaaaaatagataaaagcttttattgaacttaaaaaaagcttttggcttctaaaaggccaatccaaataatcttagtatcttgaaaactcaagtaagatgctattgttcttcttatcaaatgcacttatgtaatgtccttatatcttttactacttataaatttattatattattttttggcagaaaaattgtatgttgcacatgcatagcttgtgcttgtactatatataaaatcaatgctactcttatctagacaaaaagctactctataaaatcaatcatggacaaagtatgatcctctaaatacaccctagcccaattcacaaatgtatgaaaaaaaaaaaaaattgttttaaagttggctcagaccatttaatatcattgaccactctttcatttctttccttccataaggtccatattaagcataggggggcaaccctccatgctttctccctttgcttgctcacaaaagctccatgccgacttagcaaattccttttaattgaggagtgcaagacccactgcacaccaaaaaaagagaaaatcaaactccaaagcattgtagccttcttacaaaaaagaatcaagtggtcactggtttcctctttctctttgcacaagtaacgcctattcggcatattccatccccttgctcacacaaggttttttgtctttcttttcacctagcttcttgggtgatgtttgtatatttcgtgtgtacagctttcgctgcctctaggcgtttctaatacaagctctaatttgcctataaaaaaaaaataaaaacaatgctactctcttatagtattttctacaaagatttttttccctctttttggtaagaaaattaggcaagtgtaaatttttttttaatagatgaacagaaaatctattaaaggcgtctaacaaaaaaggggcataccctatgtacacaaagggatatgcaagaggccttgaagaaagaaagtacacactcatatctcaataaaaaatagtaaattatatcttataactcttgttatccacaatttagactatctatgaagtccaacaatttacatagttctattgatagacacataacagaaaatgggggacaaccctagcacataggagtatacaaagggcctttaatgactaaaggaaaagaaattcatgtagaagtataatgccatagtgatctcattgttaaaataaataaataataaagaagactatgaaagagatgaaagagtcaaagtataaactataaaatatatgatattatattaatttcatacgtataaaatttcaaagaatctgtaaagatattaatttttctcgatgtcacaaatagggatacaagaataagatcggttgctggaatgaggaggtatttcagatagactggtttcaggaaagggaattatttactctccatgttgcagttccctctggtctgttcctgggttgggttaggggagcatccatttgccttcgtgggtccaaatgcactcacaaggctcaccataaaaataagaccaataaagacttaagaagggaccatttgagctgcaggtagcaatactcctagaaaggactgtagattgggttttaacctaattaagactagaaggacctcattacattggatagtgattttgagaggttggacgtgattgtgttctttgactgttatcaaaatcttacctatcaaaaaaaaaaaaaaaaacaaacaaaaaaaaaaccttctctttcaaaatcttgtcaaagccctacaacccaaagaaaagctggtgctgaaaaggaaccagcccagcctctgtaagaaagctttgtttgcttcatgggcactgcctattcacttagacaatgctctgaagatgaaagggtgcagccgaatgggctagtcaaccctttttcttgctgtttaagaacccaacaagacatgaactgcaagaggcagagctcgaaggaacgagacatctattacacaaattacttgctggttctgaccaccatagattcaaggttcactgttgggccaattgattaaagatttttcttacccaagcggttttacttaaagcaagtaaacaagttcccttgtaagtgacatcgcttttcgttactcctttccaaagaaggttgctcatccagtccaaataaaaatgcgacataccattttgtctattggggaagcattctggggaaactattaggagaattgatcattttccatatgtatgtgtgtgtatatgcatacattattttttgataggcatgtatatggatacattatgcatagaaggctcttataacataggaaaaaaattaaaattagaagccatggacacaggaaatgattcaacttttgttcttctcactttagtgcccttgcattttacgtaaaaaaaaatatcatgagaacaacatatgcatttctggcagtctgctcaggtaagacggctgctcaaaaaactgaaccaaatcagacctattgctggtcgaccgtcaaccagtaaaactggctggtccagtccagcacattggataaatgctagatgttgtcctacgaaacacatttgacgatccatggagatagatgacttgtgcgagttatgaacatttaattgtattctaatgatccatggagccagagttggcctttgtgagtttggagaatataggtgcctctttactaccttgacaagaaaggataactaaggtggtcgatctccttctacttagttctcataggatctgtatcagaaagtcaacctgttcatcttggaggagtaaggtgatcaggtccttttcctttgtgtttgccctaatcttatccacttctcatgggctgtcacgaagttcaagcttctacacagttaggctacagaccttcctttagtgtaggtaggagatgaaggcatgggatgtagggggatcatgtcatcactcaagacttcaggatcatgcactttatgaaaagtggcatttgatgattagtcaccatgttcttgagaacctacaagtgatgctattgtacatggctatttttctagactatgtggcatagtgaaagagacaccaacatgatataattcttcagctagctcattcagtgatcatgcacttctacgttctcatgttgtaacttgtaagaccactataatatagtcacaaagaatgaaataaactagattaaatatagaaaaggcataacctgacttcttatttgttgttatgaggtatgtgtgtgttactttaagatatggttgatacctggttttgatttaaactgataacatttatttttgtgtgtgtggtttttttttttccttcttttacacttcttctgttacatggacttgaacttgaaacctctcttatccctaccccaacctcttgccacttgagttaggcttcatgggtgagaagtgagaacgtcatcatattcctctttttccaaaatttgggagcatttgaagtcaacggcatttatagccctagattttctgatacctttggagatgtgcccactattaacaatagtcattatttgaatgtataagaaatacaaaagtaagaaaggaaaagatgtaataactgtggaaaagaggaaaatattatatgcattaaaaacaaaattacttaaagatttactcaaattgtagataccagctccttaaagcctatctagaaaaagaaaaagatcagctaaaaccttaaagtttctagagtttcttctttgcctcttttttttatagggtttacatttcttccaatttgccccattctcgtcaattctattcatttctacatataatatgttataatgagatccccaaatctcatctgatcaaaccacagattagcctctctcagacttggttcattgcaaatgtctacctggtttttgggtttgaattttcgggtttgaggcatatccatttcgggcctggtaggtgttttagaactggagaagatgagtgctccaaagaggaattttcaaataggaccattga

SEQ ID NO: 11725 - DNA, 11383 bp, Vitis vinifera
  Intron number 7 from transcript GSVIVT01036631001 (locus G SVIVG01036631001) derived from phytozome v7.0 (chr-ID chr1 3; pos 19446345 to 19457727 reverse strand)
ggacgtgcaatcaacttcttcgtcgtctgtcaaaggttgttttaatataccttaacttattttcaaatattccattttaattggtgtcagtatcgctaggctgctagcaaggttttaatgcacctctctgcaaaggtgcatttaaataaaatattgggcatagtcattgtctgctaggtgtctagtttctaacatgtaggcatcattgtgatacatatcctaggacttaaaatcatataaacagctgaagaatagggtttcacgggaataatattctttcattgagattattcttttatggagtttagagcatatacaaatccttcaaattaggaaactaaatcactgattaaaaggaaagaataactcctaacaattactttcctaaaaatacaaagattgacaactaataaataatttacagctttacaaagttatttctttccatatcagtttcggttttccaacactccccctcaagctggcttaaagatatcttccatacccagcttgccaactagaaaatcgaattgcctcttgtgtagtcctttggtgaagacatcaaccacttgttcttcagtagggatataggtcatacagaccaatccattgtctatcttctctttaatgaaatgcttgtccacttccacatgtttggtgcggtcatggagaatcggattgtgagctactgaaattactgctttgttgtcacaatacaacttcataagagatgaacctgtcatctttaactcttccagtaatcttcttatccacataatctcacaaataccatgagctacagctctaaactcagcctcaacactacttctagcaaccacgttctgtttttttacttcgccacgtaaccaagttgccacctacaaatgaacagtacccagaggtggaccttcgatccactatgcttccagcccagtctacatcggtgtatgtttcaatttgtaggtgtcctcgtgacttgaactaaagacctctacctggtgtcccctttagataccttagaatcctgtaaacagcttcaaaatgctctggtctaggcgcatgcataaactgactaaccatactcactgagaatgctatgtcagggcgtgtatgagataggtaaatcaatctcccaacaagtctctgataacgatcccggtccttcacattcttggcttttgtaggttgcagttttacattcagctctataggtgttttagcaggctcacatcctaacatacctgtctcatcaagaagatcaagaacatacttccgttgatttacaaagatatcttctttggacctagcaaactccatcccaagaaagtattttaatgcccccaggtccttaatctcaaattcctcagcaagtttccctttcagcttctctagttcattgcaatcatccccagttaacacaatatcgtcaacatacacaattaagatggctactttaccttcatttgaacgtttgtagaacatcgtgtgatcagcttgactttgagtatatccataatgctttattactttgccaaagcgctcaaaccaagctctaggtgactgcttcagtccgtataaggacttcttcaatttgcacactttcccaactccaaaactttcttcaaaaccaggtggaggactcatgaacacttcctcctctaggtctccattaagaaagacatttttaacatccaattggtgtaagggccaattggaatttactgcaagggacaacaaaactctaatcgagtttattttagctacgggggcgaaagtctcttggtagtctatcccataggtttgagtaaaaccctttgccacaagtctggctttgtatctctcaatacttccatctgctttactctttattgtaaacacccatttgcaccctacaacttttttttcccttggtaaatctacaacctcccaagtgccattcttttttaaggcattcatttcctcaaacactgccaatttccaactcggttcatctagtgcttcttgaatatttctaggtaccacaagttttgaaatatttgtagtgaatgctctatagttgtcagaaaggttactataggagatatatttggcaatgggatgtttagtgtaggcttggattccctttctaagagcaatagggagatcaaggtcaaggtcctatgtaggaacaattggggctaatcctaaaccgggttcgagtgcagatatttctggacttggaccaaagtgtgatggtaaacttagatcagtaacagaagaagaagaagcatgtatatgagtaggaatagaaggagggttacctgagacatttagagagccattgcccaaggctttcggttgaccatgtgctaggatgatcggctggtctttactttttccagggacttttttccttgaataaaccacaggctcaagattgtttttatttttttttcattcgtagtatttcttcttctgacagaccaatttcaaattcggattcagtaggcttaatttccttattttctttttcaagagagatatcaagaattacactaggcaaaggttcaacaatttcccaacaatttggttccactaatttctccccttgaagtaaatttttggtaaaatatgtgacattttccataaaggaaacatccatagttgtgtaaaaatgttttgtaaggggattaaaacatttgtaaccctttttattaggagtatatcctacaaaaacacatttttctgctcttgggtctaacttagatcttgacctttttggaatgtgtacatatgcagtgcaaccaaatattttcaagggtaattcagaattaattcgagattctagaaatacctttttcaagcactccaaaggagtggtatattgcaaaatttttgtaggcatcctattgattagatatgaagcagttagtatggcatccccccataagtattttggaatattcatgtaaaacatcatagcccatgctacttctaacaagtgtttatttttacgttcagctattccattctgttcaggggtatcagaacacgaggattgatgtaaaattcctttctcgtttgaaaaggtttccaaaactttattaaagtactcggtcccattatcagatctcaaaatactgatttttgtttgaaattggttttcaatcattctgtaaaattctttaaaaatcctttcgacttcagatttttccctcattaaatatacccaacaaagacgtgtatggtcgtctataaaggtcacaaaccatttttttcctgaaattgtggttacttttgaaggtccccaaacatcactgtgaaaaagataaaatggttttgatgcatagtagggttttggaatgtaagtttttcgttggctctttgccaataaacaactttcacattgaaatgataaatgatcaaccttttgaaataacactagaaataaatgttttaaataagagaaactaggatgacctaatctgcaatgccaaaccattatttgatcacgaacagaaagagaactaatactacttagtccttgagcaattttattactaggtaaattatccttgaaataatagagaccattgatcatcctagcactaccaattgtcttccccgagctctggtcctgaaaaatacaatgggattcatagaagataacacaacaattagaatctctagataatttgctaacagacaagagattacaagtaagtttaggaacatggagaacaaatttaagatctattccctcagagatttttattagaccttttcctgcaataggttagaaattaccatcagctatccgaacctttttatttccaggacacggtgaataggattcaaacatgtttgaggaattggtcatgtggtcggatgctctagaatcgattatccatggagtagatttaaaacaacaagatagagcatataattcattacctgtgtgtgccaaagaaacactagaagtaccggatgtcaagttggatttcagcaatgcaagaagatgctccccttgtcgtatctcaccaagtttgagggttaattcaaagatctgtgattgattccctaaattagaatacatctgatttacattctcccaaagctcttgtgctgttggatagcacatgtaattagagctaatgtcttcttccatagaattcacaagccatgtcatcaccatggaattctcagcatcccatatagcatagttcggatcatccactgtaggagccttcttttcatccatcaggtagcccatctttccacgtcctctgatgtacatccgaactgattgagaccatctcagaaagttgtcaccattcaagcgaatcgtggtgatttggatagagtgagattccgaggtggtaggactgatttttgaagaatcagtgatgatgggattgttcagaggaggttgaggaacagtaatggacttgtttgaaatatccgacacgattttagagaatagggattgaaagagaggaagaaggaggattttggcaagcaaattgctagctctgataccaagctgaagaatagggtttcatgggaataatattctttcattgagattattcttttatagagtttacagcatatacaaatccttcaaattaggaaactaaatcactgattaaaaggaaagaacaactcctaacaattactttcctaaaaatacaaagattgacaactaataaataatttatagctttacaaagttatttctttccatatcagtttcggttttccaacataaacaaaacaattttcaatttccactggcatgccagatgtctcttacctttggatgaatgtactgcataaccacctccgtatcttttcctctgtaatagtgttgcattttttggacatggatgtctacttatgagtagatgaccaaatactttagatgcccatgaaatgggaatgcttgtcatggaggttgttacaactcctaactcacctctaaaggcaatgccatatgcgtccaaagggaatgactatgtccttgttgcctagaaaattggtctatgttccttcaagatggctaataatctcttgtgcccgatacttccttaacacaatgctctcatactaatatacttttctaagctgcaaagaaaacttggggttccaatgaatatggggttggtgtaccttactagcagaactgacccttccagcaatgcgtactttgggatggtttgtgttttttttttttctttccagagtaggaggttcataaggcaggattgacatgcatcatgcccaatttaaccagagtaggtgggatccaccagcgtgtgcaagacagtcaccatctctgacagtgtccatctcagcatattacaagtaacaggagttactttttgggccactataaaaagcttcacttcatagagtacagatgaataaaactgaaacttgctcttgcttttcaagagtctctttaaatttaaggtcttcctatgtgtcagcttcccacaggttagcactgccactttttccatctcccttatgtcactttctccagctctcttgcctcttgctttgcttcaatcccccatgaacctggatggcttactattccactggctgacctctaaattagaagtcagcataaacgctcacaataaaacaatgtgaatgtaatagaaaattatagggatattttactagaagttgaggataaattataagagttattctgatgtttttattgagactgtagatcaatattgttgaaataatgccaaagttaggactttaatttaggaataaaaaaggagagatcatttaggatatttccttatgatttagtttcctaattttaggagagaattaagctagattgattctttcttattcagtcatttgtgtatatatatgtgtatggtgtgtaccgattattcatcaataaaggagttcagaaattcttcatggtatcagagccagttttctgaaaccctaatcccttctggccacctcttattcaggccatcactcattctggccaaatctctctagccatatctcaatccgatcatctctctctctcattccggtcatcagtccctgttcttagagccaaaggagaaaacgctttccgatcagtcgaatcgtcatcagaaaacactcaccgccggcaaaattttccggcgaactttccggcgacggttttttctacaccgcaaggagcgcctggaggagatctccaatttgtcccaaagcaccggaaccagaaacccatccacgcgccgcccacgcgcgtttttccgtccggcgactgcatctcacgcgccggcgcgtgagggcgtgtgagccactttccggcgacgcgcttcctcctccaagctcgcctgacgccgaccagccacccttccttcctgtttgtgcaatccaagccctgcacgtgcctcttttggggttcttttgcttccgcgggccctctgatcagattttccggcgtcctccggctattttttctcaactccagtccctgcacgtgccttgggaagtgttcttctacctttccggtccatgacaaaatacggaatggcatcatcacaagtatccagcgtcacgtcaccagaatcagggggcagatctgaaattccaaaccttggtggcaatgattcctctcctattctcatcacaggacacaaattaaatggccataactatttacagtggtcacaatctgtgttgctgttcatttgcggtaaaggaaaggatgagtacctcactggagaagcagtcatgccagaaactacagaaccgggtttcaggaagtggaagattgaaaacagcatgatcatgtcatggcttatcaattccatgaacaatgacataggcgaaaatttcttgctgtttgggactgcaaaggacatatgggatgcagccaaagaaacttactcaagttctgaaaatacttcagaactgtttcaggttgaatcagctctacatgacttccgccaaggagagcagtcagttactcagtattacaacacactcacaaggtattgacagcaacttgacttatttgagactcactcatggaaatgttcggatgatgcagcaacatacaggcaaattgtggaacaaaagagactgttcaagttcttcctaggactaaacagggaattggatgatgttagaggccgaatcatgggcattaaacccctgccaagtctcagggaggctttttcagaggttaggcgtgaagaaagtagaaagaaagtgatgatgggatcaaaagagcaacctgccccaacattggatgcctctgcccttgctgctcggtcatttaatagtagtggtggagatcgtcagaaacgggatagaccttggtgtgattattgtaagaaaccaggccattataaggagacttgctggaagcttcatggcaaaccggctgattggaaaccaaagccacgggttgacagagatggcagagcacatgtggctgccaactctgagagcacatctgttcccgagccgagtccattcaacaaagagcaaatggagatgctacagaaattattaagccaagttggcagtggcagtactaccggtgtagccttcactgctaatcgaggaggaatgaggccgtggatagtagacacaggtgcttctgatcacatgacaggagatgctgccattcttcaaaattacaagccaagtaatggtcattcatccgtccatattgctgatggttcaaagtcaaaaattgccgggacaggttctataaaacttactaaagacttatatcttgactctgtcctccatgttccaaacttggattgtaatcttttgtccattagcaaattggctcgtgatctccaatgtgttactaaattctatccaaacttgtgtgtttttcaggacttgaaatcggggaagatgattggcagtgctgaactgtgttccgggctctacctcctttcatgtggccaattctcaaaccaagtctctcaagcaagttgcgtacagtctcagagtatgtcagagtctttcaattctgtgtcaaattctaaggtcaataaagatagtgagattataatgttacactatcgccttggtcatcctagctttgtttaccttgcgaaattgtttcccaaattatttatcaataaaaatccagcatcttatcactgtgaaatttgtcagtttgcaaagcatactcgaacagtatatcctcaaattccatacaaaccttcaactgttttctctctagtacatagtgatgtgtggggtccctcccggataaaaaatatttctggcactcgatggtttgtgacattcgttgatgatcatactcgggtaacatgggttttccttatgaaagaaaagtcagaggtcgggcacatttttcaaaccttcaatcttatggttcaaaatcaattcaattccaaaatacaagtcctcaagtcagataatgcaaaggaatactttactagtagtctcagtacttatcttcaaaatcatggcattatccacataagttcttgcgttgacaccccacaacaaaatggggtggctgaacgcaagaatagacatctcttggaggttgcccggtgccttatgttttcctctaatgttccaaactatttctggggggaagctattctcacagctacctatttgattaaccgtatgccatccagagtgcttacctttcaatccccacgtcaacttttcttaaaacagtttcctcacacccatgccgcctcttctgatttaccactcaaagtatttggttgcacagcattcgttcatgtgtatcctcaaaatcgtagcaaatttgctcctcgagcaaataagtgcatttttctagggtattctccaaccaaaaaagggtacaaatgctattctccaaccaacaaaagattttacaccaccatggacgtctctttctttgaacatgtcttcttctatcccaaatctcatgttcagggggagagcatgaatgaacatcaagtttgggagtcttttcttgagggtgtaccttcttttcactcagagtcaccaaatccttcccaattcgcgcccactgagttgtccacacccatgccgccatcagttcagccagcccagcacacaaatgttccttctcccgtgaccatccagtctcccatgcctattcaacctatagccccacaacttgctaatgagaacttacaagtttacatcaggaggaagaaaagacaggaattagagcacggatcacagtcaacatgtggccaatatattgactccaattcaagtcttcctgaagagaacataggtgaggatagagatggagaggtgttaattcccagcattgatgattctactttgccaattgcattgaggaagggtgttaggagatgtacagatcatccaattgggaattatgttacgtatgaagggttatcaccatcttacagagcatttgctacttctcttgatgatactcaggttcccaacacaatacaagaggcattaaaaatttcagaatggaagaaggcagtacaagatgagattgatgcacttgagaagaatgggacgtggactatcacaaatttgccggttgggaagaggcctgtggggtgcaagtggattttcaccataaaatacaaagcagatggatcagtcgaaagattcaaggctcgtttggtagctagagggtttacacaatcctatgggatagactatcaggaaacttttgctcctgttgcaaaactgaacactatcaggatccttctctcattggctgtcaatcaagattggtgcttgcaacagctggacataaaaaatgcgtttctaaatggggacctggaagaggaagtctacatggaaataccacctggtttcgaagaaagtatggcaaagaatcaggtttgcaaactccaaaaatccttgtacggccttaaacaatctcctcgagcctggtttgatagattcacaaaagcagtcctgaagctgggctacaaacaaggtcaggctgatcatactctatttgtcaagaagtctcatgccgggaaattggccatattgatagtctatgtcgatgatattattctatctgggaatgatatgggggagttacagaatttgaagaaatatttgtcagaagagtttgaagttaaagaccttggaaatttgaaatatttccttggtatggaagtggctagatcaaggaagggaatcgtagtctctcaaagaaaatacatactcgatcttcttaaggagaccggtatgcttggatgcaaaccaattgatactcctatggatagtcagaagaaacttggtatcgagaaagaaagtacaccggtagacagggggagatatcagcggcttgtcgggcgcttgatttatctctcacacactcggccagatattggctttgcagtgagtgctgtaagtcaattcatgcacagccccactgaggaacacatggaagcagtctacaggattcttagatatttaaaaatgacaccagggaaaggcctattcttcagaaagacagagaaccgtgacactgaagtatacttagatgcggattgggcaggaaacatcattgacaggcggtccacttccggatattgttcttttgtctggggaaatcttgttacctggaggagtaagaagcaatcagttgtagccagaagtagtgcagaagctgagtacagagctcttgcacagggaatctgtgaagggatttggataaaaagggttcttagtgaactgggacaaacgagttcatctccaattctgatgatgtgtgataatcaggcagctataagcatagcaaagaaccccgtgcatcatgacaggaccaaacatgttgagattgacagacactttatcacagagaaggtgactagtgagacggtcaaattgaactatgttcctaccaagcaccaaaccgcagacatcctcaccaaagctttacctaggcctaacttcgaagacttaacttgcaagctgggattatatgatatatattctccagcttgagggggagtgttgaaataatgccaaagttaggactttaatttaggaataaaaaaggagagatcatttaggatatttccttatgatttagtttcctaattttaggagagaattaagctagattgattgtttcttattcagtcatttgtgtatatatatgtgtatggtgtgtaccgattattcatcaataaaggagttcagaaattcttcaaatatttataaatttcacttgaattcctctttagaaattcctctagcagtacttttgggctaaatttttatttagaatgtcataaagatatctttatctcatcatttatcatttggaaaatgttatgagaatttcagtttttctgctgattcatgggaaaactgactttgtaggcaaacg

SEQ ID NO: 11726 - DNA, 12017 bp, Vitis vinifera
  Intron number 4 from transcript GSVIVT01004098001 (locus G SVIVG01004098001) derived from phytozome v7.0 (chr-ID chrU n; pos 14783082 to 14795098)
gcatatcatacaaaggtttggccataatcctctcgatggtgtttttgaatagttatgaaaactgaacagataacaacatagggggcaagttttcccctgtcgaaaagggtggtttcacatattgccaggtcctttatgatatgtggcttttttgccttcaaaagatgtagtccaatatctgatgacattgtatcagacactaattttacaaaaataacatgattcaataagttttaaccatataattttcatacttttggtccaaaaatagagagcctttttcaccatccaaatcatttctctctctctctctctctcgctcactcccttgctcttcataaaattagagtatattggatggtggtgaccaattgtgtaaaaaagatggcagtacatgattgtacactttgcgacaggagaagtaccaaatgcaaaagcatgttcttggtttctttttggcatatcttttcacctacttaagtttgttctgttgtttatctatgttttctttttttccttttttctctctaaattgtatgtagtgggtggcttccataatctatcactacagtttcctcattagatttcagaatttaaaataccaatactgagtaattcaaaaatctcaactctgtcagtggggtgattgtgtgatcataagaaagctcagaaatgtccataacttttatttgtgttccacttaatgtgtttttgtgcattcacaagttgagcagggattttgttggcttgtagaaattttatcattgaaataatagtttatgactttctaataatattgttcaaaattactcaaaaagaattgtatttgagaaaaaactggttttcatggtcaatttgtttttatattttctgtccaaacctatttccataatatagcaaaattatggattatatactcattagatcattaacctatttctaatattttgtttgcctactttcctttatcctaattgagatggggaaactctagtttttagtactcagggcctcaatgagacatggaatgaaatattagataattccttattgtttctgataggcaaacaaaaatgtagtaaacagtgtcttctaggcaaggggagataccttatgtatagagggggtatacaagaggcaccatcagaatggaaaataaaacggctaacacctagaaaaacagcaaaaagctccaccagtcactgtttaggatattgatgaaatccaagaaagaaaaattctccctcccaagcagggctttagatcacccgaaaaagagacttaataaggatatccttcaacttttggtgatgaagctgttcctcactgaagatccttctctttcactaacaccacaaacaccaaaacaagcagagggaagcaatggttcagacttccctctgctgtctattcaagcccttctccttccatcccaaaaggagctctttcacagaatctaaaaatacttaatgaatggctaataatgtcccacaactttctaactctatcacaatggaaaaggatgtgatttgtggggaccttgccaactttacagagacaatatctgttaactatcaaccatttcctcttttgactgccaaaatcattagattgaagtaaacttgtgccatctggtcttgatttatttatttggaagtacattttttccttaaagggaagatgggtaatacacatttatgatttaacatcagttttggaactgtttttatatatagttctttaagcagcatattatgggtcggctagcctgctggcatgggactataatttaaaatcatcgtactccatctaaggagtgctttgtgtgtgtctagtttcaagaacctaagcataacccttaagctattctttccttcacactccttatatttgatgggagtgtgcatgtctcttcattggcaaaaattatatatcaaactggttgaagattagtgggactgatatgattctccagcttttattctaggaaataaggagttggatataattgtccctagcatttgacctttttgtaaatgggttttgctagtagaagatgaaaactgtggttattacattgtttttcaaattacaacattgaatggaaagtgatagatagccttcaaccatcaaattatggtgatcttacagaaaaaggtctcattggagggattcatcatgtgctcagcatgtattaaccaggctaactaggatgttaaattacagagtggcctgtcaaatatcttgttctctttcctttggtggcaatctacaagctcttgatttttgggagctagttgtttaggaagcacacaagggtttgagtgactggaaaaatgcttatttgtcattcaatagtagttttactccttttcgatcctctttagcccacatacctctgtgtttcatagctatgtttaggatcatggtaagggtagcaagttagaaagggttaacctcccattcctaaaaaaggctggatgaagcctaggcaacttgacctttaggaccaaagtcttttggtaaatggtcatggaaattccctacggagtaacatgcatcatggaattcagtagtcaagagaaagattgggtttctggaaagtaggtgagatgtcaattaacctagtagggaggcccattcatttctttgggaagtcttctctcatgggtgcctgagttctactcttatgttataccttgttagtgatgaaattcaattctgggatttgtggtgaggagaccatttaaaaactctttcccttagatttctttctcatctacttgacagaggcttctattgctaatctggttaatcaatctaattatctggtttcatggaaccttgattgctaatcttgctaatgctaaaaaactgaaggttaggttctgttactggtaagcgaattattaaaggatgtggtaatttgtaaattattttatatgaatttgcatgtaccatattcagttcttgaaagttgcagaaggagtcacctaaagggacctcaaaaaaggggaaccttagaagactattggttgttacatgaaagattagggcaccccgatttccattacatgaggaaattgtatccaaatctaggtgatagtctagatttttcctaactcaagtgtgaaatttgtgagttggctaaaaatcaaaaggtgtcatatctcattagtggcaaaagaagtgaaattcctttcttggttataaatattgatgtttgggtgctctcaagggtgacttatatttctggtgctagatggatccttaggtggtgtttgtttttttggctttttgctgaaagcaatttttttttaagaatttaggttgtttgtttttctactttttcatgacttattataaactttttactaaatagaaaaaaccaaaatatgtagctttttctaaatagaaaaaataacatattggttttttttactttttaatactcaatagaaataaaatactacaaaaacaaacaacctaatatttaacactattaagcattaaggttctctttagaattaagtaaaaaaacaaacaccaccttagtcttattgatgacttcaatagataggactatgtggatctacttacgaaaggataaatatgaaaattatttccacaattcataattttttcttaatggtctaaatacaatttgacaccaagacaccaagatacgaactattagatttgataatggtggggaatacttcaatgaaagacttcaaaaaattttcttggaaaaggatgttattcatcaatcaagttgtgcaggcactccctaacaacatggtggcaggactgaaaaacaaacgtcttcttgaggtggttgaaccttaatgtttgccaaaaacgttctaaaacatctttggggagatgcagttttgataacaacctatcttatcaatatgatgccttcaaaggtactcaattttcaaactcccattggaacattgaaagaatgttatcctcacctatccgtattcggttctttaccattggaagtctttggaagtagtgtctttgttcatgtccctaacaaagatagatctaagcttgacctaaaggccattaagtgcattttccttggatattctccaacccaaaaggggtacaagtgttaccatccaccaagcaaaagggaatttgttacaataaatgagtttttgtgaacatcaatcgtactatacaaagactgaccttcaaggggagcaaaagatcaatcatagaattggttagtctcattaccaacactagtttgtagtattcaagaaaatgggaagaacttagagaattccttgaagaccaccattgacaatgataaaggacaatggagatacaagtgtatactggaagtccttgagatcaatttaggttggtggaaggccctaattcttcaaaggaaaaccaatcatcaacttcagatgaagatatggtttctatacctcctaaatctatttgtaatccttccaatcttgcttcaatttctactcctttctttgatactaatcttgatattcctatagcaatccgtaagggtgttataagttgcaccaaacaccctttgtcaaatttcatgtcttatcataggattgtagggtcttataaagcatttacctctcatataaattcggattcaattctaaggaatgtttgaagaaacccttgttggcttgaagtggaagattgctatagaggagatgaatgctctaaagaagaatgggacttggggtattgttgatttacttaaaggaaaacgactagcgggatgcaaatgggttttttgaatccaatacaaggcggatggttctgtggaaagatataaggcgcaacttgtggccaaagggtacacacatacctatggtatggactaccaagaaacctttgtccttgtggcaaagatgaactttataagaattttactctcttttgcatctaattataattggccactacaacaatttaacattaagaatgctttcttacatgaaaatctagaagaggagatctacatggaccttccacccagttttggagagaataatggaaggaaatgcaagttgaaaaaaatccttatatggcctgaaacaatcacctagagtatggtttgaaagatttgtcaatcactctttaagttcagttttcatcaaagtcaggtaaatcatactctgttctttagaagatcatccacatggaagttggctatactgattgtctatctagacaatatcattatgacgagtgatgatagtgagaaaattaaaaaattgaaggttaagttggctaaagaatttgaaatcaaggatctggatacccttcattattttttgggagtcgaagtggccaggtcaaaagaagagatttaaatatcccaaaggaaatatgtctcagatcttcttaaggaaactggaatgcttgggtgcaagcctatagaaaatcctattgatttgaaccacaagcttggtgtagttacagatggtgcgccagtagataaaggaaggtattagagacttgtgggaagttaatctatatttcccacaccaaacctgatattgccttctttgtaagtgtggttggttagtttatgcactctcctttagaacctcacatggaagcattcaaaagaatattgttgcacctaaaagctactctaggaaaaggattgctattttctcaaaatggtcatatggatgtggaagcatatacaaatgttgattgggatggatccatgactaatgaaagatccatctttggctattgtactcttgttgaaggtaacttagtaacctgtaggagtcaaaggcaacttgtggtagccaggtgaagtgcagaagttgaatatagggtcatgacacttggaatatgtgagttgatatggataaagaacttattaagggagttgcaaatagaatcaaagggtcctatgaagctatattgtgataacaaggcaaactataagcattggacacaacccagtttatcatgatataacaaaacatattgagataaatagacacttcatcaaagagaaaattgctagtggaatgatttgtacttgtggagaaaaattgtatttctcattcatattttaaaagtatacaaccctagaaatatatacgacaacaaaaaagaaagaataaggaaaaaattggaaatgaccttattaaagatccctacaaattaaggattatatacacaaatatacataaatctacacaaccggatattcacatagttgtacacacacaattatatattacaattgcatatcttccacaactgtatattatagctgtaataatcttcaacacttcctctcaagttggtgaataaatgttgtctattaccagctcgataatgatttcttgaaactgagcactagctaatccttttattaagacatcggctaattgatctccaatgaacacatatggtgtgtagattaagccatcgtctaatttttccttaataaaatgtttgtctactttcgcatgcttggttctatcatgttgtactgggttatgtgcaatgttaatgaccaacttattgttgcaataaagtcgtatagtgtatcccacttaatcttcaagttttccaagataatcttgagccaaaacaactcatagatttcttgggccattgcatgatactctacttctacattggatcttgcaacaacgttctgtttcttacttttccaagttaccaaattctctccaagaaaagtgcaatatcttgtagtagacttccgatcaacaattgatcttgcataatctgcattagtataggcctccaatggtagctcagttctgtttccctggagttgcttataggtagtgtaggattctatgtacaacttgtagatgaatttccttcaggttatgcataaattgactcattaggttgactacataggctatgtctggtcgcgtatgtgagaggtagatcatcctgccaaccaatctttggtatatacccttgtctacagttgcattttcattttcttctttaagcttgtgatttaaatcaataggtgtgtcaatcgatttccatcttatttttcttgtctcctataataagtcaagaacatatttttgttgggagacaaaaattccattttttgagtgagccacttcaatttccaagaaatactttagttttccaagatcttttatttcaaactcttttgctaaacactacttcaatgcttctctttcttcaagatcgtttctagtcactattacatcatccacataaactaatagggcaattgctcttcttgaggttgagtgtttaataaataaggtatggtcactatggctttgtttgtagccaatggttatcatgactttgacaaatcttccaaactaagctcgtggagattgttttagccattacaaagcttttttcaatttacataccttttttcctttcaagtgcatattaaaactagatggaagatccatataaatttcctcattgagctttccatgtaggaatgcatttttcacatcaaactattgtaagtcccagtcaaattaggcagccaaagacaataaaactctcacaatgttcatcttggctattggtgtgaaaatctcttggtaatctactccatatgtttgagtataacttttgacaacgagtctagctttgtatctctcaagtgaaccatttgctttgtactttattgtgaacacccatttgcatcctactggacccttctctcttggtaactcaaccacattccaagtcctattatttcaagggcttccatcccttatgacttgtttccacttcttactatttagtgccttgaataaggtcttaggtatggctgtggtgtttaggctggtgagaaaatttctatgtgatgaagacaatctgtcataggacacaaaatgggaaagtggatataaaggatgttgagtaaatgttcttgttatttttctaactgtaatgggcggatttagatcactaatatcaacagaatcaggagaaatctttggagaagagagatcatttacctcataggaagtggtcgattatgactcttggacctgcacaggcttagtgatggttgctttcttctttgagtaaaccaaagttggccttatagaactgggaacttgtttccttgaaggtggatatctagggttaggacttgtaggttaaggaatttgtgagtgctcaaatataggctcaaacatggatggttgtgattgtgagggtttagacatagataggggcaagtcaagtaagatcaaatctccagtatctatatcttccatgaatgatgtctctccctgaagataaggataattgaagtagctttcatgttcaataaaggatacatcaaaagagacataaattgttgagtgggtggatgataacatttataacctctttgagtagacgaatcccttacaaaaatgcatttaattgctcttggatttagattccctccattatgagtgtggacatggacaaaaaaaacacaaccaaaaactcttggaacaagattggtaggcattgtaaagtttgagaagtattttgaaaaaatttccattggtggacttttgaactccaaaactctagatgacaactgatttatgagatgagtagcagtaagtactactttcccctaatatgatttaggaacatttttttggaacaaaaaagctcttgtaacaataagaagatgactattttttcttttagcaatcccattttgttagggagtactaacatattcatggataatacattctttttggaaataaggagataggatttgattgaagtaatcctttgcattattacacccaaacttcttgattcccactccaaatcgagttttgaccattttgtgataattgagaaatacaatactcacatttgatttttgtttgagaagaaagattcaaaatactcgagtgcaatgatctataaatgagacaaaccgtctagagcctaaaatattaggaattgtagaaggaccccaaatatcactgtgaactaatgcaaaaggaattgaaactcttttattacttattggaaaagaaacatgatggtgctttgcaagttcacaaacatcacaaagtaatttttctacatcaattcctttgaacaataaaggaaacataattttaagaatgtcaaatgatggatgcccaagacgatgatgatgaagccaatcttatcttttattgtggataggattttggaaaagaatgataagggtaccttaggtacatgtagctcatttttcaaaactatggatttattcaagtgaacttccccttggctaactatggtggctagagagcctacaacaatggctattttcttgttactaggacatgggctataggtactaaaactctgtgaggaatgagtcatatgatctgtagctcccgagttgatgacctaagagcttaggaaaggcatatctgagatactaaaagcaagagaaggagaatacttacttgactgagtgagagaagaagcaccattaggagtctcaaaggttcctaggagattcttcaatttctcaatctcttccttgttaagcttagtatgttcattgcccccagaattcaccttctcttgtaaagggtttttattgatttgagagttggtgaagcgtgtctgagttccctgttgcccacctttgaaacattgctgtccacccttgaagtttccagcaccggtacacgaaatagtgtccttgttcgttgttttggacaaatcagctgttgatggagtattcacgctatcaggtttgggcggtgttggtgtcatcaagaatcttggacttggtgggtagaattcagatataactttagagaaaaatataacaaagtgcctttgaaatgacaatgaaggccgttaaactagggttcaaaaaatagaggaaaaagggtactataactcagcaatgaaggctaaaaagaaaaaatcccaaggagcctaattcggctctgataccacgtggagaaaaattgtatttcttatttatactttaaaagtatacaaccctagaaatatacacagcaatagaaaagagaaggtaaagaaagaattggaaactaccctattaaagatccttgcaaatcatagctgtgcagtcccgtttctgtggagcattatttggagcccttgtgttcctacaaaggtgggtttttttgcttgggaagcttcatgggggaaggttcttacccaagataaactcaagagaaggggctggaacttagctaacaggcgcttcttgtgttgtgctgaagaggagacgataaatcacatccttgttcattgctccaaggtgagggttttgtgggatctcatgttttctttgttcggtgttaattgggtccttccgctcatggttagagacactctcttaggttggtttgcttcctttgtggacaagaagcatagaaaagtttggcgggcagctcctctctgtttattttggacggtttggaaggaaagaaacatgatagtttttgataataaggttttgtcgattcaaaaaatgaaaaattcttttgtttgtaatctcttcttttgggctaagtcttgtttagatgtaggacccttttctttaattaactttatcgattggttgggctcttgttgagggttggtgagtgcttgcctcttttgtttcttgtcttttggtgactcatgtatactccttgtatgctccgggttgcctttcaagcaccctttttctaatatatcttctgtgggtttatctataaaaaaaaaaaaagatttttgcaaaccaggaacacaaatatacacaaatctacacagctggatattcacataactgcacacacacacaactatatattacagctgtatacgcaactgtatatcttccacagttgtatattacatttgtaataatcttcaatagtactctattcatttcttccaagttgcaactagcaaatgtcttcactaaaggagttcttaaatccaaggttaaactcaatgatcaacaagctgggaatagaggatattttcgaaccagtttgagggggagtgttggaaattagtcactgatctaaaggaaatcatctactgatctcaaggaaattagtgattgatctcacccttgattgatggaaaccatatattgattttacccttgattccaagggttaattagctatcttgaccagtctaagaccattttaggaagttatttatttagtcaactttgtaattaggttgacaaatatttgtagcactgatttaggaagtttatattttttttttcttttcttacattatttcttctatataaatatgtatactatgaataatttaacaattttcaattggattctaaaccaatatatcccttaaacatgtttggccttttggtgccttgtatgtaccatgtatgcttttgcacatcattttgttagccgttgttaatataattgatctttggctatcaaaactaaataaataaaatgactacatggctaacaaaaaaataccctaaccctaaccctaacaaattatagtttaaaatctgtaatatgatgataaaattatatatcttattatatatacaataaagctagcctcctgttaagagaagagaaaaagaaaagaaaaaggacaaagaagaagaagaaaaaatctaaccatttgaaaaaaattgcactgttgatcaggagaaattttctcctaataaggaaagagtgatttccacccatgtcatccagaaaaaagagatacataatgcatgattcttactgtttgaaaccacactttttttgttccttacctatgactaggagattagtaccattttaattaacagagcatgtggttatcaattttttgagtatttatttttttgtttagcattaagttctaatgatatgattgtacctcacattgttatggtaatgctattttaaaatttttgcattgtgtcatgtgcagccattggtggttctactggacagcttcttgagcaa

SEQ ID NO: 11727 - DNA, 5514 bp, Vitis vinifera
  Intron number 14 from transcript GSVIVT01023713001 (locus GSVIVG01023713001) derived from phytozome v7.0 (chr-ID chr 11; pos 9873671 to 9879184)
gaactgggatttgcaaaagaccgcactattagtaggtatgatatgctttcaaaaaaacttgtttcaacatggcttaagaatttattttactaaattggaatctctttcctttccttcacctaatcatactagttttcactttaaccaacagatctttaaattggtagaaaatttctcaacaaacacaatgctttataaaacattcacctctagcagtttctttttcccctaacccgacaaactttctagctgtggttttccccttatgaacaatgttttctttagtaatggtactgaagaatggagcttctgaattttcatcctgattatcttccaatcttattaaaattgttgacaccaaaggattgtttgggatagctttttagtgctagtagaaataattgttgttgtgtgattgattttatacttgggactatatttcaaaaatggttttgttaaatataggataattttagcatttttaaaaattttattaaataaaaatctccttctgtatcgtattttaggaaggatctctgtactttccaaaacaaagataaatcatgttgggaagtatggaccctatgtttgagaattctattctaatattcttgaaagttgtgtttacctttaagtagtgcttttcggattgaagtagttctccaaacaaggcttaagaataaatgaatcaacctatagtgtattgcagtagaacaccttactctatttctaacgttcaacacattgttacttatcactgttcaatagatagagcattaagcgattatcttctacaatcactcatactggttagtagtagatttttgaacttcagtgaagtgccctctagttttaagagatgtctcgaagctataggggccaaaaaaaaaaaaactcgtaatccattcttttattaactgcaacaataaatgaatgacaatacaaaaaactttgtagagatgtataaaaaatgttctcttgtttttctatataatattttaaattttattataggaagacattcccacacatatgttctttaaggagagcgactcactatcataaatcattcataggtccccatgactctatacaagtggtttatcaatctactcaaaattaaaaaaaaaaaaagaaacccaacctccacattacatctactagggcaagttcaagttggttattacgctgctctcctcaagtacttggcgccttagctagaagacaagtggcaaggggctcttcttaatattcactttggcttgagaacaagtggcaagagagtcatcttaatcttcttagagctaacaatcatcttgaaggtagcaatcttcttggatccaacaatcttacatgtaacaatcttacaatcttcttggttgttactctttatgcatttggactcatctagactctcggcctgcagtcttgcaatcttctcggttcttacacttcgtgtttttagactcatgtgcactcttggctcaatttgtattgtgccttctacatttgccattagcccccatggttaacccttctcaaagaccgaagctgaagaggtgatgtgtttggatgcaaaattttttgctactctgcacaccttgatcgcatcaatgggagatgacgtctttatcattgattcccatagcgttaacaccaaactatagaagctgaaattggtgaggtctgaaatgaaaatcaggagttaaagtcgggtagggaggcatttggtgaatttcactaaaaaaaagttgctgattctcaattttttggcaattttatctctaattttcttgcaccattgccaatattcagcccctccacaatatcgtgggaggttccaggttcaagtcccaatggggacaaaaaatttacctatcaaaaaaaaaattcagtccctccacaattgtttttaaaataattatacatgtatcattatttcttttatatcattaaatacatttaaactacatagatcattattttagtattgaatgtgttttcaagtattacatattattgtcttatcatacatgtatttttttaataaaaaaaccttcaacatgtgtattattgtttgttttattatttctttgagttttttttttaatatttctatgttttaattaatctttgtctcatagagattttttttctggattttctgtttccctaaaatccaaccatcgatttttcatgaatttccaatattttcattcttggatgcaacaataaaagaattataatacaaaaaaacttatagaaggggaaaaagaaaaatatttcaaagatgtctccctttttctctataatctttttaaaatatggaaaaaaaatggagacatcttagcatcttttttatccacatctacaagtttttatgtattgtaattattttattgttacaacttacatctgataaagaaatggattaagagaattttctcttttctttcaaggacctcttcatggattaggagaattttttgcttttcttgcaaaaacctttctgacatgggacccttcttgtatatgccctttgacttttgcagacatacaaaagtaacatacattttatgaaatgtcacttggagctctctctctctctctctctagaactctcattatactattcactatgtagtgctggggaataatatttattccacaaccagggaagactttttcctcgttaacttcaaatcctcaagttttgatttctttataatattattaattttgattcctagataaacacaaaacctctgcttatagggactccttctcattaagctctctttcttgaaaggaacctttgctgaaatgggaacatcaaatccatctatttcaaagattaatattgagtgtcctcgttattataagaacatgctctacaaaagtatgttatttttacatgcttcttcaaactaatttcatttattttttcctcttttgtataaagattaaataatttgaaaatgcactaattttttttgataaataaacatgaagtaatattatcaaaggcaaacagccacaaagcatacaggatgtatgcaaggtagtttgaagatgcacaaggttttaattaattttaagtatatatttgattttcttttatattttctatagtaaactaaacatgcaaatatcattttctttagtaattttttttccgttccattccttagtactttccttagaaccaaacatagccttaaggtttctattagatgatatctttgtattctctattgttaattccctctctatcattttagagttgtatgggagaatatttcttgcattctctatttggccaaaaattttattgttataggactctcagtgcatgtctctattcttcaagagttttacaggtgcagaagcatttgtcctgccaacttttatttataattcttcattaatagggaatttgatctattgataggggtttacatgactctattgaaagtcttttattcattatctcattatttagagatctttcaaatattaagattcattatttatatccttttatggtctctattttttgcctaattttttttctgggctaaaataaaataataatggcaccattattcattcaaaaagaatatacattaaactcaaaatgtgtttagtaaatcaacttaatatgacttaatgattttaatttagtttattaagtatatcaagtatatttggcaaaataacttaaaaggtgtttggtaaatcaatttaatgaattaatcagttttgatgaatataacttaaagtcaactcaagtcattaaaaattaaatattaaatttttaccgaaagcccacttggtctaaaaagtggctactaaaagctatgataaaagcttgatttaaaaattggctaacaaaagctcgatctaaaaattgattcatagaagttctaataagagcttaatccaaaaataggctaataaaagcttagtattgaaattgactaaaagataacttaaaaaaaaaacctcacaaaaaaatagaaaaaccaaaacaagaccaaaacatttttaaaaacccaaaaaaataacaacaaaacttaaacagaaaagatgcctcacaaaaaatcaaaaaacaaaactgaaaccaaaaacattttataaaaaataactacaagaaaaaagaaagcaaaaaacaaacaaaacaaaatgcatttaagaaggcttaatcaacaaagaaattcaaggctagcatatgataataatgtcaagagtttagctaagcccaaatgcaccaagagtaagagcctagaatattgcaagattgttagacataagaagattgttggttccaacacaattgtcagctccaagaagactaagaagagcctatgagaagattgtcagttagaagaagagtaccttgccacctattttcaagtgaagcgtcgagactcaaggggagtagtgaagtagccaactaggactcacccctagtagatgcaatgtgaaatatgggtctgtttatcaagaaggtagataagttcaaattgaccaaattctaactaaaccacttgtgcagtgtcatttatccctataaagcgttaaagaacaacagaaagaaaagaagagaagcatgaaaatttattcctataagaagattatagaaaaaagggagacattttgataatttttttattcacttctacatctaccagtttttgtatatcgaaatacctttattgttacaatggagttgaattaaaaggaatggattaggaaatttttttagctcctaatgaaatcttttttattccacaatttggaaatctatttgaatataagattgaagacaagtttaccagttccatacaagggctctatgatgttgattgcagacattcaacaaattttgtttttcttgttggtttggattttataagcttttatctcctagcacagtcatgttttatagttggtttaagggaaaggattaaaacaaaaaacgaaaacaaaaattgacagatagcctatcataaaacttcaaaattctgtcacattccaaccccctgatgctctccaaccctacgtcacaatttcttttcacaaaatattgaagacaaatttatgcagttacctccttgcttgttcatgttatggttcccagtggtgggatacatgggatttagggtctaatgttgactgaagtaaaaaacccacatggtccctcaagttgatattcaaaggcataaaattatctcaagccattggaaagaaagatagaaagaaaaaaagaaagcgcattttctaaattagatatccgaaactaatcataaaaccagcattgttgaatatttgaaaaattgagtgaggtttgaagttctaagaattttgcagtctgagagcttattacactcttgaggaaaaagttcctacctccattcctgctgttctgtatgagtatttaaattgaatgtggtaatttttcatactgtgacttacaaatgtgaagctactaattgatgcagattaaccgag

SEQ ID NO: 11728 - DNA, 11613 bp, Vitis vinifera
  Intron number 38 from transcript GSVIVT01009194001 (locus GSVIVG01009194001) derived from phytozome v7.0 (chr-ID chr 18; pos 6011953 to 6023565)
ctataggtgatatctgcctccccccttgggccaaggtatgtgaattctctcccatgcacttcagaatgcatagttcttctattttttgcctcatttttgtcgttctgtggggcagtttgctacttgaaaagcatcgactaatttgattgaagatacaaaagaattaactccctagtttccgagatttgattgcaaacactagggtactaattacctgatttatgagattatatagttgtatagttctctgatttctgagattgtgtagctttatatttcctattttactttttctgatagagttttttcagtaattagtcaactttttttgtgtaatttagtttcctaattttgtatgattatacactttaaatactatatcattttgtcaaaaatgtaatgattacaatcattcttttccacatgtttttagagtcttttcaaggtttctaaattttcttctaatttttccccgtactgccgattctcattggccttcattgctgctattatctacttcaagtggctttaattatcatcaccattttctcttctcagtgaccttttttaccattgagttgtctctatttcactgtccactatgtcaaaagccttagaacacttgatctcaagcattgcattctagaaccacccacctaccagtaaatatcaaaacctttcagccctcatttagatttaatggctgatactatctggtatggtcttagcatgtgtgcaaatgatcctaggtttgctgcttgggatgatactatcaggtatggtcttaggcaagctcagtcacttaatcgaatctatgtttagtgaaaatgatcctaagtttgctgcttgggatgaggactcaataatcatgtcctaaatctggaacacaatgcaatttgaagtcaatggaacgagtatattcctgactatgtcaaaggaaatctggggcaatgtaacagacctatccaaagtcaaatatgctactcagattaatgagataaaggctaagattcattctactaagcaagatgcttcatccagaattgagtactataatgttatgaaagatttgtggtttgaattggaccattaccaaaatcttgaaatgaagaatagtgaggatgctgttatgtttcttaagtttattgcaagagagcgaatattcgaatttttggctagacttaacatggaatgtgatcaagtacttgttcaagtacttagggaggaatcactaacatccttaaataatgtattctcgattgtaagggctgaagaagtgataaggagcataatgttggacattctagcaagtgaagggtctacttttgcaattttaagctctaaaagcagtctaatccctagcacaaattttggtagagatgtatttgagcgtccaagtaatagggataacctctaatgtattcattgcaagaaacaaaggcaaacaaaggagatgtgttggaagttaatagcttcaaagattgatctccttcagagattaatgtcctcccttagttctgtgtttttctctccttctttggcagattcaagagcgtggtctttgtcatcgtcaggattgttttcagtgaaatcttttttcttggtattgtcaaaagtctcaaatcctatcttattccttccggccaagtttttgtggagttcaaaagccccttcaaaggttaaggccctcgcttggttagtagcacatgggaaggtaaacaccaatgataagttgcaattgagaagaccctacaaatccctctgtcctcaatggtgcattttttgcaaaggaaatggagagtcgattgaccacctttttcttcattgtcctgttaccattggactctggcacaagttgttcaatctagcaggattggtttgggtccctccaaggagttttgaggacatgttggttattgcttttaaaggcttgagaaactcgttaagaggcaagacactttggcaaattgcttgccttactttgatttggatggtgtggcaagagagaaacaataggatctttgaggataaagggtgaatggaagagatgttatgggatttgatttggttctattcttctctatgggcttcttgtactgaagcttttagaggagttcctctaagtgttttacaactcaactggattgcggtttgcacttcaaaagtttgaagaatgttggggtttctctttgtttttagagttctattgttgggagttttctcctttgttcagtttgtgtaggaaggacctctcatccttcccttggtttcttctctttcttttgtatcttttctttctcctgtatcttttcttctattaatatatttttcttcgtttctgatcaaaaaaaaaaaaaaaacaccatctagaatggtggaaaccaaaatgcggagtagtccagacaaggaggctaagcaaatatgacaattttgaaggagaaagccaaccatgagaaatcaaacagctcggactttgagggactcaaagaggaagagattgaaagacttcggggttttctcacctctttagataaacctagtgcatcatgcttcttggccaaactagataagtactccatgactagttgttttagtgtctcaaaagattgttgggatggaaattcggttacaaacttaagtgctagaaaccatatgacccacaactctcaccatttcttgtcttacaatccatgtcctggaaatcaaaaggtcaaaatagctgatggtagtttggcttctgtagcaaacaagggacaattacccttatcccatttctttccctaaaatccatactacatattcctaaactctccataaatctcctatcaatttattaagttaccaatgatctaaattgcaaagtaacatttttcctatcccattatgtttttcaagacctggatatagggaggatgattggtcatgctagcggagggattctactatcttgatgcttggagtgacaatgataggggtcacatacctctatctcatctttcaagtttttcatcaaataaaatccaaatctagctacatcatttacgtttagggcattcttctttttccatgtcgaagaccatggttcctttattactttgagatttagacattaatgactttcattgtgaagtttgtacttgatcaaacatcatcaagttccttttccttcaaattataatagatcatcttatccctttacattaattcatagtgatgtttgggacctctcaaatttctaatatcactagagtccattggtttgtttctttttttgatgattgttctcatgtcacttggttataccttttgaaaaagaaacctagaggaaaggaataaaacacgagtcatcatgtatggatactccataacaaaatggagtcagagaaaaatattgtcaccttttttaggtaactcatgccttattatttgagaagagtgtgcctaaattacaatagacggaagcggttttaattgcttcttacttaatcaatcggttacctttgaaagtgttaggaatcaaagccctaataaatgttctttctgaattctttatgattttcatgggtttagcatgatcccacctaagtatttagatgtgtctcctttgtccatatccatcctcaaagttgtggtaaacttgattcacgagctctttaatgtgtcaccgttggtttttcacaaaataagaaggggtataaatgttataaccctatttctaagaaatttttcatttctatggatgtcacttttactgaaaaccaacccttcactaatcctcatcttcagggggagtctctatcactagttatcactcctataggggttgacacatctaaacccaagaatgaggatgagaaaaagggtagtattgttaccatgccactatgagtgcgtttgacaatgtttctacttaaagtgtttttagttgaagtgttttctttggaattgtttttaggataattacttatcaagtatttctctaaaaaacactgcaagtgatttttgaacattacaagtgatttttcaaaattttgaatgtgtttcccaaattttgtcaaaaacttgatttttctttaaaaacactttttagattaaaagtgtttttttttttaaaacactgctaacaaactttatgaatttactcaaggagaagattgttgaaccctattctagtgtaaacataagaatccataattgtgacaagttctaaatctaaccttagtcattctcctttgtcactcatgtttaaagatttacatttgctaatagctcttaggaaatgagttaaaaaacatgcccaacaccctgtatctaacttctatcttttgatagattaccctcacagcatcaagccttcatcacatgatcaaatcttattgaaatttcacgaactaagaagcacttaggaatgggaattggaggaaagttgcgagtgaggaggtgagtgcttttgaaagccaaaaaataaaaaataagaaggcataagaaattgttgaattatccaaagggaagaaaccggtggagtgagtgagtgtttagcatataaggcaaatgaaaccttggagagatagaaaactagacttgttgccaaaggctacactcaaacagatgaagtggactatcaagaaacctttgctctggtaggatcatccttcttaagttgagatggaatctcatggaagaaaatgctagtttggagtggaattgagatcctttgaaatttggagattatggagatgggtcaagggttcttcttttagatcaaatttggagggaggacccttgcttggttgctagaggaggtggaaacttactatgaagggaagtataggtagtcattcagaaaggtgtggaatgaaggtggaaggggctacaagttaagagttgcataacaacaaagtcgaaaaatttcaactttgtttagctttaattgtagaaaaaaaaaaaaagattccttttagtttttccaaagggaagggaacttctggggggatggaagatttttgctacctaactagggaacatcaaagttgtcgttgcacctaggtatttgaaggcttctaaggagtttgtttggtagttggaagagaagggaagggatacccatttagggcttgcttcctttgtagaggtgctgaatagaggcaaaaaaaaggtgggtgaggctgtttggattgagaagatagaggaggttatgagcaatttggtgttcctcaagaagtgtctaatggagaggcaggatgtttctttaggccgaatgccgattatgaattcattgaaatcttaggctatgcattgttggggattgaaaaatgatttataactatctttgttggaaggccctatgatgttatttgagtttgaaatgtttctaaagctgaaagggtttagcattcgaggcctagtatgtttgagggaagaagattgtagttagattagtggaggccagatgttagttgctttagaggaggtgtttgtgttgatgaagtttggagtggattaggatgaaaagaaacatgttgatgaagacttgcacgcattgggtccaaagccaagtttcacaccacacacgaaaatggaggtaactttttctagaatagacaatagcatgatcgtaaagcattttaggtctctttgtgagtcgtcggcctaagtcttctcaagactagaatgtgggtgaagggagctcttgcttagccctattgagctaacccatagcaacaaatttttaagctcttttggagggagctgtggtagtctagccaagattgggccattcccttgagttatgatttgaaggtttcttacccttctaagagtcgggttaaaggtcttttttccaaacccaagaaaaaaactatgggtaagaaggcccaacaaggtcttcggagctttctagttgatgatgcatttgtctggcccagggcaaccttcgtcaaccctcttttgaatgcaatgtctcaaggttcgggggaataggtttcgggagttgatgacgccctcttggcagaaccaatgggacttgaaggtaggctatcatgtcccctttctcccttccccctcatttttttcttcttcatttaagtcgctcattgttagtagtgggccaactaatcaatcaaaggtggagcctttctttgggaatttgggatctagatctcggccgctaaggatgatgcttcaatatggtggttttgttggatttgacgaggaatgctgcaaaaggtcctttgtgtatggggatggtggttagggttgaggagatgagctctctaaggccatggagtccagttgtgattcggtggtgggaggagtttatttctgacaggtctttccaataagttgatcaattttagtagtttaatggggatgccagttacgagttttgaaaaggagattagttctttctaaggaaaatagagtaaaaaaaaaagtgtaatgttaaggccttaaaaggaaagaggaaacctttcttgtcgtatcccattttgacaaggaaatctaaaaattggaatgctcaattaattacaatagttttcctctgatagttgagggaagggagaggagtagtggggattcaactctcattctgtgaggtttctttttcgctcttggtttggttgagggattttgcttcagagtcagattatgttctttccaggtttcaaggtgtttcaattggtctaggtttggggtgttttctggttttggaagtacctgttggaggcaatccaactttctaagggtgtaagggattggtttttgttttgatgattggtatttgtttttccttttctctcttgtttaccttttgtccttaattgcatactttgatgcgacatttttcttgcactttttatatatttttttagtttaccattcaaaggaaacctttgctctgatagcaaagttgaatattataccagtattattatccttagtagctgatcttgacttctttgcaacagtttgacgttaggaatgccttcttgcatgatgacctagaagaagtggtctacatggaagcacctctagggttccatgatggattcaaggctaataaagtatgctactataaaaggcattatatggcctaaaacaatctcctaaagcatggtttgcaagatttgctaaaactatgagaaattggaagttctaacaaagctagagggatcatacactttttatcaaactgttaactaataaaatcatagcccaattatttatgtagatgatataattgtgaagagggatgatattaaacaaatggacaaatttaataaaaggttagctaaagaatttgagatagaatacttaagcaagcttaagtatttcttggaaattgaagtgactcattcaagaaatgatatttttatttcccaacaacaatatttttttgatcttctcaaagaaattaggatgcttggatgtaaaaatgttgacatatctattgaataagatcataaacttggagaagacttagaagatagagctgaagacaaggggagttatcaaaggctagctgggagactcatttatttgtctcactcaagacttgatatagcctgcacaatgaacgtaataagtcagttcatgcattcccttaaagaagcccacttataggctacacatagaatctataatacctgaaatccactacaggtaagggaatgctcttcaagaaaaatgaagagctaagcttgaaagcctaaactaacacaaactagactgaatcaatagtaggcctcaaatcagcctctaagtattgtactgttcttgggagaaatttggtgatatggaaaaataagaaacaagttgtagttatcaggtctagtacagaagtaaagttcaaagtcatgacacaaagaatttgtgaactactttagttgaaaataattcttggtgatctaggagtaaagaggatggggaccatgaagctatacgatgataataaatcaacaatcaatattgctcacaacctagttcaacatgaccttgtaaaacatgtggaagtggattgacactttatcaaagagaagctagatgatagattaatttatactccttatgtttcaatagatgagcaacttgctaatatcctaacaaattacctatcgagtaattcagtttagaagtagcaagttgagaacgaataatatctacttaccaacttgaggaggagtgttaactaatattattgacaataccaaagaattctttccctaatttattttttgatagaacatttctagaaattaatcaactttctttgtgtaatttaatttcctaattttgttggattgtatgctataaataccgttgttttgtcagaattgtaatggataaatcattcttttccacaaaaaagactcttgagcccaaatagttgggataactttttgagtagaattgttggttggattttgtaatatttctatatggttcttgataaatctatgcatgttctttcttcttagtagttaaaaagaatatcgataaatctatgcatccatcaaacttacttcttatgcatgttcttaccattataatattaggggtgagaggaatgcaaggaatttttaggatagatgcagtgctttagacacaatgtaggatctaatttatttctccatttctcactaggcattagctaatgcaccatttgtgggcaccctttgagcattatgctactagattggaagccagtaagcaaatcaagtaagttggttgaggagatactccctacatggatacctcctctaatgggcaacatcaagttgaattttgatggatgctcctcgggtaactcaagacagttaggaattggagaaacatttagggatcatcatgtaactttagtgagtgcattctataacagtgccagagtaggtttagccgttgaggcaaagatattagccttgttggaaggcctagaacttgctatggattgaggcttatccaagaggagtgttcaacttctagtagaaggggattctacaagaatcttttcttgaataaataaaaaagagagcagcttacgcaagtttgatggatggttgtgccaaattttttatattactctagagtttacgtgttcattttgccagattccttggggtagtagataagttagcaaaacggggagcctaccagttttactaattttgtaggggattctcaactcctcttaagcttgtaagttcatatatataatcacttttagatgtgcatttccatttatatctagagtagatagttttttttcacttttgatcaaaattatgtagtggttgtgattggggaaagggttccttgtctatctttgtatttacttattccatgataataaaatgtttactactgataaaaaaattgtgatttttggatgtgcatttataatcatatttataatcacttttagatgtgcatttccatgtatatctagagtagattagtgtttgggcatatttctaggcttaaggttaaccttgacaagagtaatctttatgacatcaatcttgatcaggatcatctttcgaggttagccgagttgcttgattgcaaggcttctgattggcctatactctacctgggtcttcctttgggagggaacccaaaggcttgtggcttttgggattcagtgattgaaagaatctcgaggagattagatgggtgacaaaaggcttacttatcgtttggaagtaggataactcttatccattcttgttttacccacatgcctagctactttctctccttgtttaagattcccgcattagtggctgcaaaaattgagagattgcaaagggattttttatggtcagggaaaggtaaaagaaatcatcttgttagttgggatgtagtgtgtaatcagaaggcaaaagggggattgggatttgggaagatttctttaaggaatatcgctctcttagggaaatggttgtggagataccctatggagggttcagctctgtgacatcaggttattttaagcatttatgggatatattccaatggttggaatggcaacactgtaatcagatggtcacatcattgtccttggaaagctattgcataagtcttccaggatttttccaagtttactcggtttgtggaagaagatgggaaaagaattcggttttgggaagactgttggtggggggaccaacctttgggatcccaatatctaagactatttagagtagtcacggataaaactattcctatatcttcgattctcggttctacttgtcccttctcttggaactttaatttccgtcgtaacctttctgattctgagatagaagatttagaatacctcatgtggtcacttgattgtttgcatttatcacctttagtttcagatgcgagatcctggtctttatcttctttagggttttttacaatcaaatctttttttctagccttgtcccaattttttagttcttctctagttttccatactaagttcgtttggaattctcaagttcctttcaaattcaagtcctttgtttggttagtggcacacaagaaggtaaatactaatgacttgctacaattgagaaaaccctacaaagctcttagtcctgatatttgtaagttgtgcatgatgcatggaaaatcaacagatcatctttttctatattgctctttgatgatggggttgtggcacatattatttcagatagcctagacggattgggttaccccgaggagcatctccgacatgatgtccatcaattataagggttttggtttatctaagagagggatagttttgtgacaagctgcgtgcattgctttaattttggttgtgtggcgggaaagaaatgcgaggatatttgaggataaagtaaggaatttagagaatctttgggattctattcatttctttgcttctctttgggttctttgttccaaggtttttaaagggattccccttaatgtgttacaacttgattggctagcagtgtgcaactccaatgggttggtctaacctagagagtttgcttatttttattttgtatattcttgtttttgtatttgtagtttagattttctttggtgggaggattcctcatccttctattgtacttcttttttctatcaatatatctctttgtcgtttcctatcaaaaaaaaaattaaaaaaaaattgtgattttagatctttggttgcaaatgtacatcttgttttttgtttttttgtattttcatcataaacaaactaattcattgatgtgagtttttaaagcaaatgtgcatcttgtacatcatcaagttctttaagctaatttagtatttctcataaagaaaggactacataagttggggttacatcaagatgagtgttaatgtcatttaaagcaaattgtggtaaatcccattgttttggttagttatccctctgaatcattctattctgagatgaagctagtccattttctcttttatgaagtggctagaaattttcttgctatgttgtgtccaaccaaacaagcaatttttgctttggaaatctagctgtattctgttttaacctccaagaagaagaattaaattgaacttatatctgcagggctcgcctgaagaatttataaatcgaaaccggga

SEQ ID NO: 11729 - DNA, 5068 bp, Vitis vinifera
  Intron number 10 from transcript GSVIVT01009623001 (locus GSVIVG01009623001) derived from phytozome v7.0 (chr-ID chr 18; pos 9972197 to 9977264 reverse strand)
caaacatacgagctgtatgcattctggccaattcttgtttcattttttttaatttttatttttgataacaatttgcttaattggattatgagtttaaaaaatggatagcatgacatggatttgcatgcatgctgatgacaatttgcatgctcacattaggagtttagaaaatgtatagcataacttggattcacatgcatgcatgctcacaatggcactaatttgaaagtaaccttgtggcttgaatgacattaatctttgtatgaggtattggatggacctagtgctttgataaggtcttgcctctagtgtaggaacccaaagatggttgtctacaatcaaataaggtgagttccaatcatttgggtttaaggagaggaatgagaaataaaaattattaaaatgaggaaaaataaactaaaatatagagaaacaaagataaagaacaagaggtagaaaccttgtaatctcactaagactttctaggagtctcttctaaggttcaaggggcctttgtggagggtagacaaattctagaggcagtgctaataacaaatgaagccattgactcgattctgaagaataatgagaatggttttatgtgcaagcttgacatagagaaggcatatgacaatgtggactggtctttccttctcacagttatgcagaaaatgggctttggggagaaatggatagggtggattatgtggtgcatatccactgcaagtttctctgtgttgattaatggaacgtttaagggtttcttccaaagctcaaggggattgaggcaaggtgaccctctatcgtcttatctttttgtgatagccatggaggtttttagctcatttcttaaaagggctgtggatggaggttttatgtcgggttgtaaagtgaagggaagaaacagagaaggggttcagatttcacacttgctgtttgctgatgacaccttggtgttttgccaagtttttcaagaccagctgacttacctaagctgattgcttatatggtttgaggccgtatcaggtttgaaaattaacttggagaagagtgaacttatttcagtagggagggtagagaatatcgatgatcttgccttggactttggttgtagagtgggtagtctcccgtcacttatctgggcctccccttgggtgctccgtttaagacaatatgagtgtgggatggagtggaagagtggtttcgtaaaagattgaccatgtggaagagacaatacttatcaaaggggggggagagcaactctaattcgaagcactttgtcgaatctccctatttactttatgtccttgctgaagttaccaagttcaattagacgaagactaaagcaaatccaaagggacttcctttggggtggtggcaacttggagcgaaaaccacacttagtaagatggaaggtggtgtgcttaagtaaaaagaaggggggattgggggtcaaatgtctttccattctcaataaggctcttctttccaaatggaattggcgatttgcaaatgagagagatgctttgtggaatcaagtgattagaagaaagtatgggaaagatagagggggttagagctctcaggaagtgagagaggcacacagtgtggggctttggaaaggaataaggatgtattgggagttggtgggtgctcgaatctattttagagttggcaatgggaggagggtgagcttttggagggatagatggtgtggggattcccccttgtgtgagtcttttccttccctctttgccttgtctgctgaaaaggaagctcgggtggcggatgtttgggatcccttggctgaggggggttggagtccctgtttttcaagagctctaaatgattgggaggtggaaatatttttggagcatcttcacgggaagagagtgcttggagatgtagagaatatggtggtttggaccgaaacaaagagcggaagattttcagcaaagtctctctaccttgctctagaagcggactgccctgttttgtttccttctaactgtatttggaataggtgggtacaacccaaaatcagtttctttgcgtgggaggcagcatggggtaaagctttaaccctagaccttgttcagaaaagaggatggtccttggcaaatagatgctttatgtgtcttgagaaagaggagacaataaatcatttgcttcttcattgttcaaaaataagggccttatgggagctactctttaccttgtttggggtgtcttaggtgttgccctcctcagttagagagactcttcttagttggcatggttcttttgtgggcaataagcgcaagaaggtgtggagagctgttcctctgcatatattttggacagtgtggaagacgagaaatagattgacatttaaggatgacgagctatcaatccaaagattgaaatattcctttcttttctctctttggtctgaggctaaattgtttatagttgaatgtcctataactatagttaattttattgattggttcctattaaggttgtttttgggctaggtgactttttgggcctctttatttttcttagctttttggtggtgggtgtttaggtttgtataccttgcatagttctgtttaccttgagtcgcttttctggcgcctctttttaatgaattatctttacctatcaaaaaaaaaaaatatataaaagaaaattgatggagtctcaccattgagaattgtaggatatgcaaaaaaaagcttaacattattgatcatcaatatttcattaactagccttatttatatattttaggaaccttaaaaactgaataacattatgaaatagtaaacctaaccttatgtggtaactaattagaaatcttattctttttctaaaattattaaattttctaaaaagattaaaaaatcagaagctttcttttttagaattagaaatatattttatagaaatttattgtaataaagtttctaatgaagaaatgttttgggtctatgggctagaactcttgtcaccaactcatataacccccaactaagctaataggtctgaaatctttcaactccttagctccttctttgcaatcaaaaccaagagcatgatatttaaacttccctcaaaataaccaatagaaaaaaactccctaaggaattccatcaccttgggtttgacaaatccccaactcgtttgtcaaaatgccatggtgaaaccatttgaccttggaagctttttccccaattaaactggacaaggctattagaacttccctccttggaaaaaagaacctctaatttcctagattcttcacttctcaactcttcaaaaggcatgccactaagctaggtctccaaccccatgatttagacaagagattctgaaaagccctagccaccacctcctttatatctgcttccttagattaccatttgccattcactctcactttggtcaagaagtttccccttcttcaagcattaaccattttatgaaagaatctgatttttttatgttcctcttttaaccaaatttctcttgattttttgtttccacatggtttcttctagcattgcccatttactgttctcggttatcgttaaacttctggccttagattctccaatggaaagagttgcttctctctcctttgaatcccaaaagccaatcttcttatcggcctcaaattttttatttgtgacattcccaaagacctttatgtttgattttctagatcttgtttaagggctttagctttgctaccatcataagactatgggaacctttcacattgtaacctaaccaccaaactcctcactagttttttgaatccttcctctttaagccacatgctttcaaatctaaaaggtgatttggccctccacatccctcctccatcaagaactatgggaaagtaatttgagacaggttttgcttacactctcaactaacccttacctttcagaaatatcaaagcaaatgtcttctgtttcattgatgaaatgggccactgtagaaatctccctgccctattgcaaagtaattccaacttggaatccctttctccctcccttcataacctcctataagaattcagttccaaatcatcaccacaagactctgccccctcctacacatggtgagacctttctcggcaaacctgatctaggataagcatcatgcctcctttctaacaccttgcctttggcattctcaattgatatctaaaaggattttcaatcaactccaaaccagtatctactgctcttgagagccatttgtcatttaccttggtgcagtgatatctaccaatgtgcctggtcttaactcaagcccgctgtccattagttgaggttttcatatgtcccagatgcttctatctcccaaatatattgctgtctataaatctattctattttttttcactgttgcattgattccctcattccactctctttcgcttaaattatcaagattttagaatcattattttgaaaactaatgattattcaacattcattatgaaactgtgacatttaacaatcataattcttcccatatgaaaactacctgcaagagaatttcttttcatttttggatatctatcatgaactgggattgttaggatcctcacgagttgtaaataatataatatgtagctgcctcaatgtttgtggttttggtttctcgttttgagcatatttatctggaaaatcagaatgtctcatctcctgtgcttgtccttttttttttttccatcagaacctctgcttgtcctttctatggtgttccaatacaagcctcagctttttgtctacttatttgctgtagatgatagctgctgaactagccattgtggtgatctaacttagagagtgaacctgatgtgtagttttatgaatttgttttgttcctcaatggttaacaaggatattttgctgtccattaataaatgagtgggaagaacttaggaattagtttgcaaatatgcatggtttatatgaataaattctgggatacaatctcttcctaaatgtggtagctgacactcttgacaggttaaagaaaaacgggcagaacttgaaaaactaaa

SEQ ID NO: 11730 - DNA, 2648 bp, Vitis vinifera
  Intron number 2 from transcript GSVIVT01015186001 (locus G SVIVG01015186001) derived from phytozome v7.0 (chr-ID chr1 1; pos 1638077 to 1640724)
ggtctcaattttgatagagtgaagtaagtatttcattgatattccatggttatttcactcttaaattcagtccatacttccataaattaagaattaagtgttggattcagagtgttggttgcactctaaaggttattgggacagtgttttgattggtgaatagttggattctaagtgttggttgcactctaaaggttctaaaacccttgctagcataactggataagctgatgaatttatccattgttcacctgtttgtaaatttaaggtttcatttttttggttgaagaagtatattatctgattgcttgcctcttcattgacaaaatatgagaggtggcagtggccttttcttctgcctcataggcagggggcaaagtgtagagcaaaccaacaaccgattaaggaagaaaaagtagcagtgataacacataattgttatttatgttttatgtctttttatttcctatgaaaatgtcaatattatattaggaagttctttcttcattgagtgctatgcaaagtggaaatgatttgtattagtgaattcttacatcattagaatgagttggccaaggttggtccccctatgctcttttctcaaggttggacgatgggggtttggggctttaaataactccacgagggagtgattgccaaggattgaatggaggacattgctctggatggggctgaaatgctgaaaaggattcacatagctgacctcaagtagtggggattggttctttttggaccaagaaaaaattgaatttttaggaagaatgttaaatgaggtgatgggagcattttactgaccctactagcacttctcttgtcatgggagaatgtggtgactttagtatcaactctcacacatcaaccaggccaatcaatttgtttgcctaagtagagtttctcccagaacccctcccaagacaataaagtggcatgagataggataatctaagcacctaaggtattctacgcagtttgagcctgaggactcatcaattcagtgtactgttttagagtcccgcaaacaatgatgctaccttgaggttccatagacagagagaggatcatttctggtgatcagcacaccaaattttcctaatagccaaccctgactagtcagcatcaaggctttattgagataccaaattcccaaacagagacaaaatcaaacacatgatggtttgaagctctggttaccgcctaagcccttcagattccaattgatgaccttcatgaacaaatataatgtctctggataatttcctcattttaactgataatatatcaaatagctcagttttttttttttttttggtttgcgtgctctttagacttgcttttgtatagggtttggcacattgtagtttgaccatctaaccttctgcaactaaaatttgggtagatttgcttttttatagggtttggcacatcttagttctggaccatcgaacattcattaattaaaattttggtggatgctgttttcacttgtccatcatctcatataacatacagggagctacatgtataatattagacactgagaatccatcaaaggtgggaggaaccattgggaagacagttttcccaaccatacttgatccatcaatgaggggagagataaactgagatataagattgattgggattgaattgcaataaattctgggcggcagctgagaaaactgggataaggggctggacagtttttgatggaacaatgaacaaggtagaatattgttgctttcttagcctggtcatagagtgtctaccactattccttgttggccagtaaggaaatgaggggtttgtttggcaacccttttgaaaacggttcttgcaaaacagttttcagaaatagttctaaaaaacagttgtccgttattttcagaaagaaaattctatttaaaagctcaaatatggaaaacagccttttcaactaattctatgtgaaaggtctgtgcacttatattcaatgtaaaagttcccatggtattctttgtattttcaactgtttctcataatattttacaattaaaaacttaaaaacacctcaaatttgttctgaaaaacactgattttaagacaaattctcaaaaaatagttttcaattaaaaatttgtcaaacctgtttataaagttagatttatttattttttttaaattctaaaaataaaagcttatttcaagaatagtttgcaaaagggtgtgaggattctctgatttggagagcaagattacagaatctgctgtgatgctccatggtcaacagttgcctaagcagtggtcaacatgattttctgagagatctgaaatgctatcatcttgtatgtgcttgcatggttagttattcatgtgacatttatttatctttttattacattttaatgaaaatgaaccttactaattgcatcgaattgctaaataaccccgaaatatgtttttgataggtaaataattgtaatatatacatcaagaaaaatggaaggtttcttgagaaaacgggtgcaagccccattaatatctgttttaattaaatgggcataagatttcggcatcctaatccgctcctactaattctgttcatctcctctgcagatattggctatcagttggtgctcagccttcagatc

SEQ ID NO: 11731 - DNA, 12941 bp, Vitis vinifera
  Intron number 10 from transcript GSVIVT01026450001 (locus GSVIVG01026450001) derived from phytozome v7.0 (chr-ID chr 4; pos 23434154 to 23447094)
gctcaccattggctgcaattacggtattgttttccttatgtagcttttatcttctttgttgctcgatatctagttgattttttatatgcaaataccatggaggttctttgaattgttgtcattttcttatgttatgcttttatttttattttttattttatgaatcccattatacaatgttggcaatagctgatacgataagtttcttttttgcttttggattattatggaggtccacaactctttaaagctagtgtggtttgggtggatagtatccatattgatagaagagtattttttaaaggtatagtgtaaaaataaaggatgatgccattttttttagggtcttccattttataccaatgatttaattataagattacaaactttatgttctttttttagattatgcacacttgtagcatgggattttggaaaactatgatgagagagtacaaatgagtgaatgatcttgaatttgaaagcagttatgactatgaattaaaatatttgaaaatgcagaaatattgatggttggattttatagaaatatcaaatgaaaacttgaaaaaaaaaaatttggtggaatgaaaattgataaaatctcataaaatattggaaaaaaaactctatgaaatgatgaaacaagcaataatacaaatattgaagtggttttattgaaaaaaaataacgtatatatgaccaaatttgtgacattcgacaataacatatgaaacatgaaaacacatttaatagtaaaatgatgatatatctagtttgtatatattcaatgatataaaagaaatgatgatagatgtataatttttttttttatttacaaatgtttataatttcatttacaaatttttatttcttatgtatttagttactatacaaaagatataaaaaaactcattaagaagattatcatgatgatttttgtattcctaacaattttttaaatgaaatttgaaaataaaataattaaaattaatttatttactaaaattttgttttaaatttcattttttgcataaatatattaaaaagttttaagaaacacaaatgagtatatacatttactatgcataattactaataagagcaacataccttattggtgcaacactccctttctaaaaattaagagatcagtttttgaattttaattttttgttcattctctctctagtttccaccattttctaggctaccaaacaaggagaataaaggctaaattctccatatataatagctaaacaccatttcatttggtggaggagtgtttttgggtgaagatcacaattgaaagtgcatttttctaaagtgaaagttgattcctattttcaggttcttgaatttttcaatactttaagcgagaattttttgagaatctctcttgattaggcataagtgatccttcttagattcattgagtgattgttcttgcgatgatattcagtaattttcacctagattatctatgagcaacttcttgactagattcttagatgaattagggctaataatttgagaatcaaaactcttaagagttggattaattttgctagaagaagaatcctattagaagcttagatttgatcttagtggttttgcattgtctttgattaagattatcacaacaatgaggaagataattccaaatgttctaatggttttttccaattatagttctttgctcaaggtttaattgttttgaaatctatttgaaaattcaatttgagaactaagttttagatttgactcaaatccttaactgatcacagtccttagttcctaaagccaaaaatgaatttaataaaaagaactaacaacatgacttcaagtttgaacatacattttccttttcataaattacgaccattcgacaaaatcaaggtgtgatccaaaactagtctatgtagaatgcattgggaaatgtaacgtgcttgtttgatgaatataggtctttttcaacaattggagacattgccattgatatagcaatgacagggaaattgtttgaagttgaaaagaagatctttgaggtttgaaggcttccaaggaggggaatggatttttgttgcgaaaaggtattgaggtattgctttctcgatggccttaggaagaaatgagatcacttggctaatagagcaactaaagagggcatcggagttggagggttctttgggtttcatttggaactattagggaaaaacaagtacacatcttttggagatttgttttaacaattcaggtaggttcattgaaatcacagagtttattacaaatagaataactagaacattggttattcctgaggatgataaaagcaaaggatgggaaaccctaaggaagacaatatcctcaatgttgaatctccttttggtgctattgtagtatgacaatcagatgaggcgaatacagaggaactagtgggtgatggtttttaaggagtgaaacactcttatgcaagagttgtcaaaaaggagggtctaaaaaaaggatctttagttccagttgataagtgggctagagctgtgatttgtgaaagttaagaatttaagattaggatattgctggaaaggctattgctagacagttgggtttgagggactaatgtctataaatccattcttgacatataaagggttattctttatggactccactgaaagagctttgtggcttcaagagcatgggaggttgtcaataaaggaggaacatgatattttcttgagatggttgcctagagaaagtacaatggtgcttggaaaattcaggcggggatagatagaactaagaggccttccatttcatttatggaacgaaaaccatttacaacacataatgaaggcttaagggaggttgatataggtagatcattgccctttgaagcttgttgatttatcaaaggttaaaatgaaagtgaagatgaacccaaatgtggtgctgccaacacttatggaggtgaaagatggtgtctggagtttcatggtctcaatttaggtcttcaaagtagaagaagaaagtagacatgagagggatgagtcaactcgtagtagtggtgaatttgacttgatgagtagggtgttttttctaggaaaaattcaagttagggacaagtgatagaaccaaagagaatatgggaaacaattttattccatcttattgttcttcattttcatattcaaacctagagctaaacaaagccttaaggaggaggaaagacgtggcaacaaagaagagaggcttagaagtggaaagcccaccaagtcttaaagattccttagctgatagatctaggcccgtttcttttgttaaggtccattgtggaggaagcccaaaaagaggagaaggttaaaggcccttagttcttacaagaggcaacctagtctaaacggaaaaaggagcccaaacctacttcttaagaaagacccatcagacactttttccctaaaactccaaggcgtagtctccacttctgtggagaaccaacccattgtaggtcataagagttgcccacatgaagggcaaccttagacaacatgaggcttcgtgcaagtagtttgcccccacttgataaaggtttgtccaatgaaagaaaacatacttcaaacttccataaggttttaagggagtgagggtctatagtggtcgatgatgttgtggattttagcatgtatccctttctgaattttagtgttgaaatggatccattgaatgaagcaattcatgtaaagggttgaggattgattgacttcaaccagggtggacaatgtcctatcttagaaataacccaagaaaacactgaagagactgaaggaggagatggattctcgctttgtggtttgcgaagtcaagtatttccttctaatcttgaaacctttaatgagggtcaattcttagttgttgccgcatttcatcttgatcaatcttagtttaacttattgaacttggggtcaaagtctagattccttggctataactccaatgaatgaacctattgtaacatttgtgcttaatgttggcggccccactttcaaagttgtggagtgccttagagatatcaataactaaaaacttaaaagtttttcttttctcaagtcgccacttcgcaaccttggtgagagcaccttagaaccaacctcatccttgttggaaaaatcacacatagtaaaatggccaatgacaagttggttttggaaactatgaaaaacaagctagtcaaaggtagtgtgaaagtcctcccaacgcacaaccatcggttaaggtttattttagaatgaagtatagaccttcacatggagttcttgtggatttttaggtttgatttggtagtttgaaagactcttaagtgttcacatgaagatcattagttgggatattagagggttgggttccaaaaggaaaaggattatgaaggatttccttaactttgaaaacctagacattgtgatgctttaggaaagacagagggagacttgtgataggaggttagtgggcgatgtgtggaaaggtagaaataaggattgagttgttcttctagcttgtggggcataaaggaatcgtgataatatgggactcaaaataagttcaagtgttcagagatggttttaaggtcttttttggtaactcttaagttgagttaagataaagagggaaccttctagttgacatcggtttatggtcctaacaattttaacatgaggaaggatttttgattggagcttcaagacctttttggtctaactttcacgatttggtgtgtaggaggggacttcaatgtcataagaagaatcttggaggaaatgggtgcctcttggttaacccttatcatgaggatttttattagttcataagagaaagtgagtcaattgatccccttattagaaatgcatcttttacttggtcaaatatacaagaggtaggatagattcttgtactcaaacaagtgggatcaaagtttccctcaaagccaccaagaagtgcttcctagatggacctctgatcatagcctagtcttctttgatttcaacctttttaagtggggttgaactccatttaagtttgagaatatgtggttgctccaacttaatttcaaggaaagatttagttattagttgcaggagtgttaggttggcggttagaaattcttgaagaaactaaattttgataaatctatattgaaagattggaatagggtgtccttttgagatttaaaggagaaaaaaaaaagaatattctttcaaacaatgtaaggattgataacaatgagcaagaagagaatctgattcctgaactttctacattgagagccataaggatgggggattggaggagttattgttaaagaaagaggttcattggaggcaaaaaatctaggttaaatggataaaagaaggcaattacaattctaagcatttccataaggtggccaatgatatacataatagaagaataaaaaaagaggctttcaaattgtgatcgctctctactcttcatcaatcgtcaggccggccagcggtcggagtcaacgtgtcctcgacggccacgaccaagggagaatggtaagaagggagggcagtgtatttggagcgctttgaagtggagaaaaaggtcttcaaggttagatttgaaggcatccatgtgggtccttagatttcagttacgaagaaggttccaaggcacgctttctcggtgacttttgaagaagaggaaattgtatggattttagaacagttgaagaaggttgtggagttgtcagaatcttggggtagatcgagaacacatttggtggaaatctatttcaataatagaggaagatacattagaatttcgaagttcgtcacaaatagaaaatcttcctctctgattgttcttgaaggagtcaaaggtagaggatgggaagccctatggaagtcgatattgtctgtgtcggagagcccttttcatttagttatgagaatagaggtggaagcaaagatgaaaaataaagattggggtttaaggaaatgagctctcttacctgttggaaagtgggctagggttgtgatttgtgaaggtcaagttgtggttcaagattggggtgttataggtaacgctttttcgagaatgatgggggtgagggtaatgatttccataaatcctttttcagcttttaaaggtgtcttcttcgtagatttagttgaaagagcaaactggctttaggtgcaaggaaggctagcttcgagaggactagtttttaggttgaggaaatggtcaccaagagaaaatacaatagttcttggaaaattcaggagggattggatagagttgcgaggtctcccattccatctatggaatgaaaatcagttatgattcataatgaagaattgggggaaagtgacagaagtggatcgtgatactttaaagcttattgatttatcaaagattaaagtgatggtggaaatgaatccgaatgtggtgttgccggtgctattgggggtgatagatggtgcctgggtttttatagttgtagtcacaatcatcagagatgaagaagaagaagtttggagaaagcccgagttaactcactttagaagcgagttggcttcaatgggagatggcgtggtgtagggcacttcataggcttggaggatacgtggcaaggctaggatagccacccactttggttggtctcaaatatcatttcaaattcaaatgggcttgtgaagcgaggaattgttataaaggaaaaaaaggcatgcatagggagagaatcatgcctagttgagaaggaaagcctaggcctattctaaggtttcctaggtattagaccaaagcccttaaccctaattgttgcattctttgtaggaagagcaaagagacgattgataatctcttcttgcattgtccgattactttgggattgtggcatagaatcttttcacatgctgggatgaagtgggttcagtctaatagtatttgcaatatgttggtgatctccttcaagtgttttgcaaattctattagaggtaagactctttggaggatcatgtctctctctctctctcttttggattgtgtggagagagagagaaatgttaggattttttaggacatttggaagacgttagagatgatgtgggatcaacttcattttcatgtttctttttgggcttactgtacaaacatttttaaaccctatcattttagtgtaatccagcttagttggcttcaattatgtacaccttagggttgggtttatagggtcaggattcttttacttgtataggctttttattctttttgtatagccctccttgggttagtggaggtttatttagttcttttgatcatgtggccttttgtatctcttgtatagccttccttggttagtggaggtttacgtagttcttttgatcaggcttgtacttcatggggaggatttctcatccttatcatgtctcgtttctctattaatacatatattttgtttctgatttaaaaaaaaaaggtggccaatggtagatgataaaatccttaggttctaaagagggggtaactttaggcaccattgaaaatattttagaagacaatggatttttttggtaagctatactctaaaaccttaggcgattattggaggattggattggtttgtcgtatctggagaggctgttacatggctagaccacccatttctaaaagaacaagaacactttgttgtttaccaattgaataaggaaaaatgcccctagccttgatggcttcaccattgtagttatcaagagtgttgagatgtgactgaagaggacattatgagggtgttctttgagtttcacaataatgagataataaatcaaaataccaatgtcacattcatagtcattatgctaaagaagaatcaaatcaggaaaatctcaaatttcaaacttattagcctagttacaagtttgtaagattgtagctaaggtcttattaaggcatttatgcagatttctccatgaaaccatctacatactagaggtttaagataaataaaccctctttcccctttccttttcactattgcagttgatgtttaaataggatgatgatcagagcagaggaaagtgatttattaaaaggtttcatagtgggcaagggtaagactagagtgtcttttttacaatatgcaaatgacacaattttattttctaaagcctttttggaatatctgtaataccttaagctaatctatttggtttttgggaaaatattatggcttaagatcaatttagagaaaagttatctctagtattaatataagttaggatttggtatccaaggtggattggatgcttgattgtaaagttttagattgaccttcatcttatttgggtctttctttattagggaatttgaaggcatgcaaattttgggatctagtggttgatagaatctcaatgagactagacgggttgataaagccttttttttcttaagggtgagaataactctaatccagtcattcttgtctcacacctctagctatttcttatctcttttcaagatcctagcatcagtagctttaaagattgagaaattgcaaatggattttctttggtcaaggattgaggaaggtaaaaaatatcatcttatcaattgcgatataatgtgtaaactaaaggagtttggaggtttggggttgggaagacttctatgagaaatcgtgctctgttagggaagtgactttggaagtttcatagggaaagtttaggcctttggcatcaaattattttgagcatttatagaacacatcctaatggataagacgctaacattttggttagatggtcatatggatgttcttggaaggttattacacaagttttctaggacattttttcgtatactcgctttatggtgggttacgaggtgagaattcgtttttgggaagatttgtggtggggagatcgaccatcatgttcacaatttctaggtctttatagggttatcatagtggaaaatctcaccatatcagttgtccttgataactcattttcaccttcttggtaccttaactttcattgtagtctcactaatatggaaattaaaaccttgaaagactcatgtccccactcctatgcacttgtctctatttgctgtagattcaagagcttgatctttatcctcctcaggtttacttttagtaaaatcttttttcttagcctcctccattatatcaaatccaattttggtctttgcaaccaaatttttatcgaaaccaaaagctccatcaaaggtcaatgcttttgcttagttagtagcacacagaaaggtttaaactaatgacatgctacaattgagaaagactttacatgtgttttagtccttatttgtgcatcttatttaggagaagtggagaattgatagatcttctctttctatatttgtccattaatattgtagcttctgcataagctttacaatctagacaagatggattgggttctacctaggtgtgtacgtgacgtgttgactatctcatttagagatttgggaagttctatcagaggcaagaccttttgacaaatcgcttgtctcatgatgttgtgaattgtttgacaagagaggaatgctaagatctttgaagaaaagtgaggaacggaagagatgttatgagatttacttcacttctattcttccttgcaagtgtgttgtaccattgcctttagaggcatttcactcaatgttattcaactcaattagcttgtggtttgtaattcaaagggggtgaataacaataagacaagttgagtccaattttaaggagatgttacctatatatacttaggcggcctatacctttgtgtatagttctacttgtatagtggaggtgtttagtcttactttgatcaatattttgtaatttgtgggaaggacctctcattattctcttgcacttttttcatgattactatatcttttattttttataaaaaaaataaaaaaaaaataaaaagaagagaaaaagagggaatgactaagtatagtagctagttgtcttcatagggatttgataagttaatcctagatctattagtgaaatttaccagaaaaatgatgattaaaaccttgcaacaaatgaagaaaacataactttatgattttgaagatgtttgagtgaattggattggaaaataaagataaaaaataaatgaataagaggtaaaagtccatccagatggatgtgtccttggatcagatctaagccttaaggaggattcatcattaagacaaactcacttgcattctcaaaattctggatatctgaagttctaagcgcaagtcatgagtttgctcataagcaatctaagtcaaaatcattgaatcttatctcttgaacatttaataaatacacaaagcatctcctatgccttatcaagaagattttcagagaattcttgcataggatgaagcaatccacaagtcttaagagtatgaaatgggttttacttgtgaaaaatgcactttctagctttgatcttcaccttgagcactcctcctctagatgtagaagggtttagccactaaacatggagaaaccaacctttattctcattgtttgacatcaagaaaatgatggaaagtagacagagaatgtggagggagaattcaaattcaaaaattgaaattaatctaattgtcactacaatgatccaaaaagctctctaacttctaacaatctagcctatttatagcatcacattatttaattggcaagatctcatgatgccacagcatccaatagtaactaaaagcctaagtgtccaaacctcacagaaaattataacaatgattatatctcatcaatttgaggtaaaattatacaaaaaaaatgtccctgtaacaaaatatgtcaatactgtagtatagttttttatactatcttgacaattagctccaaaatcattcaagccttccattttgatactctgatattatgtatcgaaaatggtattgattttttatcaatcaactattaaagctccgatgaaaattggttccttgtatcgaaaccaaaagccaagtttctccacccttctgccaagaattgatatgttattttggtcttgaaatagctttgacatgtttaacactatatcgaaatttacatctagcttcttggagtatgctatcaaactagtatctaatatggtatcaaaatataagatatttcaatacatcctctaaaaaccttccttaactttgcttcatcacgtaatatttggttcttgacctttatccttttcaaagtctaaattgttgagtttttatcccccttttgttgcgcaatcccttagatgttcttattagcagccaaataggtgctagcaaaaatataagctaattagagtagtttatgctctattgttttttttttcttgatattttgagtagtttatgctctgtttcattatagaatctacaatttagagcatagaaaaacctatgatttaagcacaaatgaacttggttcacaaatccaactggatgagcatttactctgatttctctgctttaatttctattctggtgctatgttctttgcatatctttacaaattcacaaaaatccaaattgttctgattagtttagtgtttaaaagacagaaaaaaaataaaaaaaacttccttacagatctcaatgttattccactaggttcctaatgatctagccactatgcttagttgttagttcttttgattaattcaatcatttttagtttaggagctaattggactttgataaatcagagtttagttcacaaacaggagatcgcaattatgttttcttttataaaaatttcagacaaagtattattgaaaggaaaatctgatttgaccgactttcattaaatttaaaatttcattatggcactatcagaaacagaggccataaaataacgaaccgaaagttagattttaaaggtgctaacatggcacaatgaggtttcttgggaaattgtgaaaatatcatgaaaaatcaatgattaattgaaaaaattgtcaaactataacaaaaaatcggagatatttttggaaactccgttggaccaagtttctctccaaaaaattatgttaggggttggtgatacaatgaaatttcaacaaaaaatcacccacattccctgaaattttcttccttggttatgacatatttttatagttttttggattaagtttccaaaacttttacttatcattgtatattctttaactaatttggttggatatttttgagtttgactcttcctggaccaaattttgtgggaaaaaaaaccatgctgtttaggtgagttcacaaaggcagtttctataaaggggatttctttctttttccctttttcccttttggtttgtaggtgaatgagggctttgtgggcaaaagggggctttgtggggctgggagaatgggttcagttcttggtcatgggggtggctaaagtctagttctgattggagtcgacctttgatatagtgatgacatcagttggttatggagtcaactgattaattgttcactttgcatgaagtgaagaatttggagtggttcatatttgggctggtattacctttgatttatggttagatattctccttcttttccttgtaggttgtaggtgaatgaaaggaatgatgaagatgaacccaacaggatactcatttacactgaatcattgaatgtcagttgcttaatttacttctttacatggcaaagtttttagaatcccatgattcagatggcagcaatagttcttctacttaagagataaatattgaagtggtgaaacaatgcttttgcaagcccccattaagggggccttagatctcattttctgagaatatgaacttcttttatttattttgtttgtaaattttttcatttgatttcaagcagattctgaaaaaaat

SEQ ID NO: 11732 - DNA, 21762 bp, Vitis vinifera
  Intron number 2 from transcript GSVIVT01028290001 (locus G SVIVG01028290001) derived from phytozome v7.0 (chr-ID chr7 ; pos 5731377 to 5753138)
aaaagacggtaaatagtattctaatgatgtcagattatgttcctttcaatctaatggtctttgcatctgtttcttttatggggcacttcttggagcattttcaatatttgaacttccttggctgtttggattgctttcttttccatgagttggatggatctttgtgctacttgttttgtcacttacatgtaaatgggtcaaccccttcccttttctattctatgatattcattttacagataaagaaaaaaggatgccatgttgacatgcccttctaatgcgtgaactcctcaatttcatgggcatttccaaataatccttagattgcctatatggtcaagctttgccttcacttattttttcatatcctgctggaaagaccaaataaacatcaattctatgcacactttactggcatcatgtctaaaatctgaaatactagagttctgtttgttcatatattcaatggggtaagccatatacaggaacacagttctttgtgaaaaaccatataaccactgaacacacccaatgaatggagataaaatagctagccacaccacatcaaatgggaacatagttctttatgaaggtacactatctagccaaagcaaatcaaaagggaatatagttctttatgaaagattcttgcatttgaacttctttcttggctagaacatttgttgcacagttctctccctacccatccaaacagtcaatgctccaagtgttgcaagttggtctctaatctattgcttaaggtacttatatttttttaagaaactaagccccttgaacttgcttaggcaattgccacttccaaattcccctctacttcacaatcgtcaaagactatcggcctctttcaaactatctaacaaagataagattcaacctcaatatcgaaaattttctataagagaaaaataaggaaagaaattatgaaaattatggatggtgcccaaaattatggttattgttataaagtttggaaaaatatatgttgaagttgatttgagattattctcataggattctttgtagattttcaactctctttcatgaacaccttgttatgaaataatacccgcaacaataatttgaaaataaaataataaaaagaaaatagagcaaatatataaaacaatgggcaaaagtacttaaatggtaaaacccttctaattatgagggaaaccttcatggagtaagattgaaaagacattcactatgaagacaaaattataacctctctctcaattagagggagaaaatataaaatcttatagaaggatggagacctttttttataacacaaggaagctcccccatttttgtctcttaaccaacttcaaccttaacattttcttgcttaaagtcatgttgcttatattactgtcaagccataaaaggatctacactagttgaatttattagtattaattggttttgtcaagacattcgttagattgtccttcatatgaatcttttgtatattcatggttccttcttccaccacttctcgaacaaagtaatattgaactcttatttgcttagtctttgaatgaaaaattggatttcttacaatgtgtaaggcactctgtctgccatagaatagagaaatcttcttttgtttgtgtccaagcacttttaataaccttttggttaagatagcttccttgcaagcttgtgtagctaccatgtactttacttttgttatcaataaagccacaacaatttggagttttgaaacctaactcatagctcctcttgtaagtgtgaacacatagtccatagtagattttctcttatcaggatcacctgcaaagtttgaattaatatagcatttgacgatgaattttgattctccaaaacataaggtagcatttgtggttcctttgatgtatccaaggatcctcttaactatattacaatgctctctcctcggatttgctatgaactgacttactgctcccactgcttgtgcaatgtctggtcttgtacaaatcatagcaaacattaagctacccactatagatgcaattgggattgagcccctaaaaacaaaacatgatgtaacaaagttagacttgactatccccttgctattccttttacgcattaacattgatttgagcattcaatccgtatttcttacattatacatgacttgggtgcattaagagttgtacagaggatacaagtcatggattccttacaagtagataagttgtctataatcaattcatagatttgggcaatccaatggagattgtagtgtactacctcctaattggaaggatgacttgtcttggctgttgggatgagtttcccatggtgagtacactagtgaatgtgatacattggacaagacctacagtgaatcatcatgtaagactatcagttgtcataaactactatattacatgaactctcaatcttgaaaggatattgagattgtgttgaaatcaataggagatcttgacctatggttgaaaccctaaatagtcatatatctctaaggattgagtcactgttgatggaatctggtggcaataacaattctcaataggaacatcatgatatctcatgggtttaagatagtgtgtcccattaggtgatccaaaggacatatgatcatgttattcgatcacattataagtgagacttgtaactcaaggatttgaaaggtaattggaatcttgataggcgatagcactaccttgttggattacagacaccaattcataagaagtttgcatgtagtggataataggtgacaaactcgagcttcgttttgttgttattacataggttattgaagtgcagttgattatctgtaatgagatgttgaatcaactttagagtttgattatgagggagttggcattcctatgtgtcccattggtctccgctctgagttcatatatcatgttggtataatttatgaggattgaattgactcttcattcactcttgtgcataagggcgttttgataattacgtaaggttgcatagggtatagtgaataaggtttctgaattgggctaattgattaattagatgccttagtatggttaattaattaattaagactttttttaggttagattaagtgactcaaacccatatgacttaacccagtaggagaaacctataaatacccctttatagggttagagtttcctaatggtcttttgactgttgtcttccagatccagagagagtgagagtttaggcatccacccctctaaagtccactctttgaagtgccatggacatggttcgagtcattgggtggaagactttgggtgtacgagacctccaaagcatttaggcatgttcttcactatgagaagattgatctgggaacatctagatccaagtatgaatttcaaatctctagatctttattctaaaatggttttgaagccattattttctgctactttagatttagagatccctaaggatagatgcatgcaccctacgagaatcagagtataggaacggagtaatccggggttcccgatagatgcatacagtgttcaagatagttccattaatttcccttcattactaggactcatatttaaggataatttgtaattcacaaaaagtaggatagaaattggattacaattatgcatgttgaagcggcataaaattttcttcaaatagtttttctgtgaaagccaaatcttatgctttgtctacgtcagtgaatttgcatccctaaaatgttgtttactggtcctagatccttcatctcaaatatcctcatcaattgtgcctttaattctcagacttgatctttgttaagagcttgcaaccaacatatcatccacatataataataagataataaaatcatcaccctcaaaccttttgcaatatataaaatggtctgaattaagtttgttgtacccaaggcttgaaataaaaggatcaaatctcttataccaacatctcaatgcctattttagatcgtacaaagatttggttaacttgcaaaacaagttctctttcccattttctttaaaatcttccgattggagcatataatttttttctttaagctctccatgaagaaacacaattttcacatttaattgcttaaggtgtaaatcaaatctagcacacatagttaggactatccgaattgatgtaagccaaaaaactgcagaaaatatctcattgaaatcaacaccttctttatgagcatattctttaactatcagccttgcacaatattgctccacttggtcattgctatcacgtttgatcttatagatctacttgtttccaatagtttttcttctaggtggtagtgacataagtttccatgtctagttcttatgtaaggcttcaacttccttttgcattgctgccatccataaagatgaatctgaactgtttgtggtctcttgataatttgaatactctccatcttctggaaagagacagtatgcaacatcggttcccataacaaactttgagtgctaagaaggttctcttctttcttggattaactgttacactttaggtgtctcagacttgattggtacttgtttattatgttctggaactacttaagaaaattttgattgttcttagtttgattgtttgtttccaatgaaatttttagtatctgcatttttctttagtgtgttgttagatagtgtacagttatttaggttatttacttttccttttccttttctttccttattgtattgtgggtcccactaacatgtatatatatacccaagtccaatgtgtattattaacatttttttaataacaaaaattagggattctcccttttctcttttttcacatggtatcagagcctagggagaaaaacctaattatttccggtttatccgtgaatcaattctaggaaacctttcagtgaccgtgtttcattctggtcacctttcccatctcctaaagctttctgatcaactgtatcgccgtcagaaaaccctcatcgccgacgacttttccggtgatttccgacaccgaccataccatcaggtgcgcaaggaggagatcttcaaattttgtcaaagcaccggagggagattcttagccacgcgccgaccatgagcgtttcttctccggcggcctgaatctcacgcgccggcgtgtgagggcgcgtggagcactttccgaccacgcgcttccacctccagcctcgcctgacgccgtttagccatcctccatttgtgtttgtcccttccgagccctgcaagtgcattttttggggttttttttgtctccgccggccctctaaacaatctttccggcgacctccggtgactttctctccaccctgagccttgcacgtgtcttaggaagtgttcttctaccattccaatagtgccacatttgtttttatttactatttggtctctcatagccgcggatcctcggttttttttttttttttcagccgcgatctgaagccgtattagggctcttttcaatccaaacatatttcgttctccagataagtagatatggctactaaaagttccattttttcctctgtcatatctggatctcctatgattacttcggaaaaattggttggcagtgaaaattatttgtcctggtttgcctctgtggagctttggtttatgggtcaaggttatgaggatcaccttgttacgcaggaggcaaatatccctgaggttgatagagtacaatggaggaagatagatgcatagttatgtagtgtgttatggcaatcagttgatcttaagattctgcttcatcttcgggcctacaaaacatgctttaaattttggaatcaggcgaaagggttatacaggaatgacatccaacgtctttataaggtggcttcgtctattgtcaatgtcagacaacaagacatggatttatctacttatattggccagattgcctctcttaaggaggaatttttgaccgtgatgcctcttactactgatgttggggatcaacaaacacagattgacaagttcttcatggttcttatgcttattggcctccgtccaaatcttgagaccatccgcgatcagattcttggcagttcctccgtcccatccttggatgatgtgtttgctcgcctcctccgtatctcctccactcagactttgccatctaataacacttcagattcttctgtgttagtttctcgaaccaactctcaaggaggacgcagtggtaaccgaggtagaggccaacgtcctcattgcacctattgcaataagcttggccacactcgtgatcggtgttatcagttacatgggcggcctccccgcattgcccactggcctagtcatctgatcctcagccgcctcaacttcccagttcctccacatctcagggtacttccctcactgatagtgagtatgatgactatctctgctatcaggccactaagttggcttctattgcttctgttgcccagactggtaatgcttctgcttgtcttacccacacatcttctcttggaccttggattctagattctgacgcttctgatcacatatttggtaataaggatcttttctcttctattactactacctttgccttacctactgttactttagctaatggttcccaaactatggctaaagattttgggttagcgcatcctctcccttccctacctctccattttgtcctttatgcccctgagtgtccttttaatcttatttccatcagcaaaataactcgcacttttaactgttctatcactttctctgataaatttgtgaccttgcaggaccggagtatgggaaagacgattggcataggatgtgagtctcaaggcctctatcacctcacctcgccttcaactcctgcagtttgcatttccactgatgctcccctcctcatccacagtcgcctgggccaccttagtctatccaagttctagaaaatggtccatcgtttttcatctttgtcgtcgcttgcatgtgagtcctgtcagcttgggaaacatactcgtgtctcgttcccaaagcgtttgaataatcgggcaaagtctccttttgaacttgtccacactgatgtttagggtccttgtcggaccgcgtctactttaggatttcagtattttgtcactttcattgatgattatactcgatgtacttagttatttttaatgaaaaatcgagctgagttattctctattttccagaaattttatgctgaaatccaaacccagttcaatatttctattcgtgtgttgcgcagtgacaatgccaatgaatatttttctgcaccatttacttcatttatgtcccaacatgggattcttcatcagtcttcttgtgctcatactcctcaacaaaatggggtaactgaacgtaagaatcgacatcttgttgagacagctcgtactctccttctccataataatgttccttttcgtttttggggggacgctgttcttacaacatgttatttgattaatcgtatgccctcatttgtattacacgatcagattcctcatttccttcttttccctgaccaaccactttatttccttcctcctcgtgtttttggttgtacttgctttgttcatattctcactcttggacaggacaaactttctgccaaagccacaaaatgcatcttcttgggatattccagactttaaaagggttatcgttgttattcctctgagactcatcgctactttctctccgctgatgtcactttctttgaggactcaccgttcttctccacctctgagtctcttcctgtttctgaagttttaccccttcccattatctccccacttgatgcagtgccttctcgcccacttcaggtttatcatcgctgtcatcgtgtcgctgttcctccttctttggccgaggtacctgttgactcacttcctatcccttcggcttctcctgccccggctctgcctccttctgctgacttacccattgctatttggaaaggtaatcgatctactcgtaatcctcatcccatttacaatttttggagttaccatcgattatcttcaccctattctgcatttgtttctgctatatcttctgtttctctttctaagagcacccctgaggctctttcccatccaggctagcgatagacaatggtagatgaaatgactactttacactccaatggcacttgggatcttgttgttttaccctctggtaaatttatagttagttgtcgttgggtctacacagttaaggttggccctgatagtcaggttgattgccttaaggcccgcttagttgctaaaggctatactcaggtttatggttctgattatggtgacactttctctcctgttgccaagatagcttctgttcgtctattgctctccatgattgctatgcgttcttgacttctttattagttagatattaaaaatgcttttcttcatggggatcttgctgaggaagtttatatggagcaaccacctggttttgttgctcagggggagtctggtttagtatgcaggttacaccgttctctatatggattgaaacaatctcctcaagcatggtttagccgttttagttttgttgttcaggagtttggcatgttccgcagtacaacagaccattccgttttctatcatcataactcttcggggtagtgtatttatctggtagtttatgtggacgacatcgtcattacaggcagtgatcagaatggtattcagaaactaaagcaataccttttcacccactttcagactaaagacttggggaaactcaagtatttcttagggattaagatagctcaatccagttccggtgtggttctttcccaaaggaagtatgctttagacatcttggaagaaaccggtattttagactgtaaaccggtagacactcttatggatccaaatgtcaaacttataccaggacagggggagcctttaggagatcttgagagatatcggcgacttgtaggtaaactgaactacctcaccattactcgtccagacatttcttttcctgtaagtgttgttagtcaattcctacagtcaccatgtgatagccattgggatgctgtaatccgcattcttcgatatatcaaaagcacatcaagccaaggtgtgttgtacgagaacagaggtcatacccaggttgttggttacacagatgcaaattgggctggctcacccacagatagacgttccacttccgggtattgtgtttttattggaggtaacctaatatcctggaagagtaagaaacaagatgtagtggccagatctagtgctgaagccgagtatcgagctatggctctggcaacatgtgaactcatatggctgaaacatcttcttcgggagttgagatttggaaaggatgaacaaatgaagctcatttgtgacaaccaagccgctttgcatattgcatccaatccagtcttccatgaaaggaccaaacacattaaagttgattgtcacttcattagagagaagatcgcatcaggatgtgtggcgactagttttgtcaattcaaatgatcaactagcagatatttttactaaatctctcagaggtcctagaattaaatacatttgtaacaagcttggtgcatataacatatatgctccagcttgaggggaagtgttagatagtgtacaattatttaggttatttacttttccttttccttttctttccttattgtattgtgggtcccactaacatgtatatatatacctaagtccaatgtgtattattaacagtttttcaataacaaaaattagggattctccctattctctcttttcacatgtgttatctccttcttcactttgtagcatgtcttctacaaagatgacatctttgctgatgataaccttgatgacagtgggatcccacaggcaataccccttaccccatcaccgtaccccaagaatatatatattttctagattttggatccaactttgttcttttttggtcattatacatcacataagtaagacacttaaatatgtatagggaggaatagttcgctagcttaccggtccacatctccataggtgtcttcatttcaattgctgttaatggatacctattaattatataacatgtggttttggttgctttaacctagaatgttttcgacagtcttgtagtcttcaacataactttcattctttctacaagaggtttatttgtccgctctactacattattatgttgtggagtgtaaacaacagttttctatcgttgtatgccttcttgactataaaatgcattaaactcttgaatacaaaattctcctccattgtttgtcctcaaacatttgattttctttcccatttcaagctccctccgtgctttaaaggcttagatactagaaaaacatttgactttctcttgatggggtatatccaacatcttttgaaataatcatctacaaataataccaaatagtttgcatctccaagagatgtaactgataattcctagacatcagaatgaacaaagtctagaatgcctttaatttttacagtagatctactgaatcttaatctatgttgcttattgataacataatgatcacagaattgtagacttacaattttgagtcttagaagcaacttttgatttaagagggttttcaagcccttttatgacgtgtgactaagtttgtgatgctacatcattgccaattcttctctagagtttgcaacaaaagtttccacctcctgatctgtcctcttatgcaacatgtagcaatcttctttgccttcatcactataagtgcacctttgataaccttcaggattccccgtttaccatggaattcatatccaaggtcattcaattgtcccatttgttgagagagagagagagagagagagagagagagaggagaaaaaccttattctcattcattgtaatctctacttacaattgagagatatatatatacaaggctaggagtcctaactaccatacatgtgacctatattaacaaggaaagatagtatactatacatacattatattcaacactccccctcaagctggagcatatacgtcatatgcaccaagcttgttacaaatatatttaatcctaggacctctgagagatttagtgaagatgtctgctagttgatcatttgaattgacaaaacttgtagcaacacatcctgatgcgatcttctctctaatgaaatgacagtcaacttcaatatgtttggtcctttcatgaaagactggattggatgcaatatgtaatgcggcctggttatcacagatgagtttcatctgttcatcctttccaaatctcaactcctgaagaagatgtctcaaccatatgagttcacatgttgccaaagccatagctcgatactcggcttcagcgctagatctggccactacatcttgtttcttactcttccaagatattagattacctccaataaaaacacagtaccctgaagtggaacgtctatctgtgggtgagccagcccaatctgcatctgtgtaaccaacaacttgagtatgacctctgttctcgtacaatacaccttggcctggtgtacttttgatatatcgaaggatacggattacggcatcccaatggctatcacatggtgactgtaggaattgactaacaacactcacaggaaaagaaatgtctggacgagtaatggtgagatagttcaatttacctacgagccgtcgatatctcccggggtctcctaaaggctccccctgtcctggtataagtttgacatttggatccataggtgtgtctaccggtttacagtctaacataccggtttcttccaggatgtctaaagcatacttcctttgggaaaggaccacaccagaactggattgagctatctcaattcccaagaaatacttgagtttccccaagtctttggtctgaaagtgggtaaaaagatgttgctttagtttctgaataccatcctgatcactgcctgtaatgacgatgtcgtccacataaacaaccagataaatacactgccccaaggagttatgatgataaaaaactgaatggtctgctgtactgcgaagcatgccaaactcttgaacaacagaactaaaacggctaaaccatgctcgaggagattgtttcaagccatatagagaacggcgtaacctgcacactaaaccagactccccctgagcaacaaaaccaggaggttgctccatataaacttcctcggcaagatcaccatgaaggaaggcatttttaatatccaactgataaagaggccaagaacacatagcagccatggagagaagcaagcggacagaagcaatcttggcaacaggggagaatgtgtcaccataatcagaaccataaacttgagtatagcctttagcaactaaacgggccttaaggcgatcaacctaaccatcaggaccaaccttaactgcatagacccaacgacaaccaactgtagatttaccagagggtaaaacaacaagatcccaagtgccattagagtgcagagcagccatttcatccaccattgcctgtcgccagcctggatgggaaagagcttcatgggtgctctttggaagagaaacagaggatatagcagaaacaaaagcagaatagggtgaagataatcgatgataactcaaaaaattgtaaataggatgaggattacgagtagagcgagtacctttccgaacagcaatagggaagtcattaggagaaggcagagccggggcaggtgaagccgaagggataggaagtgagtcagcaggtgcctcaggaaaagggagaggagcaacgacacgagggcgacgatgataaacctgaagtggtcgagggggcatagcatcaggtggggagacaatgggaatgagcaagacttcagaaacaggaagagactcagaagtggtggaaaagaatggtgagtcctcaaagaaggtgacatcagcggagataaagtaccgatgagtctcaagggaataacaacgataacccttctgaagtctggaatatcccaagaagaggcacttcatggctttggcggaaagcttgtcctgtccaggagtgagaatatgaacaaagcaagtacaaccaaagacacgaggaggaaggaaataaagtggttggtcagggaaaagaagggagtgaggaatctgatcgtgtaagacagaggagggcatacgattaatcaaataacaagcggtaagaacaacgtccccccaaaagcgaaaaggaacatgactatggaggaggagagtacgagctgtctcaacaagatgtcgattcttgcgttcagctaccccattttgttgaggagtatgagcacaagaagactgatgaagaatcccatgatgagacataaacgaagtaaattgggctgaaaaatattccttggcattgtcactgcgtaacacacgaatagaaatattgaactgggtttggatttcagtataaaatttctgaaaaatagagaataactcagctcgatttttcattaaaaataaccaagtacatcgagaatagtcatcaatgaaagtgacaaaatactgaaatcctaaagtagacgcagtccgacaaggaccccaaacatcagtgtggacaagctcaaaaggagactttgcccgattattcaaacgctttgggaacgagacacgagtatgtttcccaagctgacatgactcacacggaagcgacgacaaagttgaaaaacgaggaaccatcttctggaacttggagagactagggtggcccagacgattgtgaatgaggagaggagcatcagtggaaatgcaaactgcaggagatgaatctgaggtgaggtgatagaggccttgagactcacgtcctatgccaatcgtcttccccgtactccggtcctgcaaggttacaaatttatcaaaaaaggtaatagagcaattaagagtacgagtgattttgctgatggaaataagattaaaaggacattcaggagtataaaggacagaagtgagaggtagagaaggcagaggaagggccaaaccaatacctttagccacagtttgagaaccattagctaaggtaacagtaggtaaatcagaggtagtagtaatagaggagaaaagatccttattaccagataggtgatcagatgctccagaatctagaatccagggtccaagagaagatgtgtgggtaaggcaggcagaggcattaccaggctgggcaacagaggcaatagaagcctgagatgtctgagatgcggaggagctcggagtctgaggcagcggagaatcagaggactgggccatatgggcagtgcgaggaggtcttccatgtaactgatagcaacgatcgcgagtgtggccaagtttattgcaataggtgcaatgaggacgttggcctctacctcgggtaccactgcgtcctcctcgagaggtagtttgagaaactaacacagaagaatctgaagcgctatcagatggcaaagtctgagtggacgagatacggaggaggcgagcaaacacatcatccaaggacggaactgatgaactaccaagaatctgatcacgaataggctcaagatccggacggaggccaataagagtaaggaccatgaagaacttgtcaagctgtgtttgttgagccccaacatcaggagtaagaggcatcacagtcaagaactgctccttaagagaggcaatctgaccaatataagtcgatagatccaagtcctgttggctgagatggacaatagcagaagccaccttataaagacgctggatatcattcgtgtataatcctttggcctgagtccaaaatttaaaacaagttttataggcctgaagatgaagaagaatccggggatcaaccgattgccataatgcactacacaactgtgcatctatcttcctccactgtacgcggtcaacctcagggatatctgcctccttggtaaccaagtgatcctcatatccttgacccataaaccaaagttcaacagaggcagaccagaagagataattctcactgccaaccaatttctctgaggtaatcagaggagatccagagagaacagacgtaaagatctgatttttggtggtcatattcacgtatttggatagaagagagccctaagatgggtttagatttcggcggagagagaaaaacagtgaaaccacggctgtgagaggtgcaatcaatggagaaaaaaggtcgtgacgtgcctggagaggaagagaagcagcacccaagcctcggggatggagggggagccctgtcggaggtggccggaatggcaagaaagccaaaaacagggaaaaaatggagatgcagggctcggggaggactgccggagggctagaaggccaagacggcgccggacgagcctggagaggtgtcggaagtggccggaaagtgagccacgcgctgtcacgcgccggcgcgtgggtgacagtccggaggagaagggcttcgcgtgggggcgcgtgagatgccggttgccggtggggtttccactggcgtgtagatcagcctccggcggttcggaatatgtggtctttgcccggaaaaaaggtcgctggaaaatttcgccggaaaaggttgccggcgtggtggagatccgacggcgatgaggttgtccggggtggttcggaaagagagtgaggggaccggagtgaaaacacggtcactggacggttcgccggaattgagtacacggctaaaccgaaaaaattaggttttatcctttggctctgataccatgttgagagagagagagagagagagagagaggagaaaaaccttattctcattcattgtaatctctacttacaattgagagatatatatatacaaggctaggagtcctaactaccatacatgtgacctatattaacaaggaaagatagtatactatacatacattatattcaacaccattgatagaagattcttctttaagtccttcacatgttgtaccttcataatggtgcgaatcacgccatcatctatttttactttgatggagtcaatgtcagcaatcttcaaggcataatcattactctcatatgcattaatcctcctcaaataggttcatattggtgaaactattctctatgagaagtcatgtgccatgttactgctgagtcaattaaccaaccttcaacaaatctttttctacctcctgcaatggttgttacctcgttgtacaagatgtcgtcttcatctgaagtacttgctacacaactctgagtatttgatgacacaaattctttccctttcatgtttcttttgatccctcctttgtaatgctaatactcattttccacgtgcccttgctttccatagtaataacatttaactttctttttaccctaagactttgacatgtactggttgtgactcccactagaaccacattctcttgattttcctctaaaaataatcagagcctcggtttgctgagaggatcatattctacctgccttgtttttgcgtctgtattcttccttaagtgtagtagccacaccatcattaaagactgacattgtcctccaaacacaattggccacatttatgatgagatgatcatatgaatcaggtagacttttgaatagaagttcaacacgttctttcttttctatgttatgctccatagctgataattgagagaatagagtttttagggtgttgatgtgttcagtcattgaagtagattctgacatttgaagaccgtatagtcttcttttcacgaagattttgctatgcagcaacttggctttatatggttttttcaaagtatcccaaatttcttttgttgtctttaattatgagatgctgacaatatattatctgctactgctaaatacaagcttaagacagacatcctcatccatttgctcccacttttgtcttgaacattttctagcctttcaccaattacttttaggcaattttcctttcttaagatgactttcatttttcacagcccaaaattgcttgcattgaacttttctatttcaaatttggccattatttgtttcacttttacaatgaacagtaacccataatagtaataagtacctatgtgttaaatactaggaaagtccttaggaaagtggatgagtcataatggtcttacttaaaacctgctttccttaggctcttattactcgtttgacataactttcttagacatactaaccacacaagtaaccacttactgtcttaaacttggctttaatatcactgttataaaatgatatccgcaacgataatttgaaaatagaataataaaaggaaaataaagtaataaataaaacaatgagcaaaagtactaatgtggtaaaaccctcttaattatattgaagacttccatggggtaagactagaaaaatatccactatgaagacaaaattataacctttctctcaattaggaggagataatataaaagcttacaaaaggatggaagctttttttttttttttggaatggatagtggaggaggcttccttttatagcacaaggaagctcccccccccattttgtttcctaatcgatgtgggattacttcaaccataacacacctatgaatgaatttatttcatttttcttgtagatgtatgcgcattattgaaccacataaattcctttttcttacatgaattattttttctacatggtatcaaagtaattatttagattcaataagattttttggtacatatttttttattgtttccaataataaagaaagaaatgggtaataagtgagttagaaatcaagatttttctggcgacaaggaaaatgtcaaagatggccttcctagagtagtccttataacaaatttggacatgcaaaagatcggtgttggatttattattgataaagccaatgttagcacaccagatatttctatcttagttgaacaacttgtccaatgtcttaaaaagcttcggaaatctaatactttagtctttgactcttctttatttactcaagtttcaaataatcttcaagccttcctatccttactttctaataatggaacttgggtaatcaatttaggtgccacaaaccatacgacaaataacctaaattttttattaggttttacatcaaaatcgaatacatcaatatttctttcaaatgatgcttctattttcatgcttggtaatggtaaaattaatttctttagtaattattctagtttagaagttctctatattccattccttacttaacttgtatccattggaaaatcactaacattttaaatcgtgatatcattttttattcttcatttgtggtatttcaaaattatagcatgggaaaaaatattagtgaagatgcttgttctcatggtttatactctcttaaataaatagacaaagctttacttttagtatcctctcacaatagtcttgtttgaaataagcatttaggttacctttctagtatgtcttcactcatcttttttccttttatatttcttgagtctcatactagtgaggtttctcaatttttaaacaaacccatctcctgtttgattgtttaacatctaaatcttgagttgattcattcatatttatacgatttgcaacccacaagtattatttttacgctcgttgacaaattttcccaagttacttggctttatttgttgaaattgaaaacataggatattcatgtttttaagggttttttgtaatatggttgctaatcagtttggtggttgcatcaagattcttcggtttgataaatggtatacaatacctaaatgctttttttttctactaaatgtataatggtcaaaggattatacataaaaccaattatgttaatacccccatgtagctgaaaggaaaaataggcatctttaaagaataataaatccatcatgtttcagatgaatgtcccaaaataatattggtcttatgtagttcttattgccagttatttgataaattggctcccaagttgtattcttgggttataaatctactctaaagattcttaaatctcaaaaagtttatatttttgcttgtaagtttttgaaatcttgttgttatgtacatgtttctccagtatatcttggtaaacttgaaccacatgccacaaaatacattttttcttggtattcttccacaaaaaaaaggatacaagtgtgttgtgaccttagtaacttgaaagtttggtactaaggaggtttcaagcctgttagggtccctaaatggttagggttgatgtcgggatgtgtggtaaaggcacagttcacatggtatcaggtttgattcatgctgctggttgaatgccttagattaccaggtgttggttgtgacaagcatggttggcacctcgaggtttgggcccccatgaagattttgaagggctcaacatggaaggttccttggtttcaatgttatgattcatcttcccattattgtcccaatgtagactcatctctgaattccaatttagattcaactcctatctaagatagtgagtcaaatgttaagatgatatccaacattgttgtactcgaatctcaatgcattcaagaaatcatggatattcaacattctccttttaatattgttcaacaagaattcgtcatccactagccaatatctcatttatcatgtacattttctcctatttagaattacttgacttatagcaatgtatctcaatcttattttgccttcttaagcaatgtttctaaaattagtaacatattcataatggagaaaagtcatgagaaaagaacttcaagcacttgatgaaaatactacttcagatactgtcaagttaggtaaacaaaaataaaattaacagaatgttggtgggtgtataaaatcaaatataatagtgacaaacaattagaggtataaggtgtatctgattgcgaaaacgaatacattataagtgttctcttatcattggtaggtaatcttgatttgccactacttcagatggattttaaagatgttttcttgcatttagatttgaaagaagtgtatactaggcttccactaggatatcctcaagagtttacaaaaggtccaattgcaagttaataaagctatttatggactcatgcaatcaccctaagcctggtatacaaagtttagctctgttctaatgaataatggttttcaaagtggtaaaactgctttatctttattagttaaaaaaggtgcttctggcattattatggatttggtttatgttcatgatgctagcattgccaatggaagaactgatgatttacagacccatagctctctctctatacaacatacaccagcattgatagagaaggctttccccttgccttctaatctggcagttctcttcagtatttatttttttataggaaaagaaccaagaggaagtattaactttgtactcaaccttttctttcaaataagttcactaaagctaaaagacccttgcctctttacattaagcaatgatcaaaaaggtggttagaaaagaagaactactattcttctaactgcaacaaggatgaagagaagcaacctctgctatctttcaattgtttaagttttgattggagtgctgattccaggaagcatcccatctaatggagtccaaaactgattcttgtggtcccttagatatgagaaagcttgttacatttagggaaatatagatattaaggatgtggtcagcatgggatgaaccagcaacctacaaaatattggtttgatgctttccctactgaggattcccattgcttatatttctcaaaattctacattctcaattggacaaatcgtcttattttctcgccaatgttttatcatttcttcttcaaaaagcaatttgtgtaaggattcctatggtcagcctcattaaagaatggaaacaataatatgtattcctttggtgttcctttttagcttctttctcccaaaaactatttcctgtcagagttcatatgtatacctttttcctccacttaataaaagcctcatcccatttacttctggttggctacctcaatcatttcttgtcattgagctctagaggcttattctccattgcacaaaagatgtagaaaagctactgtttgaaatgcattacttagttttctcacccttcatcgttttctgctttaaaaaggtgctgcttttaattaaaaatttcactactttgtttcatatcatataattaatatcagtgcactatcttgcataggttcatggatgggtctgtgtccaagtgtttgatcttttacagaagttttaagatgagtggatatggttaagagggatctgaataatgggtatatacacttgggtaggacataaaaaaggaaaaaataaagaaaaatcaattaaatatcaataaaaaaacaaagatatctttgataagaactctccgtttctatttatccttatattttctttcttatcctaaatagttttataaaagttcacttctagtgcaattttttttttcaatttagttgtctgttatggcagttgaaaataaaaaacataaatccatgaaaatcaaatagctagatccaaagaaaagtgggagtcttctataaggaccccatacttacttattatgtccacatgggtatgctcagtgaagttgaaggatctgggtatcatagcctctgcaataggggggttacatccttaaatcaaatctaatgtttgtcttaattttgtaatggggcctaattttctaattggcattttcctcctttgatattggtcaggtggttgcaaatttatcaaaattatatccaaaaga

SEQ ID NO: 11733 - DNA, 5580 bp, Vitis vinifera
  Intron number 5 from transcript GSVIVT01015703001 (locus G SVIVG01015703001) derived from phytozome v7.0 (chr-ID chr3 ; pos 15945035 to 15950614)
aaaacctgcttggatcgagtccgaatcagaacaatgtgaacttcatccccatgccttgcatttgagaatattggtaataacaatactcaaataatttaaaatgttcttagaacatggataatatgtaagtgttaggaattgctaaggaacatttatgcttttatttattaatgttatggtggatgtttttgtgtgatttgagagaataattaatgaaataatttctatcttctattttattaccataggcttgataaagttcatggttaaagcactaattttctagcaaacttgaaaatttaatcagttagggggtgtttggtaaagtttgacacttattacttaatgacttaagttgactttaagttaaattatacttatgttgttgacttaaaatttattatttaattcttactttaaatattaagtttgtttaataagacacaaaaaaatcacttcttaaatatgctcatgtatgtaatatagaaatatataataaatgggaaaatgggtaagggacaagaaaataaaatatcacaataaataggtcatgatataaacatcaataaatacgaaaagacttgacagggttgaaaatattaaccagtgtcttttcttcatcatagcaaaacttagattctccttattgcatctcatctcttttgctcactgaaaccccattacatatgatccattctcattgatagcctacaaaacaaatataaaaaaacaccaaaacatatatcattatctaagttcccttattagtttcctttgtttttttaataaaattttataatttgtaaatttatgaaagtaaaatatcattgtccaatagttaaggagcctcaattaaaaggttttttttccatatatatatatatatatatatatatatttgtataaatagaacataatgttatttatttaaggtatagtttctacttttttttaaatttaaaaaaattatttctactttcaattcataaatttgtttaatggttaggtacaccaaagcttgtattgaatagtttttatatatatattaagataaaattattaaatagtttgtttaatggttatatatatataaagataaaattttctcataaaatatttgcagtctttgtgcgtaaacttagtaactattttttatcaatattgaataattttaactttccaagttatgcaaaccactttcttattttaataaaaattgaaatgccaaaaacaattctcctggcaaaaaaaaaaaaaaaaaaaaaggaaagaaaaattctctttccattcacgcaccttggaaattttcttataacatgttgagtcacataacccttctcaactcaagagagaaatatgggttgttttagttctaaggttgcttcctctagtataatcttcaacctttttttattatcactggtttgtggttttttctgttacttttaaatttattctaatttttttgaaaggtaacattagtattcaccttttttttttctacagagaataaagaagtgaaaaatagagtatttagaagggggtgaaaagtgaatgatccatagagaatttggagtattcaaccactttggcaatggaatatgataatgagatgaggtggagggccaaacaaaataacaaaagcaagctaaacaaattaaaaagacatattagaagtcatcagcaaaggcggacttcatctcaatttcttgtgcaaaaacacaagaacaaagaaaaagacaatttaaaaaatcaaaagtcttaccaattgaatgcagaaattacaactccagcccaaagcggcaaaaaacccatgactaagaattagctcctagatattagccctaatttgggcaaaaacccatgacaaaaacgacccatgtgatattctttcattacagatctgagcaagataatggcccatgcccaccccaacccttgctaataataactggatcaagaaccccatagccattacccacatcaatacccataacaatgaatatcctacattggctccagcctcaagatccccttctaggtttccagggttaagaaatgtagcactcatccatggatagccataacttcttccaccagaaggacgaagtcagaaaaacatcaagagaatctacggtttcatcatcgatatcaagactaaagttttctctctatgatggaaatgataacggtgacaaaggaaattttgggaaagtattcagaagaatgtatttgatggatgagagatcctattcggttttgtacacaagtttatttggtatgagcatttggggggtttgaaatggcataggaatgtttggtggatgagagattgtggaaggggaaatattgtagggaggtatatttatacctataattcaatgatacttttctaaagtgccaaagttatgggattaatgttatcacgctttgaataagcgccattatgtagcgaataatatttaaataagccttatcaaacgatgatgcttctaataagcgccatggattgaaaaatactatagtaaacagtgatgcttccaataagtgacattgaatctcatattataatctaaataatgacgttttttaaaagtgtcaaggaatcaagcatcattaatttcgatttttgtagtagtgaaattatcaaagacatatttatcctcataaattaattataactaaagcaaaggggttcaagtaacaatggaagttgtggagtaacaaaagagatcattgaggtaattaggacaaatggaaataaaaaggtaaaatgaagatgtagacttaagaataagttaattatttttacttattacttaaagttgtttttgactttaaatcaccaaacatacttaatttacttaacgaattaaattaagttattaagttactttaagtcagtttaccaaacacccatttagtatctttataaatactttattttgtcgttagtgaaataatagaaaaattatatcactaccattttgtttaagaaaattctaaaaagaaaaagatttttcaatcatctttttttattgcattctaatatggaaaaataataattgaatttttaataagtccaatgattacttggcacattaatgtgcaataaatacaaaaagagatggtaatcgacaacaagtatattaagaacaacattttgatttgccttctttgagtacaatagttaagagtttctaaaggaggaagttggttatactaattcatttatgttaataaataattttttgtactataataattctctttcaatagttagaaaaaggactataaatttaagaggctaaagtattaattatacattagtaaaatcaatttaaattccaaatccaacactttacctctaattactgactccataaaattataaaagaaagtattcttttttgcactctaatttaaacactgattcagatttttaagtaaaatcgactttgaattaacaattttaaagtgaaatttcttgaaataacatccacctaaacatgcatgttgttcaagaaatagttcatattggttagcagttgacacaaatttcttgagaggccaatctctgaacgttagtttttgacttttccattagatctccataaaataaagcatgttgtctattttctgatggtaggaagtagaaggtgtataaatttgccaaaactatatacccttagtctttggttttaaataatttgaggaaaaatggaaggaaacgtagaaagaattgaataaaaaataaatttaaaactaataaatttatttttatatattattttaaaaatagatttaaaaattaaataatttgaaagttaataagtttttaactaattttacttattttttttattttttttattatttttcataataaaacacgataaaatcattaccactttcccataataaaacacaatattattttattcttatagattagagaaaatgtgtttgcctacattattttatggagcagggccaacacattattaaaatcgttaaatatactttgcctacattttatcccttcagctttgatgtgttttacattttggtcatttacattcaaaatccaagactttccctctaattacgactccattaaattataaaagaaagtaaacactgattcaaatttaagtaaaattgattttgaattaataattttaaagtgaaatttctcaaatgctttcaaaatctgataactattaactttgattttaaagagaagtttgcactgctagttgtgggtatcttttggcttggacgtgcccattggatcatggtccaatttattcaatttgggtttggccatagttcaaataggttggagctaagctataggcttatggcattgaggttttaggaactttcatagtggcctagtggtaaatctaatacctaaagaggctccaaaatgttagggttttccattgtcctgcaaacccagctttggcatactagtgaatgtcaccttttgtttaatggaactaaagtcatatttggttattggaaagtatataaaaaaaaaagtaaaaaaattaagaaaaataattatttttcatgtttaattgtattataaaaaatataagagaaaaacaaatataattaaaattaggtggaaatttatgtatttttaaattatttaatcatatatgaatgaattaaaataaataaaatgagtttcaaatagtatataaaaataatttattggttttgactttatttttttatatttttcctctattttattaatttcctaaattttctaagaaacaaatgtagccctaatttttgtgcatcacttgaaacaaggtataaggatagatataaggatgggagattttaacaactgattcatgctagaattcttgaaataacatccacctagacatgcatgttgttcaagaaatagttcatattggttagcagttgacacaaatttcttgagaggccaatatttgaatgttagtttttgacttttctattagatctccataaaataagcagtgaaaaattgagggtgtttgcataattaatgtaaagcatattctctattttttgatagtaggaagtagaaggtgtataaattctccaaaactatgtatccttagtttatgtttagttctaaaaaatttgagaaaaaatggaagaaaacgtagaaagaatcgaataaaaaatagatttaaacttaataaatttatttttatatattattttaaactcattttagttattttaattttttatttaaaaattaaataatttgaaaattaataagtttctaattgataaactcactaagtttctaatttatttattaaataattaataaatttatcttaaattcactaagtgattcatgctattcaataataaaaccgaaggttaatacttgcttatttcatgaatttgggttcatctagaattacatagtagctacttactttaattttttcgaagttccaatcccatgagatagcagaatagctaaaaagttttgttttgcttcttgttgtcgccactgcagtgaggtttgtctagaatatacccaaagcatcagaa

SEQ ID NO: 11734 - DNA, 11654 bp, Vitis vinifera
  Intron number 5 from transcript GSVIVT01032644001 (locus G SVIVG01032644001) derived from phytozome v7.0 (chr-ID chr1 3; pos 1877443 to 1889096)
gaagtggtactcaggtatgagtaattctttgtgtaggatatagtttttactttgttatgctttgctagtgcagtctcctatgtagcattatcattgaactgatgttagaaagaaaaggctgattagcattatgtttctttttaagtcattttcttaagggtgctcctctttctgtgtgcttatttataaacaagaagtttaatggaagttaaaacttattttttaatacaattgttcatttctgataaaaaaattaaaaaaaaattctattaaaaattacattgtctgtttatttgttctctctctctcataattttgtgctactgaagtgagtgcagctttatctattgatgaaaatattggctgatgagtctgcagttttgaactttatagttatattatgttgaatttggtaacaatagtaacactcagcagattggagagaaaggtgacttctacctattttttataaagcagcacaacattagaagtggaaacagtaagtaacaaaaaccttttcagtaaggcacctggcttagccaactaatctactgtctggtcaatgaatcaaggaatttaatttccaaagtcctcccttcatctttaaacgcaggaaagaactatggtcaagaatcctctaataggagattgttgatattgaatacatgaggaaatcctcccaagagggccagaatccagggcttaatggttaaccccaatcaaacaggcatagagaaaaatcttaagtattctgtcccagtgatcctgaaagcatcaccaattttcagctgtctgttatttcctcaacaagtactcttttttaagttaagctcaaggcagcaaaatggatgtgtttcccatcttgtacacttaatacctcaaagctcttgctagaacaataaacagttttttagttgagcataatcatattctctgcagtgcgcaaaaaaatcatcagaaactaaaacacaaacacacaaagtgaaaggctgtgtcacatcccataatgactctacatgcttccatctgttacaaaaaatctatacatccctttttaaccaattttcaaatgaattgctaatgtagccacttctttgagagccctgtcctcagagcttcctctaaagtccataaaaggaaaaatcatactagaagctatatatttaggtggaacatgagtgatctcaccaaccctaagtgacttgtgagattatctcaaagcaactaggcagtgaagaaaaaggagaataaatatttcctcataatctagactaagatcacaatgcttgggactaagggttttcaaaagacctcatccatcatgtcattgatataaacctttttttgttttgatttcctttagtggttagaaaatcagttaaactcagctagatatatagattaagattgaaccaaaagactatatactacttcaaatcatagaatttattacaaacacccagaatacatactccatatttcacttcatgaaggttgataaaaggccttggttgagcacccgattttattttgctctcaaaatcattgtaattcctaatgcacaatatgcgcattaatagatacgagcacaagcacatagacaaaataagaacaacaataaccaatatgatgcaaaaccaatgaccttgaaagaacaatatctgattttttaaatcattttggcaatatctgattttttaaattcacagtactctttaaccatatttgttttatccaatctatatgattaaaggaacttgcatatgaacaccctaaagaatgtttctcagcttatgatttaacttatcaagtccttgggaaatcttctgttgctatcaccttgatgagaaatgtttcctggcctatgtcatatcttttattagtagggtggaagtaaggctagtcctctaaaataacaaggtacaaaacaaaatcagatctcttattgtggtcaaaatagttagaatgcccaatggtcacatcatacaatagcttattgaaattgatgccttctctagtagtcaccaaggaaccctatttatttaaatgttgatcactccattggaccaattttgtcttccatgcaatttcatgttatagacatgccaaacacatcacatgctacttaggagttcattgatacacaaaataaagcatccttccacatttggttaatgtttgaaagctgtgtagaagagtacaaaattcatgtatcatcatctttgcacgtgtgtcatgaagtttacatgttgaatgccattttttccaacaagattgtactagatgacaaacaaattctcatcaagatgaagagtattttggtcctaggattggaacatatcatggtgatgatttctctaaaaaatattgaaggataaatagcctcactctaaggatcagcctaaagcaaccaaaacagtgtctttagatgtgctttcctaatatgaaaataatacactacttgttattgcttgtaagatcaatgccttaagacctcttttgattcatggtatagccaaaaacaagaattgtattgttttagacatctagtctagaaataggtattgtagaatttaattgttaggatcaatgcattagccctcttatttgaaaatgtcataggttaacacaatctaggagctaacaccaaatctcaagtcaaaacaatctcaaaatctcaggcttacatcaaggggctaacgccaagtcctaagcataccaaatcttacagctaacacaatccttaggccaaaacatagtctttattaagcaaggacaaaaagttctcaaactatgggggaaagtttggcaaaattttgtgtgtcaatagtggccaacaccataaatggtagacaaatatccaccaagccttgttaaccaatttttttcttgattttttaggaaaaatttgttagcatatattttggtgttcatgtcagtcaaggctttggtcaagccaatcaaactccaacaattaagaggatggggactcgaactcaattctcccataagggaaatagggtccttgccatgtgggctaattaactttcattatatatatatatatatatatatatatatatataaagatatccatttttgtactaagtgttcggataataaagacacaaaaatcaaataatatgattaattagaataatatatataataagaaacaatgatttcatggaattgaagtaataagtacaaagaaggatgggcaatccttccaagaagcactcagacctatatataaagaaatataaaaaagatggatgtgtatagtagaccacaaagtcaaatctaactacaattcaaaaaggtataaaatttcctatataaaaaaaaagaaccattgtgaaatgtcaataatatagcgcaagcacctatcaaacttccatgatcctctttctttgttatcattgatttccaatggtcttcactgaagctattctttgcattaagttgtcttcatttccatcatcatttttttaatctttagtgttgatctatctctattttgatgagcattatgttgaaaatttgacttgaaacactatattacaaaaacaaccacctaccaatgactatcaaaaccctcaatcctcatttagacataatggctgaaactattttattacctcaacatgagtgcatatccttaaagggaaacgaccagttccctcacttgattggaccaatgtcaagtgaagataatcccaagtttgcttcctaggatgaggagaactcaatggtcatatcctagctttagaacatgatgcagcttgaaatcaatggtgcatgtattttcttgaccacaaaaaatgaaatcgagaggtagtgaaatagacctattccaaagtccaagatgctactcaaatttacaagataaaggctaagattcactctacaaaataaggtattttatccataattgagtaatataatgtcatgaaagggttttggtttgattagactattatcaaaatcttaaaatgaaggatgatgctatgtttcttaagtttattgaaagagagtaaatatttcaattcatgattggacttaatgtggaatatgactacgtttgtattcaagtacttgagtggaatcactgacacctttgaatgaggtattttcaatcataagggcttaaaaatgaggagcataatgttagacactttggcaagtaaagggtctatccttgttgttttaggatctcaaagcaatgtaatccctagcacaaattatgatagaggataggtatccaagcaaccaaataataaggataacctctcgtatactcattgcaagaaaccaaggcatataaagaagatttgttggtaattacatgggaaaccatagtcccttgacaggaattgtagaaaccataaatagtaacagtctaaacagcaaggaggccaagtaaatatgacactttgggaagagaaacccagccatgagaattcaaacagtttggagtttgagagactaaaaaatgaagagattgaaatattttggaatttgctcacctccttagataagcccaatgcatcatactccttagccatatcaagtaagtactccatgactagtttttttaatgcctcaaaagattgttgacatggaaatttagttatagactcgggtactaccaatcacatgggcactactctcatcatttctcatcttatagcccatgtcccaaaaaccaaaaaataaagtttggttgatggtagtttagttactatggctagacaaaggactattacccctaccccatatattttcctaaaatccgtatcatatgttcttaaactctccttaaatctcctatcaattcatcaagttacaaaagatctaaaccatcccattgtgttttttaggacctggatacaaggaggatgattggtcatgttagggaataggaaaggctccccttagcttgattctaggagtgacaatggtagtggtttatcttatctttcaagtttttcataaataataataataataatacaataaaaataaaaataaaaaatctaattatggttgcatcatttacctttaggcaaggatgaaaatattggtaatcacggatatatcggtactttgattttacggatatatctgagatatatcagcggatattctggaaaaaaatatcggtagacttaaaattgttaaaaactcatggaaatgcaaggaaaatctcataataatataattagaagtataatagacattttaaagttgttttattgaaaaatttgatatacatataatataatttgtgatattggatataattatatcatgtcgatctataagaaatgttaattttgtaattgttttcattataaagtcacataaaatacttcatttcattaaatatcaataatttgtacacattaaactcattaaataaacatatttcatattcaaaatatactagttcatgttaattaaattaattaaataatttagcatgttaattaaattaattaaataatttaactaagttaactagtttaatttaattctaaatgtgaaaataaatcacaaataattatctaaaataaacatatcaatttataattaaataatcaaattaacctaagttaattcaataaaaatataaaaaataattacaattgaatgtaaaaataacattaaatcatccatattgcaaacatactaattaattgaaaatatatgaattaattacaattgcaaacaaaattaattacaatttaaaacaaatataccttaaaatgattaaataattgagcaatcttaataaaaattggagtaatgagagagcaaatgaaaaatgaaagcaaaaatggatgaaatagatgaaatttgggccaaaatagccgttggaacattaatttaccattgaaaatcaattttggccattggattgccatattaccattggaatcacatctaggccatcagatcacgttgcatgaaggaggggaaatatcacaaaaaaatgggcgatttatctctgacatatctccccgaaccgatatatcgccgatattttggcgatatttacggaaatatctcccctccaatttttctccacgaaatatcgtgtcgacccctctcgatacacgatatatcggcgatatatcgccgatatatcccgacattttcctccttgcctttaagtcattcaccattttccttgttaaaaactatttctttcattgttttagaatttggatgttaatggctttcatcatggaatttgccatttggccaaacatcattgaatttgttttcctttaagcaaataatagatcatctcatccctataaattaattcatactaatgtttagggatgccctcaaatttcaaatatcactagagattgtttgtttaattaatgattattcttatgtcacttggttatagcttttaaaagacaaatctaatgttagttatattttctctactactcataggatgatttgtaccaggtttgatgttcaaacaaagagtgtcaaacttgacaaagaaaaagaatactttaactaaatcctatccttttacctagagagagaaagaagaaaatacaagtcatcatgtataaatatatactttacaacaaaattagtcacaaaaaaaaagaaaaaacttcaccttctcagggtaacttgtcccttgttatttaagaaaagtgtacctaaatcacattgggggaagtggtattaactgctacttaatcaatcggtcacctttgaaaatgttaggaaacaaagtcccagtaaatgttctctctaaattctttcctgattttcatgggtttagttagatctcatctaaagcgtttgaatgctcaaatttgtggtaaacttggtccttgagctcttaaatgtgtctttattgttttttgaccaacaaagaagaggtacaaatgttatcaccctactttcaaaaatatttcatttctgtggatgtgtcacttttgctgaaatcatcccttcactaatcctcatcttcaataagagttatcattcaatgaagatgaagctaatttgaacttacctaatttgtcaaattcattctttatagctccttctgtagttattgaatttactcctacaaaggttggcacttctgaacttgagaatgtgaatgagaaaaatggtagtattactattgtgccactacgagtctattcaaggagaagattgttgaattgtgtttcaatgcaaacccaagaatttgaatttgtggtaggtgctaaattaacactagacattctcctttgtcattggtgtttgaagacctaaatttgccaataactctttaaaaaaaagtcagaaaatgtacccaacaccttgtgtctagcttcatatttcttgtagattatccttacagtactaagccttcattacccaattaaatataattaaaattgcaccaaccgtctaagaggcacttagaacgagaatcggaggaaagctattaaggagatgagtgctcttgaaaaaaaaaaagacatgggagattgttgaattacctaaaggaagaaaccaatggggtgtaagtgagtgtttattgtaaaatataagacaaatagaaccttggaaagatataaagctaaatttgtggctaaataaaagttatactcacacatacggagtggactatcaagaaacatttgctctagtaaataatatgaatactatacgagtatcattgtccttagcaactaatcttggttggtttttgcaacaattttttacattaagaatgtcttcctacatggtgacctagaagaagaggtctacatggaagcacctctagggttaatggattcaaggctaatgaagtatgcaaagtgtgaaaggcattatatgacctaaaacaatctcctagagcatagtttggaagattttctaaagttatgggaaactagaagttccaatagagctaagaggatcatactctttttagcaaagctacatcaagcactagatcaacaacatgttagacattctttgttggaggtcacacttgtggcaaagcattaccaaccctctgaagtccattagcagttgttagatttcgagtggataatcacaaaactctgcaagtttgtcataacacttctacaaactagtgttaaatgatcccattttctcgccctcatctttaaagtttttagctatcaacaacccttttaacatcattgttttggaggtggtagtgacttcttcctaaaaaggctataatgttaacttctttccatccttttagaatgaatatgtgtaggttttagtgtaatagaccgtatcattatcataaaatcttggtctttccaatagtatgtcacaagcatccatatgcacagcattgcactaagcctcatcattaatgacaccctccataatgaacttcattaaacaatagtaagtaaccgacaccttgttaccttttcgaaaccatgcaattttgtaatgtgtttggttccaataatgaaattcatattaaatgagaatcttcgaggttagaatccttcccattaaactatgggtcatacttataacagagtataaaaaagtggtcaaatccttagagaatctcttaagtcattttctaataagagcaacatttctcaaactaattccctctcccctcctaattggaacccccttgactaacctttataatgtgtttggttcgctaacatttaaatttgggaaatctatgatgaatatgatattctcattctgatgtttggttaaggtttgaaatttaatatttccctcaagttttattcttgttatagtgtttggttgtcttagaatatgcttgagaataaatgcaaatttatatagcaaataatatttattaaattagattctttataaacaaaaaatgggaatttaaaaaaacaaaggttgtcccctttccttatattttctttccctaacaatgggaaattaaaaataaaaatatgattaaaaaaaaaaagaaagaaaaaaactagtccttgatgggaaagaatcttccccacttataaggaaatcaaaactttcataactatatgcatcttaaacatggtaatctcattctcgggcataagatgctcattccctagtcaagatacccatgaatcaaacacactctctatctttgacatgaccttcctcctatgagatgatcatgcttagcctatcatatgcaaactaaaagaaatctctctaaattgtctaaatagttacaaaaactttaatagtattatataggattatgaaacaaacaaggctggataatgttgatcctatttcctaaggactggaatgttttatgcataaacacatccatctagatttggaatcttcctcaaaaactggttcccaaagacctgaacctttaggccttaaccttgtaaatagattaatatttaccaaatggacgctctcatggagattaatctcaagcccaaagatcaacctgaaggcttagaggatcagcttaaagattggagatctttgattcattacaagaagatgtgaaattgtgatagtgaaattattttcaaaaagaagatgcaaaaccttatttccatctctaccagattgaaaaccttaaataatcttagcttgtcattgaataagggcatccacactaagtgtaaataaaaagggaaaaagggggttcctttcatccaggacccacaggagcctaagatctaacctttagcctccctatttatgacctccacaaaattgatggttggcgagcaacaacctctagctcacctactccacctgttttctaatcatctatatattgaacaatgtgctaatgcagccataggaccaacacatattcctgcttttggtctgccttgtatatggatacactcccatttctgccaccagatccttgtttcacctttttacatggtttgccctatatttgagatgaggggttttgagtgtcgtatcatggtccattctaatggctttcagaatgagttcttcagttgaaaaaagaatttctttggcatgattttcagatagtagctccagaagtatggccaaaactgacataaacatcatagctttttgtgagcattggaaattggatttccgagaatgcacggtgagcttatgatccaacagtttccataaaccacttgtgaatacactagtacagttttctatctcattcaacttgatgaaaatagcagcaagtaaatccagagtgtgaaagatccattgtagcttccataagttgttaggttttccaaggtgttccccatctcaaattcttcagagagtagtagcattatgacagttccctatttcttcttcttggtacttcattttaggtgttcttcctcctcatcaatggtttctaatgaggatttaggttgacgacccccaataggattccttcagaatatctttttgtattctctaaattctccttttaagtgtttgtgacaaattgtcctcctcttatgctcatgatcattgtcattttgttttctgcttgttaatagttgtgatattttgatcatatgcagcgccactgtgtcctattttcctcccagtctagttattgaattactaaatagtgagttggatgatggcttaataaataagatgtttattgattaaagtttgtgaaatttggttctttgtttaactttagttctgccttgggaagttggtcataacttagctgcaacattaaaagttcaataatataaaaactagcaaggtttctatagctttctgactattaggtatgcatcaataccatattacctgtcaaacatcaataagaaataagaagcaacaaattgtgttggtatcaattttttaactaacattagacttggattttatgctgacttctgcatgaaaaatgtcattcaacttttcatatagaaacatccaggggtctcaacactttgaagcctgcttaaatgtagtgttctgtgagctttgtgttttgtacgacatatacatacatacatacatacatacatacatacatatagatagatagatagatatagatatatatatatatatatattgtgtagagtttaatgactggaaactcaataaagggtagaacataataatgaaagagagaaccagatagagggcaagaagggagaaagttgtattaagattttggtcacatgcaatgaagagcaacaactgaaatattgaatggtatggttatatttgaaggcactgcaagggcataaagaagggtaacaagcaaataactcaaggtggtgacgaaaaggcacaatagccaatgattttgcggacggtatagctttagatatagtagaataactaaaaacatttcttaagccaactccagatagttaataagaatcttatctgaagtatgctcttccaaatgtatatatgtatttatgtgtgagtgcatttagcatgtatttatctaggcacataaattgtgaatgtgtgtgtactgttggcaatttgcaaaagattgatcatctaacgttgtaattgataaaggtttaatctaatagagagctcattccttgcaatacgatgttgggtctcagaacaggccaattaactttttgtatgcacaattatgccttcgtttgcagagttcttggactaaa

SEQ ID NO: 11735 - DNA, 12023 bp, Vitis vinifera
  Intron number 1 from transcript GSVIVT01010169001 (locus G SVIVG01010169001) derived from phytozome v7.0 (chr-ID chr1 ; pos 16704065 to 16716087 reverse strand)
ctgttcgcttctttctcgatagatttgtcttccaggtaccgtgtttcataaatcccgttgaattgttttttttttttttttatttctttagtttcttattttgttgatcaatcgttcataatttggtacttttgttcaatatattggtttcgccatttttttgttctcttgttttttggggattttttagcgagttatcacaattttttgttcattcggtgttttctgctctttttttctttttcttaatcggttcctatttatttttgtaattctgttattatgtcccttctgattgagtttcgggaattgaactttggttattgctatgattattattattattattgggtattcggtcctctttttcctgttcacttgtcatgtgaatttccggttgactggaaaataaaggaattaatgtttggttgatcttgctttgaacgaaaatattttgttcagaaagtatgggattggcaggatgcagataagaagttagtttgatctagaaataggctaccgggtgtgcttcactgtgattatgttgattctatagtgatgataattcattaattttaatgtttttcttatctttaagtgaatacaatatggagttaattgggtgcaaatgtaaccatgttagtcccgataaatttcaaatgtttgtttgattgactccttcatttgtggtatatctttccggattccaattcctctcattaatgtggaacatttgattacagggtaggaacatagttactagaaacctatattccctgtaattgaatttccttgtgatgaaattgtaagtttcagtagaaaactagaaatcatgaaagttctaaaggttttaaaattctcgaatctgctttattgactgactcaggaaccaatccagagggatattgtgccttatctgatcttgcaagttagcaagataatgatccaaggttgtaaaagaaggataaatgaaactcaaaccatttgatctccctcctgttcctccattgctgagtcacaaggtggatgggcagcttgaacaaggatagactgaatgagaaaacaaatttttctctgttacttgtgtggtcggtcactccttaaagggggacttagatagagactagtgaagggactgaaacagggacttgtgaatcttggctccaatagattaataaaatctcttgtcatgtcctaacctctacaagagtctcttaagtgtaatttactccactattatgattatactctgggagtcatggatatcatattgaagttattttacccaaagtaattgaatagccgggcccttgacatactaaatatcttgccgcacacatcttgacgcatcactaccctaaacaaaggtaagttaacaaagtatcatctaccacttcttgcttacattgtgttctcatcaggtccttaacttatatatttgattatcaaaggtgtttcccatatggaattcctattttcaaatagcatatgtataaagatcctagtaaaccatttactaaaaccaccaagcttggatttgatgttcaactattgtaaaataatccaaggaatgttctagtctgatgaaaaaccatgaattccatcccaagcatattcattctcaaaatccataaagtcaactttccaagctgatgcaatagaaacgcttaggatgtgattgttttgtgggggtgtcttaaccggagaatgaacatctcatttcgaagtgtaagactaccatatttggggtacatatagcattagaagttttgatttccttgaattaaaatccctcaaaattgggtatatctattagccatgtaagacttggtatttttctttctatttctattgctagtgaaacattattctctttattgttaataaataaataaatttaatttttgtaaatatcatttgaagggttgttatatacatttgcattaattgttaaacaagttcataagataaccaaatgctagaatgagagtaacttgacggggatcccaaattcttgactttaataaaatattaaaatgataatttaatatctattattttttccaccccaaattcttgacttcaataaaatattagaatgataatttaatatccattatatttcaaggatccattattaggaatatgttttcaattttccagttgagatgctggtaatgcatccttgagaatgagctttttgaagccctgatgtatgagggtatttactgcgctcttttcccctcttgaatcccacccccccacccacccaatccatcctgtaagggctcatatcatggctagaacaatagttatctcgcttaatggcatatactacctaaaaagaagaacatgacataaaaggttgtttaacaatgactaagaccatcaggagatttataggaatagttgggtataatacctatagttcaataccaatagtaggaatatagaactacttaccattcgtgccctttatacataaggggcactctctcctatctattcatgacccttatacgcaagggtcactctctcgttggccaggggagtacccttggacccctttaccgttcgtgccccgcagatgcaaggggcactcactcatgagcctagggtggctcctttattatatttttttttttagcgcgcctaggctcaaggcaccaccacttcctagttatagcacattgcttgccaagatatgcgcctaattgaaaaggcgcgccttggtagcttttcttttcctttttaaacacttttattcttgaaatttatataatttcattacaaggttccacccccacatatatttggaagtcaagggtaagtacccaattttttttttttttctaggtaagtcatgcagttatgttttatgcccttgcagaatgcatatcttcacaaggtagcaaattatgatggttcctttaatacttcaaggtttatgattccattccttagtggtgttaaaggtcataaactatttcatttttaagctcttgctgatcgggagcaaataactaagaagggtggacatgaagctttcatggttctcttttagcatccaatcgtttctttctcacatgctctcctcttttgtttagatggaaggataaactaaaatgcaaagaaggtggaacttaattatgttaaggtgtttcttttctcatttattcatttattttaaaatttatccagacatgagaattttttttttttttttcctgggtaaatccgtgcagttatgttttatgctttttgaaacttctattgcactttttgtgaacaaatagattgtctttttcccctagtttttggggcaggttgatttgatctagttctagagtttttagggcctgtattctgctgatggaatgagttccttaactctcctctttgatagcatttttctactctatcattctgcatgtaaagaaacaatttttttttttttttttaccctcaggccaaatcaacgaatgttgttactattggtggattggagaaacactagcctgtttgggtcttcaactaaagcaaatgaaagtgagaaatttaaaggtgaaacctggaaaagtccaatggacgttgataggacaacatcttaggcatcttagtttctggctaaactgaactgttcaaatgtgaggcaatatcttaggcagtaatgcctaagctgctcaatcatatagctgttttatttgtgctactaattactgatattccataatttttatcgtccatttggtgttgctcttcttggaatacactctgcagttttgtatatcaagaacaaaatggtaaattttttatctgtatctatacttttgtactttatatccaacctatacccttagtttggtgtccctttttggcatccttcttcttgatgtcagctttgtgaaattgttgccctctcccattttcccatagcagagttagatcattcaacaataaataataaaaaatgtattattaactaattgagccaactgatatttaatttgctgtccttggtgtcaagacttgtgatattatcttcccttctcatgtttctattaagatcgttaaacctatgatggacaatattgtaatatctaacttcaatcaagctaatatcttattttctctcacctttgtattcttcttcatgaaattactatcctctcctatgcttaaggcttactagggactaaatagtaaattaatcatgcaaatacataatcggaggagcctcggaaactaataatttgttttcataggctgaaattgcaagaataactaagaattttcattttatctcacatacgtcatgtgtgacagtctagtgtcaagaatgggaaagcataggctcaaaatcttggcacattacttaggattagaattttttacaaaaagagatgtacaacttcagttttggtgatattgaatatcttgtttatggacctatttgataaagaaagatagcttgatttggattgaattcgatggaattatgggcgtataggaagagttgcaaactatcaagttgggacaatatctattccttgaacactatcaatttctattcttctggtcattttattgtaggtaggatgtgtccaatggtttgtagggcattttacttgtgatacgaatatattttgattcatatttggctaccatatggattaggattacttttatacactgattaaaatatggtgtattggtgcatttggaaacgatatttccaacagaaatatcggtggtcaacgcggagtgttgaccaagtcaaagctcaaaaatgagttgtttctctgctccttgagggagttgaaaccctaaccaaaaggttgggccagcgcccaccttaccattagggcaagtttgcaccacatatatatatatattaaaagttttcatatacacaaaatattaaaacaatactttaaacaacgaattaattataattattttataaaaaaaatataaattttcatttaattgagtagcaaaaagtttttaatatcattaatatattaattaaatattaaaaaattatacatttatcatcatttattttatatcatttgatacgattaaattaaatatatcataattttaatattaaatatattttaaaattaaacatattataatcaaatatcacaatattattatcgaataatatttgatgtaatttaataatcaatgtacacttatatatctatatatatatatatatatatatatatatgtatatatatttcttcaacaaaacaactttaaaatatctattatacttctaatttcatttctaagagctttgttttacactttcataagttttgatcaattgggccaatcgatattttgtatcaaaatatccgttgatatatctctggtatatatgtgattaccgatatttttatccttccttttatgtactacttgtgtgccttggaaattttgaggatggagtttaggaaataggattatgtaaggactaaaatgatcatgcatgggatcaataaagcttagatccattccaaagaaaagatagctaagcatctagaatattgagttaaatctcctcctttgaggatacaatcctttttaataatacatactaagtagatccattgctaagtactgttcctttttttgtttttttaattgggaactaacatataattgcacaccatgttttgttgcattaaattctcttatgtcattggtcaaatggtaacatagatgtccttgggaggccattgcataagttttctaggatttttccactctaactcaccttgtggtggtaacggtagagaattcgtttttagggagacgtgtgatggggtgatcaacatttgtcttcacactttttaggtctttatagagttatcatagtgaaaatctcaccacttcagccgtccttggtaactcctctccattttcttggaaccttaacttccgtcgcaatctcacaaatatagaaattgaaaacctcaaaagactcatgtcctcactttcttctatgcacttatcttttttttgttgcagattcaagaacttggtctttatcctctttaggttcatcctcagtaattattattattattattattaacacaactagatagtttccttcttattggaaaatctaatacacaaaattaggaaagaataattactgtccagctaatatccctaatttactgggttgagtaaatacaaaaaatgtatactacaaccatcatatccctcaaatcttggttaatttaaccgaatcttcaatttctcaacactcctcctcaagctggtttgaaaatatcttccgtagccagtttgtcaactaaattgtcaaattgcttcctatgtagtccttttgtcaatatatcaacaacttgttcagttgttggaaagtatgtcatggaaatcaaaccattgtcaagcttttctttgatacagtgcttatccacttctacatgcttagttctgtcatgaagaactggattgtgtgatattgggatagttgctttattatcacattaagctttcataggagatgaactaggaaccttcaactcttcaaggatccttttgatccacattacttcacaaattccctgtgcaagagatctaaattttgccttagtactacttctagccaccacattctgttttttacttcgccatgtgaccaagttacctccaataaaggtacaataacttgatgttgatcttctatccataatatttcccacccaatttgcatcagtataggctttaacttgtaagtggctacgttttctaaatgataaccttttcctagtgtcctttttaagtatcttaaaatcttgtaaacagcatcaaaatgttccggtcttggagagtgcataaattgactcaccatgctaattgcaaaggctatgtctgggcatatatgagacaagtaaattaaccttccaactagtctttgttattgttctatatttttcacatcctcaagtttggcagcttgtgacttcaagttaggctcaatgggagtttcagctttacaaccaagcaggcctatctcaccaagcggatcaagtacatatgtcctttgattaacaaagataccttccttagatcgtgcaaactccattccaaggaaatatttcaacatacccaagtccttgatcaaagttttttgcaagtctcttcttgagcctttccaatttgtcaatatcatcacctgttagaatcatatcatcaacataaacaattaaaattgcaacttttccttcctttgagcgtttatagaacaaagtatgatctacctgactttatcgaaaaccatagctagtcataggttttccaaagcgttcaaaccaagctctcggggactgcctaagtccatacaaggactttcttaattcgcaaactttgtcactcccaagtttctcctcaaagcttggtggtaaacttatgaacacttcttctaaattgccattgagaaagacattttttacatctagttggtacaagggccaattggagttaattgctaaggacaatagaactctaatagagtttatttttgcaacaggagcaaatgtttcctaatagtcaatcccataagtctttctaaagcctttcgccacaagtcttcccttgtacctttctatgcttccatcaagtttgcactttatggtaaacacccatttgcaacccactttcgttttgtctcttggcaaattcataatttcccatgtatcacttcttctaagagcattcatttattccataagtgtcaatttccaattcggatcactaatggcttcctgtatatttctcggaacaaacaagtgagagatcctagagataaaggctctatgattttttgacagttttgtataagagagatatttggcgataggatgcatggtacaagagcgggttccttttctaattgctatgggcacatctagatccaaaggtatggtattagaaggaatagattaagaaataggaggatttagagtacttgaaatatttagatgaccatctcctgaagtgtttgattgatcctgtgctggtatgatagttgggtcttgtgttttatgatgaagtttccttcgactataaacttgaaactcaaaattcaaacgatttacattcttttgtagtacttctccccatgtttgtgaaacatctatactaggcaaggacaagctaggattttatatattttcagtatctagaacatttaattccttcgtttgagtttctaaattattaggagaaatactatggtaaaatagtattcggtaaagggtcaaaaatatcccaaaaattatcttgtactccttgattctccccttgaagaaattttttgtgaaagtaaggttgattttctaaaaaagaaacatcaatactagcatggaattttctggtttgtggattataacacttgtatccttttttgtttggagcatagcccgcaaaaacacattttttagcttaagggtcaagtttagactgaaatttactgggtatgcaaacaaaaacagcacagttgaagactttgaggtaaatcagagtatatttgtgttttaggaaaaaaaattttaaaacacccgagtggtgtcatgtactttaaatcatgagttggcatcctgttaatcaaatagcaagcagttaaaacaacatcaccccataaatattttggaacattcatataaaacattatggtacgtgctacttcgagtaaatgtttgtttttacgctcagtaatgccattttgttgaggggtatctcgacatgtagattgatgttggattcctttttctttcaaaaactttcccaaaagctcattaacatattctgatccattatcagaatgaaagatacatatttttctttgaaattggttttcaaccatagtgtaaaaatctttaaataatttcttaaatttggatttttcactcatcaaatatatctagcacaaacgagtgtgatcatcaataaacgtcacaaaccatttttttctagtactagtagtaacccgaaatggtccccaaacatcactatgtattaaataaaatggtttggtggccaaatagggtttggataaaaatgtagcacactgactctttgataaataacaactttcacaatgaaaaaatgaacaatcaatatttttaaataaagtaggaaataagtgtttaagataaagaaaactaggatgccctagtctatgatgccacaacattatttgttcacaaacagaatttgaactagtactactaaagctttgagcttttttattactagaggaaagttcatcaaaataataaagcccttcaatcattctagcattgccaatcatcctccccgagctttggtcctgaaagtcacaatgagattcaaagaaggtgacacgacaattagcatctttggatagtttactcacagacaaaagattacaagcaagttttgggatgtgaagaacatatttaagagttatgttctcagaaaattttatcaccccttttcctgcaatagttgagaaactaccatcggcaatacgaattttttcactaccagaacaaggtgagtaagaactaaaaagattagaaaaacttgtcatatggtcagacgctccagaatctatgatccaaggagcagaatttgaacatgatagggcattagaattaatacctgtttgtgccaaagaaacactaggaataccagatgaggaattagattttagctgttttagaaggtgatccatctgcgcattgctaaagggttcagagtctggttcattggctgatggagttacatgagaagtcctctcttctggtttgttgtttttcctatttgcaggcttgccatgaattttctagcaagtttctcgagtatggcatggccaattacagtgatcactccaaactcgaggcttctcatccatcttgcgctgatatttgctggctttgttggcagtagcatctacagtagccaaagcagaattttcaaatggctcatcaacagtcttttttcccagcatgacaagtctacagctttcctctcttggaacttcagaaaaaacttcactgataaagggaagaggagatctaccaataattttgccccgcacttcatcaaactcgacattgagtctagcaagaaacttgtaaatctgattgtcctccattgttttcttatggtggttacaatcttctggggatttccattcataatcattgtataaatctaggtcttgccacaaccttttcagtgagttaaagtacttggtgacaggttcctttcattgctgaatttctccaagtttcagtgttaactaaaaaatttgagactgatttcccagatcagagtacatctggttaatgttattccataattctttggttgtgggatagcacaaataattggagctaatgtcttcatccatggaattaacaagccacttcatgaccatggatttcttagtgttccagacagcataagtcgaatcctcttttcttgatgccttcttgtcttcggttaagtagcctatcttcccttgcccccgtatatgcatacaaactgattgagaacaacataggaaattatttccattcaggcggatggtggtaatctggattgaatgtgaggtgtgggttgattgtgtctcagaaattttataggggctggttgagatgcagatgaattttcagacatggctatagtgaagcagatgaaggaaaaaacaaagtaaaagcaaagaattctagggtttttgaaaggagaaaacaaagaaccaaccttgctctgataccatgaaggaaaataatatttcttttcttgattaagatgattatttacacagctatatagtttccttcttataggaaagtctaatacacaaaattaggaaagaataattattgtccagctaatatccctaattcatagggttgactaaacagcataaatgcaaaaaatgtatactgcaactatcatatccctcaaatcttggttaattgaaccaaatcttcaatttctcaacatccttccccgtttcttttagctaattttttatggaaatcaaaaggccctccaaaggtcaagtcatttccttggttagtggctcataagaaggtaaatacaattgacatgttacagttgagaagaccgtacaagtctcttagtcctcattggtgcatattattgatggggtgtggagaattgatcaactatctctttctacattttccatgacattagggctttggcacaagcttttcaggctagccaacatggtatgggttcctcctaggagtttttgtgatatgatgactatttcatttaaaggtttggggaactccattagaagcaagaccctatggcaaattgtctgtctcactatactttggattgtgtaggaaattgcttgcctcactatactttggattgtgtggcaagagagagatactaggatctttgaggaaaagcggagaatagaaaagacgtgggtggggcctaattcgcttttattcatccttgtgggcttcttgctcagtcgcttttaggggtgttccactcaatgttattcaacttagctggtacttggtttgtaattcaaaagaggtggataactatgagagagtttgagtcttgaggagatttgaggttgtttatatgtatagtcctccttgtatagcggaggtgtttggtcttttgtgatgtttttgtattaagaggggaggacctcctctcatccttctcttgtactttttccttttctaatatatatcttgtttctgattaaaaaaaatctctcttctactcccccccaccacaaaaaaaaaaaaaaaaaaaaaatccttgcattttttattttatttataattatgacatgtgattgagcctggtcttgcctgttttcaatgcccctattttgattttcactctctttctagatcagtttataatgagatgtatatgttgcagaaattgggaagaatactgatttttggaaagggtgg

SEQ ID NO: 11736 - DNA, 9275 bp, Vitis vinifera
  Intron number 8 from transcript GSVIVT01012510001 (locus G SVIVG01012510001) derived from phytozome v7.0 (chr-ID chr3 _random; pos 308324 to 317598)
ttccagctggccaggtaactttctgtatttaattgccatagtacacattctgaaggaatgaataatttctcactcttgattctcaaaaggatgagtataacttatatagatacaaggttgactaagctataaataatttaggcctaaatcaagggatctaattacaggcagatttctagggaagaaataaggaaagaagcaaaatatacaatcatacaattcaattacaatatttacaaacaaattatagtcgaataatttagacataatttgtcaaatcttctaacacttcccctcaagcaggtgcaaagatgtcttgcattcttagtttgtctaagatttgatgaaaaaccaaatttggtaaacctttggtgcggatgttttccagctgcctagttgacaagacatatggtgtacaaatttattccaaatccactttctctttgattaaatgttgatcaacttccacatgtttggtgtgatcatgatggactaggttatgatccatatttatccttattgtcacagtacaacatcattgtctcctttatcttaatcttaagatttgtgagtattattttcaatcatagtagctcacaattatcatgagccataactttaaacttagcttcttcactagatctggtcacaataggttttttttgcttcttcaagtgactaaatttccacctagaaatgtgcaatgctcaatagttgatcttttatccaccattgaacttgcctaatccgcatcggtataggcttctaacttgaaatcattattcttttgaaacattattcccttgctcgaggctgtctttagatatccgataactctatatacatcctccatataagaattaatgggagaatgcataaattgactcatcacacttatagcatatgctatatcaggtctagtgtgtgattagtgaattagtttcccccattattctttggtagatgcctctgtcagccaaaggttcttcattcttttcctttagcttgtggttcgaatctatagggatatttagcaagtttgcaccctagcatgccaatttctttgagtagatcttgtacataaaaatgaccttttttgatcttgcaacttgtatccctaaaaagtaacttagactacccaagtccttgatcttgaattcctttgctggatatggctttaattctctaatatcttccaagttatcactggtaacaatgatattatctacatagcaatcaaaatgattactgtactaagatgggaatatttgaagaatagtgtttgatcaccttggctttgacgatagcccttcttcaccattgacttagtgatcttccaaactatgttcttggggattgcttgagcccatagagtgactttctaagtctgcacactttgtttgtccaagatttgtgtataaatccaaggggaacacctatgtatacctccccctctagatctccatgaagacattctttgcatcaaattgctggaaaggtcaatcaaagttagcaaccaaagataataaaattttgatagtatttatttttgctaatggtgtagaggtttcttggtaatctataccgttgtttgagtgtaccctttagcaaccaaccttgctttggacctctctatggttccatcaaccttgtatttgatggtatagatccatctacaacccactgttttcttccctttaggcaagtccataacctcctgagttttattcttttccaaggcttgtagttcttcatttatagcatctttccatggtttactgtttaaggcctcttggactattttgggagttccattggaggaaaatgagtgataaaggcatggttttttatgacaatctctgtaaggacacagaatttgagataggatgttgtgtgttctaattcctttcctaaaagcaataggcaaatccaaatctctgttagtgtcaagactaaaattaacatttccattacctgtcacagttttagacattggagcatgtgtaggtattgtggacctttttcaccgggaatacacattgaaatcagatgcttcaggtctcttgtgttcaatctcaagtgactgaatctgcaatgtaggttttgaggaattcgggctcttgtcaagacttcaggaacttaaactctattcaatttcaatggacaaactttcaggttgatttttttggattagtcactcttaaaaggaataggatgaggagagtggtcataaatattagacaaataattataaatattagacaaatgatcatgagaatgccctaagaaaatgcatttgagagccttattagtcccttgaaaatttggaaagaactctaaaagagtctctataggagatttgaatgcaagaacccgagatggcatacggttgatcaagtaggtggctgctagaatggcttcaccccaatagattttaggaactttcatttggaatagaagggacttggtaacaaaaagttagagaatttcttagttttcctattaataaattcaaaattcaaattcaaatattagggatattagggactttttagatttgtattttttgtttaaatagttcctcttttctagggaggttgagtttctggtgtgagatcttcctttatttattccatgtattattctgattttaatttaatgaagaaaactatttttctccccacgaaaactttcacctagcaacctctataaaatgcctattttttctcttagcaaccccattttgttagggagtatcaatacatgatttttattttgaagatatgtaatcaagtcattattaaagtattccattccattatcaaatctaagcaatttgtattttgactccaaattgtgtactaatgagtttatcaaagatcggaaaggtggagacctcaaattttgattttaagagataaacccaagtggatcaaatgctttcatcgataaatttaagaaaccattgataacttgaatgatttgaaacatgagaaggaccccaaacatttgaatgtatcaaactaaatggacaaaggtatctataattttttattggaaacgaaactcgatggtgcctagcaagaagacacatttcacaatgaaaattgagtcagtcaacgttttcaaacaaagatggaagcacctttttcaacaacggaaatggaggatgtattagacggctatgacaaatccaaatctgttcaatttttgaaggagaggtagagaccaaaccttgagaccttaaaacactagtcttccgattagtatctaggtatagtccatctttttccttagcatgcccaatcatcctccccgttatagaatcatgaaaagtgcaattagaagtgaatataaccgaacaattcaaatctttagtaatttttcctatggacaaaaggttataggaaagattggaaacatgcaacatatcttttagggacaaagttgggttgattttgaccgggccttgaccagctatagagggaaaagatgcatcaacaatctttattttttgccttccagaacatgtggagtaagtggaaaataattttgaaaactaatcatatgatctgatgtgcctgaatcaatgatccaggttctggataagcagtccttagagacattcattgcatggatattacttgattgatccatagaccaaaaagttgaagttggtatagaacttggaacttggattgtgattttcaagctaattctgcaacgaaggctaagtactcttgattttcaagctgacagatttaaacttgatgaaaacaggactgacgtaaggcttgtccatgaaggttaagcacaacaattggcaaaaaagcccaaagaaaaaatggcagtgaaggcctagaagaagataacacactgcagaattgttacctgctctgataccatgaaggaatgaataatctctctctattaattctcaaaaaagatgagtacaacttatatagatactaggttgattaggctattgctaatttaggactaaatcaaggaacctaatcacaggcagatttctagggaagaaataaggcaagaaataaaatatacaaccatacaaatcaattacaatatttacaaacaaattgtagccattgaacactggacataatttgtcaaatcttccaacacattcttttgatatatttgaagtgtatgactagagagaaactggttttacatttttgcctcttagcatgagtttgtgattctatcttgtgattattggcatgctatttgtcataactgccttaaagattaatagatttataaaggcataaaagatttcttacctagtatttgaatgcatgtaagatattcttgcgtctctatctgctattcatgatatattgggcaatacatggtcataaattttaatgggaataaccaatatgataaatatctgactttaggtgtatatgatggcttggaagccttttcagatttaaataccatatttcttagtatggtgcatggaactttatggaatggaaaaaaatcagttttgtttggatactgaattaggttaaggtgcttcagtgatatcctccttgaaaatcttttattttgccctgaaatagaaagccatgtctaaaagtcatatcaatgctcaacagtatccttggaatctcaacctggaatccattgaatcttcatccattgaacacagcatcattgcaaaaccatgaccaagtccactgtttgccttgattaaatccacagccacacatgaattctctcactagttaaatatgtagctttgttttacaaaatggtttaaaaaattctgatattttgaattctccaaaacaaagttcttgagatattgatctcttggtttgggctaaaaattgatgagagaacttattctagtaggacgtagaagttgtaattgaaccaagaatgagctccctaaagatttgaaatcgagatttgtttggagactgatcagaagcgcttcaatatactagacaagtccttgattgatctagctttagtctcaatgaatagaaaaaatgtctctgattgatcaaaaactgtctttgattcaagtagaagtatgttggcttcactagtgtcaccaatttccaaatacaactaatgactattaaatcaagggataattttagaccctaggcgtccaaagtgcagctaagtcctgaggttcatgcgccatttatactatccccaaaagtgcattcaaaatgccttgtattgtataaatgatgtatattcaagattctatcattatagtacagattaacttgaagaaatatggacaaatgtgataccaccttaatttaatttttgcaatgaaatataccaatgtcgaaaacctttacagtaccaaactcatatggcaacagaaacaagctcaaccaaatcactacttacctagatttcaaaaaatcctgatacataattttactaaatacccttctatggattagaataattatattataaagaaaatcccgaataaaccccgatgctctctttcctttttatatgctctgcatccgatttttttcttgtttatgagctccaagtttgctggttttgtggtagggggattggggtttgggaagatttctttaaggaatctcgctcttttagggaagtggttgtggaggtatcttagggagagtataactctgtggcatcaggtcattctaagcatttatgggacacattccaatggttgggatgccaacactttagtcagatggtcacatcgttgtccttggaaggctattgcataagtctttcaggatttttccaagtatattcggtttgtggtaggagatggagaaagaattcgcttttgggaagatttgtggtggggggaccaacctttgagatcccaatatccaaaactatttagagtagtcacggataaaaatattcctatatcttcaattcttggttctgctcgccctttctcttagaactttaatttccgtcataatctttccgattctgagattgaagatctagaatgtctcatgcgatctcttgattgtatgcatttatccgcttcggcttcagatgcgagatcctggtttttatcttcttcaggattgtttacagtcaagtctttctttataaccttgtcccaaatacccgatttatctccatttttccctactaagtttgtatggaattctcaagtcccttttaaagtcaagtcctttgtctggttagtggcacacaagaagataaatactaatgacttgctataattgagaagaccatacaaagctcttagtcctgacatttgtaagctgtgtatgaggcaaggagaatcagcaaatcatcttttcctacattgttcttagacgatggggttgtggcatagattatttcagctagccaagatggattgggttcctccgagaagcatttccgacatgaggtccatcaattataaaggttttggcatttccaagagagggatagttttgtggcgaaatgcgtgcattgctttaatttgggttgtatggcgggaaagaaatgctaggatatttgaggacaaagctaagaacttagaaaatttatgggattccattcacttccttgcttctctttgggctttttgttccgtgatttttaaggacattccccttaacgtgttacaactagattggctagtagtgtgtaggtccaacgggatggtctagccaagagagcttgttcgtagttttcatagtgtagttttttgttttttgttgtgttgtttagttttatctttggtgggaggattcctcatcctttttttgtacttcttttttctatcaatatacatatttgtcgtttcctatcaaaaaaaaaagtttgctggtttatggctgaaggagcaatattatggtactgttgttttggctattttttggattatctggaataagcaaaatggctggatattcatggttgagtatggtttcttaggctctattttaggaataagcaaaacaatctttggaagaagcaaagcttttgctcctttttcgacctctattatgttggcttcaaagttatcattgtcttcaacattattagggtctggaaagtcgtcatttttctccatccactagcccccttgctaatcctcaactgacactaataagatggtctctctttctctctaaataaattggaaactcttaacatagtctattagaaattggtggttgttatcttggatattcaggataatataaactataaaaattatgatgaatactatgttttcttttgtgtttaccagcttgtttcagagagataatcagtctaaattgcatatagttctttagaggctgatggaagctaagaatacggcaatctcatgagtcatataatgcatgttaaagactagggagagcagtaaacatcttatgttccaaattcatgactttaaagcattttgtacaactaggccactagggcaaactgcatttcattgtttatattatttttgaacttttttggttgtaaggatgtaaatccccttccattggctgatatttggggtccaaagcagttgtgtcaatcaagtcttcagttaaaggtaggacttcagcctcaatagccaaacctatccagctgatttgaagaactctccaaccacattgtcattagaatctctgatgcaccaattctccattgggtcagattcaattgaaattaagcttataagagcctaatgatggtgaaatctggtgaccaaagaatctgtttttattgacaattcatacttctctgtaatccagcataaatcatgataaatagaagagccaggaacttttagtaactaatccctaatcacacttattttttattgaatcgtataagatagctggatgcatatgtacgatagatggtataatgcacaatatttttgagtatattggattattttttatagttctaaaaaaaaagaatcaattttgaatgtttccttaaatcactgcttaaaacgaatttaaggtaaaatatagggggcaagaaagaacagaagagagtatagtcttgcatggaaatgttatatatgtgttgttgataggggaaggtggtgttgtaatgaatgttttaatgtggaatgaagactttgcttaatatgtaagtttttgttgtgtgagatctctctttctttcccaggggttgatgatgatgagcttcaggaactttgaacattgctcacaaatccattcatgtcaataatgtttacaagtatattgttgtaccatataggaataagttctgttttggatacattggttgaggacttgtagacacgtggaacgtttatcacaagaacatcttttggcgtactgtttggaacttggaatttaaatttctattgaagtttagaacattattttgcaggttttataataaatctttcttttttcccctttgagtgtgctatatttctctcctttgtatttcttccccctagtgaggcttgacacttggatacctttgaatctttttgtacatccttgaaagattttgctcatgtttcttgtgcttgtcttgttgagataaatgaagatggttgtttctattgaaaataataataataatgaatcttgtcacccttgtattagattcaaccttcatgtaatatttataaggttgtacttgtgtatggtcaaagtttcattttaggtagagtggctgaagactcgtaggaactccaacctttggaataataatatctattaaagaactgattggaattggaacttcatattagttaagaatgttgggaagggctaggtcagttatgggttttcatttgcgtcttttatttttgttgttgtgtccattgtgttacctcctgtggacttggggtatgccacatattttgtactgtgctgtttataaattattcatttacctactagagaaaagggaaaaaggaaaattgaggtttagaatgttacttagtaggtcttgtaatgaacctagtttctcacctttgcattcaattcaacttcacgcaatagtcataaaaagatctgttattagtattctccctgaatttcgtagatattagaacagaattaaatgaatcaagtttattaattcccttgtggggacacttgggcctcgagtaaaactgtgcttttgtagtgttgccccctaaatggcttccatgttattttattttctggtatattttccaaaacattcagcattgttgtttgttaacttctacaggttgcattccgtgcaaaggttgggaaaagatatca

SEQ ID NO: 11737 - DNA, 9114 bp, Vitis vinifera
  Intron number 2 from transcript GSVIVT01000823001 (locus G SVIVG01000823001) derived from phytozome v7.0 (chr-ID chr1 2; pos 694781 to 703894 reverse strand)
aagcatttaagggtaatttctagtgattctacaagttgtattttattttgttccttttaaaatgcatgcattcatcaattagttgcttttgttaaaatagacatcaagtgaagttgttacctggtggttcttataagttatattgcatattttttagtggtgtgttgggtacaagtatgtatctaggtgttagatcctttattcatacaaatttttggatatgaggacttgtttaagaagatctttatcataggtatggacacttgaatataaccaatattttcataactagattggtcattgaattgaaaaagctatcggttgattgtttaatggtcaaatcggtggttgaatctcgatgtcatcattacatcataaatatataattattttttattagaaacaaaaaatgtattaaattatggataaagatatatagatgaaagatgaggaattcttcttcaaatacaatgaatgataaaaaaaagtatgtttgaaacctcaaaactactaagtaaacctattcaatgcttctctctttgcgaacccacattttatgatctacacatcgaaaaccaatcaaggtggactatattgagaggaatgtccttaaatgctgtgatgtaagaggcccaaaaggaggtgtagaaatgactgatgtccaaaagagattctaaagtcctaaccttgttcttaaaaatcccaacatttttttcccacctaacaatccaaatcaatgctagacaagtggttttgccaaagaaccttgtctctaatggagcttcccaatcccttatatgaataatcaccatgtcacaaatacttctaggagcaacccaatccaagttagctaatctaaatagtttgagcatagtcccatagtcaattgacaatgtaagaaaagatgattcaccattcctccactctccatacacaataagcaaacatcatgactaagggtgtttttagggttctctcaactatagcatgtcattggtgtttatcttctagtgtgccactagccaagcaaagatcttggctttagatgagactttaaaattattcaaaaaatttatttggatacaaaggaattggatttgaaggattaaacaagactaaaaagaatgactttatagtaaataatcatgatgaagataatgaccaaggtcatatgcattcatgaggttgtagctctttctctctccgggatggagaggatagcctagcatggaaagattgaagtcttggacagtgtttgagtctagttatggcaaagttttgggtagcgattgaatcgaagacgtttgaagtgtctatagaggaagtcaaagggaaactaaaaggtatcattgtggaaaggagtagaggtttttcctcttggatcaggtttggggtattaagtttgagaaaactactggaaggtttcgaagaatgttgtagggaggaaaagaaaggaagattggttaaagtctgggaggaagagggaagaaagttccggttggagaggcgtgtaaacggggcaggaagatacgtcttatgctctgttgtggatgtagaggctaaaagattctgtttagtctttcctgaaggaaagggcgtgataggaggatgggccattctagctgagaagctaagggcggtggggatagttactaaaaaggaagacaaaggtgtagaagcaacccaaatcaattcaaaaaagaaggatgcaacattagatgatgaggaagaaaggtgcattggtaagaagaagcagggggagaaaaagagcttcctagatgtggctaaaggaccggctggaagggtaggcgaagagctgtggcttcaggctggaggaagaggattgaggaggagggaggaagttttggggcgttgcctagttggtaggtgggaaggggcagcgatggagatggagttagattcgttgaaaaactgggggaaacgcagctggaaccttaggaaaggagttaaggtgatgaagatgggagaacccttcttcttgttggagtttgaagatggaggggaagcagagagagtattaaacagggggacgcgtagatttaaagataagctgctgcatttagagagatggagtgaggaggccgggtgtttgcaggttggaagccaaacaaaagaagtttgggtgagggtggtggggcttccgcttcactgttggagcgaagagttgtttaaaagtattggtgattgctgtggaggtttggtggaggtggatgaagatacaaagaatctttctcaatttcaatgggccaggattttggtaaagaatggcggaaatttttttccaggaactttgaatttagtggtgaagtccttctgctatgcagtccgcctgtggtgggaggtgcagcctagagtttcagcagtggagccgatgatgaacttgagatggagtgagggggaaagggtgagggggaaagggtgagggaaaaaggggatgagggatcacgcaccgggaacagcggtgggaaggaaaaggaaggatggcgtgcagctgaagctgatggatcaggtgcagtcagaaaaagaaggggaaaagaaaaaagtgatggtgacaagatgggagtttcagctgatgggttggcaggttatagcaaggaggaaggaggggtgggctcaagtgaaaaagacagtgtgggtgggcttgatagctgtaagtttgggtgcgaagtggcccaacccagaaatagtcaaagcctggagcatgaaagtcctgtggcttgggtagaaatacaaaaggatataaatgggccaagggttcgttgggaaaggggacagtcaagcagaggtgaggagtgggccgctcatgaaggcccttttagttttcaaagaaattttttgggccagatggacaataggggtgaggagcgggcttcaagggtggatcttgctttcttgcaacgggatgggctgggtcatttggacaataggcccaaagcggtagagaaagaagggcaacccagtttagcggcgaaatacacctcagtggagcaggcttctgatgatggcccatcttctcttcaaaaggatgtgctgggccggctggaccacagtcccaaagtggcaggaagagaggggcagcccatcctagcaacagtttgggccccgctggcttataagcctccctggtttgagcccgacaaaaaagctagggcttcgtcccgccttgtgccagctgaggaatggttcgccgaagacaaactagtcggagggatggggccatcggcggcgagagggacaccagagagctgctcaatagcggacgagtgctttttggaggaagcttccaggtattccttcttaaaaccttcgactgtttgcgtgtgggggggtcgggcctcttcttctttttctcctttctctgggatggggggctctttgcttgaaatggaggagagatgtggccatgagggcattctgaaggaaaccgaagaggggttgagtatcaaccctctaagcatgcgtccggcagaagagagaatgggagagaagagtacgagcgggtttttcccgctaaaagaaggaaggaaggaatggggcgaggaagaggaaaaggatatggaatcgtggaattacagttgtttggcaaagttttgccattgtttgggaatgccaacagagggctgtgagagggatattctgaaacttctccataaaatgagggacagaagggatagaagtgagagattaagcggaaaaaagaggaaaagacagagaacctcaagatttgaccgcgagttgaagaaactagaatggtcggtaaattatagcgggtcaggaggggacagggggtatcaagagtgtgttagatgaggattcgaattgtgtcatggaatgtaaggggggcaaatgacaaagagaagaggaaattgattaaagatgtgattaaaacccagaaagcagacttagtgtgtctccaggaaacaaaattgcaggagatgacgagtgcaattgtgaggagtttaggggtaggaagatgtctggaatggggggctttgaattcaaggggtgcggcgggggggtggtggtgttctgggataatagggtgctgcagttggaggaaatggaggtgggcaattattcagtttcttgtcgcttcaagaatgttgaggatggtttttgctgggcgttttcaggagtgtatgggccctctgtgaaggtggagagagaggagtttctgagcgaattgggggccatcaaagggctgtggaacgagccgtggtgtgttgctggtgacttcaacatgataagattcccttctgagcggagccgaggaggtcgcctgtccccatcaatgtggagattcacagaagtgatagaggagttagagttaagggatttgccccttcagggggggatgttcacgtggagtggaggttttaataatctcttaaaatcgagaattgaccggtttcttatctttgaagattgggaagctcatttccaggggtgtattcaaggtgttctggctagaccagtatcagatcattctccaattattcagatggaggggggatgaggagagggcccacacctttcagattcgagaacatgtggctgaaggtggagggcttcaaagaggtgctgaggaaatggtgggaggggatccaggttagtgggacagccagttacattttgagcgagaaattaaaggctttaaagccgattctgaaaaaatggaacacggaggttttcggacatatcaaggttaagaagcaagaggcttggaattcattgaatttctgggataaggaagagagggttcgcgaattgtccttggaagatgaagaagctagaaaggaggcaagagagatgtataagaagtgggtccttttaaaagaaacgtcatggaggcagaagtccagggaaatttggctgaaagagagggatagaaatacaaggttttttcatcagatggctaatgctcatagaagaaggaatcagatgaatagagtcaaagtgaacgggagatggtataatgaggaaagggagatcaaagaggaggtttgcagggtgtaccaggggttgctggcagatccgggggggtggaagcccaggatagatgctttgatgtttgaaaggttggaagagggggatgtggaggggctggagaagcctttcacggaggaggaggtttttagggctttgtcaggctgttgtggcgagaaagcgccaggccctgacggtttttcaatggctttttggcaattttcgtgggattttgttaaagaagaggttatgaacttctttaggcaattccatgagaccgggagctttgtaagaagtttgaatgcaactttcctagtgtttattcctaagaaagggggggcagaggacttgaaggattttaggccaattagcttggtgggagggttgtataagtggctagctaaggtgttggctaatagaatgaagggtgtcttagccaaggtcatctcaacgtcccaaaacgctttcgtggagggacgacaaattatggacgtagtgctggtcgctaatgaggcaattgactccattgtgaaaagcaatagaggggcgattctctgtaaattagacattgagaaagcctatgatcacgtggattgagattttcttttagcagtgatggagaagatggggtttggggaaagatggtgtaggtggataaagtggtgcctatccactgttaggtactcagttatggtgaatggaagccctacgggttttttccaaagctcaaggggggtaaggcaaggagaccccctgtcgccgtacctatttgtagtggtgatggaggcttttagtgttttgataaagaaggcagtggctgaggggtttttggcgccttgtttgattcagggaagaagaggcgaaggggtccagatatcacatttgttgtttgctgatgatacgctgatattttgtgaagcaaaggaggatcagttattgtatatgggctggttgttaatgtggtttgaggcaatgtcagggttaagagtaaatctggagaaaagtgagctgattccggttggtagagtcgagaatgtggatgagttggctgatgagtttggttacagggtgggaaaactgccttccatttatttaggaatgccgttaggtgccccgtttaaaagcgttgcagcgtgggatggaatagaagaaagatttagaaagaaattggttatgtggaaacgtcagtacatttcaaaaggggggaggataactctagtgcgtagtaccttgtcaaatttaccgatttattttatgtcgattttccagatgcctagagtggtgagaatcagattggagaagattcaaagggacttgttgtggggtggtggggctcttgagcaaaaaccacatttagtaagatggtcaattgcgtgtttagacaaaagaagcggagggttgggggttaagagtcttagggccttcaatagggctctccttggcaaatgggtttggcgttttgcaaatgaaagaaaggctctttggaaccaagtgatcaaagggaaatacggggaggaaagaggagggtggagatcttgtgagtctagggaggcccatgggtttgggttgtggaaggcaataagtaaaatgggacatcaagtgaccccttttattggctttgtggtgggtgatggtgagaaagtgaagttttggaaagacaaatggtgtgaaaccatccctttgtgcgaggcttttccttctttatttgctttaacttcgaacaaagaggcttgggtaaatgaagtgtggacagccgagggggaatgggggggaagttggaacccttgtttcaatagacctttcaacgattgggagttggaagaagtggaaagactattttgttgcttggaggggaagaaggttaggggggatgaggaggataaggtgaagtggatggcatcaaaggatggggatttctcggtgaaatctttgtataggaccatgcagccggggtctcttgcttttttcccttcaaaaattatatggaactcttgtgtgcagcccaaattgagcttttttgcgtgggaggcttcttgggggagagttctaaccttggattgcttgcaaaagagaggttgggttatggcaaatggatgttttctttgccataagagtgaggagacaattgaccaccttcttatccattgtgaaaaaacgagggaagtatggatggtgttcctttccttttttggtgtttcgtgggttttcccccgttcggtcaaggaaacccttttagggtggaggggttcttttgtgggaaagaaaaggaaggtggtgtggcaattgggaccgttatgcttgttttgggttatttggaaggctagaaattcaattgcatttgaggattgtgggttgtccattcaaaggctgaaagcatcttttgtgtattttttgtggtcggaaaccaaattgtggataaaagatggtccttcgaccttaatagattttatagactgggtgtgtatgcgttaagggagaggtttttttgttttgccttgtcctttgatgtttgggcccttttgtaagggggtaagtccctttatactgtaatttggtgggtcgcttctttagcgcctctttgcaatacaatcttatacttattgataaaaaaaaaagataatgaccaaggtccatatttgggattgatggagataaatacaaactagtgaaagagggcatgtatctttcaaagtcttctgtctccaaattagaggggttacggtaataattaaaattctaagagatagggtaagtaaatccaagaattgatgagataggtagatttttaactaggatagttttgaataaagttgggaattgtgagcacaaaggttgatttttttccatcacccaccataaaatgagtgggtttgaaaaaaatactgaaagacctacacaatggtcttccaaggacaacgatggtccttaatatgacgttggcgtcccacccattagggtgtgtcccctagatgctcataataacctgatgccaaagagcataacttttcctaggaaacatccatcctccatagccatttccctaaaatagaatgattccttagagaaatctttaccaaatccaccttagacttgcacattaggtcccaactaatgagagggtctctcttatgctcactaaacccttagatttaagaaaatcatgttccatttcctcaatctttaatgccattgaaaaaggtatcttaaatagtcataagaagttaaaattatctataaataattaaaaaactggaaatatttcattcttttaccattaataagtattgtatttaataataagaataaaatattaatgttttagtattttttattttattaaatagtttataatatctaactattaagaagatatattatctattaaagagtgaaataaaattttatcatttattttattgacatttcattaacattttatttttttattcgaatttcattaacattataattttgtcatattaatatttggttttagtctaaatatctaaatgatggatatatttaatgcatgtaaataatgtaatgaaaagaaaattgtatcagaatcaaacaggcttatcctaattgaagtgggcataacagccactgttatattgaatgggtatgcttggtggagttggaggtatagcgtgttttgtagtttgtgtacgttttgctttcctgtgtatagtttgtggagatgattttcattttttgttgagcagtatatgtttcttctttctgatcaataattgtacatcttggaagaatttgtcattcttctttatatttatccttcaatacaatggttatgtttgtttctgatatttttaaaaaaaaaacacctagaagccatactatagattcctatcaaaagagtgttcagttttcttacaagttcactgattgtaatcaatttatgatgcaataaattttttttctattatttggaagaaacttgtcctttaatatgatccatgagttgtgttcaactgatcaagatcatgtgtgttgcctctatgatgctgttttcccctttcgtctctgctaactctgtcagttggcatttcagcacacaaatattcccaagctatagatctttatact

SEQ ID NO: 11738 - DNA, 3164 bp, Vitis vinifera
  Intron number 4 from transcript GSVIVT01038260001 (locus G SVIVG01038260001) derived from phytozome v7.0 (chr-ID chr5 ; pos 24771218 to 24774381 reverse strand)
cagtgagtaaatattcatggatttttattctaaatggggtgaaagcaaatagattttagctgtatgttgttgtcttaaagagagaagcctttagtaatagaatgattcagaaaaaaaataaaaaagaagctattgtatacccattacattttggcttatttcatttatttattttttgataagtttggtttatttcatttattaactttacattgataaaataggcaaaataactaaatttatgccatagaatcgagagatgacagtgtctactttgctgctctcacttgtctccttaacaggataaaaattgtatattgttgtatgtgttgctgaaatagtatatatgctactatgcattggtatgggtaggagcattgagccccccaccccactccattttttgtgataggcaagtagtgaacatatattaaagacacctaagtaaaaggtgcagcaacatatgcaaggtgtatacatacgacacccaccaaaggcgtgcttataaaggagaaaaacacaaaaataaatctccctctccttactttaagccgagccaatcaacaaagtcaatcattgacaaagaatggtcgcctatttacgctctaatccattccaaaaaaagtacttatgaaataggatttgattttcttatctgattgttccgaatcttcaaaagacctcatgttccttttcttacatagcatccaaaacaagtacaaagggggcaacaatccaagtttttttccattttttccccatgaaagatgcatgccaactcaaaagatttcctcttatcatggagtgcatcacccaaacaactccaaaaagagagaaaacaagttgtcacaggatattggctttagggtaatggagaattaaatgatcaaccgattcttcctcatttttgcacatgtaacatcaattaggttggctatgtggaagagacaatacatatccaaggaagggagggcgactctaattcgaagcactttgtcaaatttacccatttattttatgtccttgttgcgcttgccaagctcagttagatagagactagagcaaattcaaagggattttctttggggagatggtaatttggcgtgaaagccacatttagtaagatgagagttggtgtgcttaagtaaggagaaagggggtgtgggggtccaatgtctatccaatctcaataaggctcttctttgtaaatggaattggcgtttcgcaaatgagagagaggccttgtggaatcaagtgattagagggaagtatggggaaaaaagagggggatggtgctctcgggaagtgagagaggcgcatggtgtggggctttggaaaggaataaggatgaactgggattttgtgggctttaggattttattccttgtagataatgggcgaagggtgagattttggagggatagatggtgcggggattcccctttgtgtgtgtcattcccttccttgtttgctttgtctattgataagggagtgtgggtggcggatatctgggaccccttggctgaggggggttgggggggttggaatccctatttttcaagagtcttcaatgattgggaggtggaggaggtggaaagattattggagcggcttcatgagaagagagtgtatggagatgtggatgatatggtgctttggactgaagcaaagagtggaaagttctcggtcaagtccctctaccttgctctagaagcgggctgcccttctttgtttccttctagctgcatttggaatgtgtgggtgcagcccaagattagcttttttgcgtgggaggctacgtggggcaaagccttaaccctggatcttattcagaaaagagaatgggccttggcaaatagatgttttatgtgccttgagaaagaagagatcatagaccatcttcttctacattgtacaaaaacaagggtcttatgggatttgctctttaatttgtttggggtgtcatgggtgttgccttcatcagttagagagactctccttagttgacatggttcttttgtgggcaaaaagtgcaagaaggtgtggagagtagctcctctttacattttttggacggtttggaaggcaagaaatagattggccttcaaggatgatgtgttgtcaatccagaggctcaaatactcttttgttctttctctttggtcagaggccaagttgtttatagttgattgccctctaactatagttagttttattgattggttgggttctaattaaggttgtttgttgggccagctgggtgtttttcttcttttttggctgttttggcagtgggtgtatgggtattgtataccttgagtcgcttttttggcgcctctttttatattagatcttttcttacctatcaaaaaaaaaaaaaatgtaacatcaattaggtattttccatcctctcctcttaagttgatcaattgttaagatccaacctctagttgcttcccatgcaaagaatctcaccttcataggtgcctacagattccaaaccatgttagaagggaaaggctcacttctttctcacgctaaagaatggtagaaagcacaagaaagaagtgagcctttcccctctaacattgtttggaatccatgggaactggtgaaggtggtgcatgggggtcagatctttcttatgctaatgattgagcattggagccttttacttcagagaatgaggatttggggacatgatggcatgtttccaaggtatgtcatggcactataaactatagaaatactctgtacatgataacatttagtcttagggctcaaaatatatatggttgagcaatcatgtttagctttataaatttacatgatttactaaggaaagaatttgttggcaagaactcaatcactaccacatggtggaacgtaattaacttcctgaagatgaaagaggaaatctagaaatgccgaactagaatcactgaactttggtgttgcacaatgtccaatttgttcaatttttttaagtgaatctgtgaattgcatacttactttttctatgaccttaaagattaaggttatggatataccattcagaaccaaaaggaaaaataaactcttgattatgacatttcactgatgatctgtttttttgagtttattatgttgaatgtttgttgctcttgttacatgttatgcagata

SEQ ID NO: 11739 - DNA, 6406 bp, Vitis vinifera
  Intron number 17 from transcript GSVIVT01008843001 (locus GSVIVG01008843001) derived from phytozome v7.0 (chr-ID chr 18; pos 2721235 to 2727640)
tctgtgctgccgttggaggccggcgtctgccttcggtaagagaaactctgagcactagttttatgatgcttccatttgtggataaacatgctagaggagaggagcatattcttcttttgtggcacaattatttaagagtattggtagatattatatttgatgaaatatgagaaagaaaaaatgattctatttttcatttcttgaatagagaagaaattacactgctataagtaatggagtggctgaaaataccatctcattattcacgggatgaataattttgggaaacaaaataattatgagactgggtaacatgctatcagaatctccttactatggaaaataccaaacaaagctgattaatttacaactgtggctaattaatttacagctgtagatcaaggtaattaatttacggctgtagctaattaatttatagctgtaaatctcccagaaatcagaccaacaactgaaagagttccacaatattcctacttgtttcccttcagcataactgccattttcagttgtgtattcttctttcctctgagtttgtatattttgcattatgtctttcaaatgcaaagtttattatagtttagttgctcctaagcatgattttggagccgtgttgttttataagtattttaaaaaaatgtgctaagaaaaacattaatctttacctgatcatattttctcgttggctccccactccaaaaaggaaaaaaaaacctgtctatcatacgctatgctttaagtgtttaagtcaaatctggagatggcatgaagttttttgaggttttgtgcatcaggggaaggattttccacattgtccctttctcatgaacctttacacaatgcttaaatgaaaggctttcatgattagagagattggaggtgataaggagggagtggatattgtcgtgtggtgttgcatattcaggacatactgaaaatatcataagctcttttccttgtctacggttttggattttatttattcctaagtggcaagtgtgtgaacattctggaatctcaaggggatgaggttcttttcttctctttttgttctctattgagtggatctgtgatgtgtaggaggttttggagttacttaggaatctgttgtccatccagtgtaagcttcttcattgcagctggcagctttatgttccatgatgttactctctctttttttttgagtgctcccacagcccctgagattttttgctccatcatagaatcaagatgttttgtaattttcagcatgcaaatttgttatggatgtttccaatctacaaaaattgcctattcaactcttctaaatttatactttagaactttgcttctttagttagttgaccattgttcatctaaaaaaagtctggaacactttttaatgacatgaacttgtaagttgcaatgacccattttaaattagggttgctgattttattttggttattttaggtatttctgaataagccaaatttggcaattgtttgattttattctgtgatttatactttccttttatttttgttgtgttaatgactcttaggtataaagagactggttctcttggtagggattatgagaagattatttaataaaagttctattttttagtctataccatgtctttttcttccatgctgttaccttggtatccgagcagcgacctgacaccaagggatgacggataggagtagaacacaagaagttcgttggttgaaggattccgtgaagcgattgaaggagttagcctgtatgatgatagcgatgaacctcaaaattgatcaactaacagaaaaattgttggttttggctatttccatggaggttggtggtttaatttcaaccaagccaagaacgggttctgcttctgtcatgaatcatacaccaaccaaattttctaaattgaattttccaacttttgaggaggaaaatcttgtgggttgggcgttcaagtgcaaggggtttttcaaatacaatgaagtgttggaataagagaaggttgggattgcctctattcatttggagggtatgtctttggaatggttccaaggtaatgaggcctttgttaaggaattaaattgaaagacatttgttgtaaatataattgtgcaatttggatcgggaacatatgacaacccgatgggctagattgttaaattgaggcaaacctcgttggtgtgaatttatcaggagcaatttggagcgttaatggcaaggactagaggcttaatagaagacttttttgtgcaatgcttcataagtggtttgagagatacgattaagaatcaagtcatgatgtttcaacctactactttgattgaagctatagggttggctttactacatgagaataccatggaggcaatgattaaggaaaccaagtcctcatcatgaatcattgctagcttggtaccatgcacacaagaagtaggaagaggaacccctggacaaattcccctaattaggaaaatatctcaagccgagatacaggacaggagggaaaagaaactatgttgccattgtaatgaaaaatatgagtcggggcatgagtgcaaaaggagataaatttatttgttggaaaaagaggaggatggtgaaatgattggtgaaaatgatgagctcgaaggataggaggagcctctaatgtcagtgcatgctattgtaggagccacctctcagcaaaccatgtgaattagaggtaatattaagaaaatggctgtcgtcattttgatcgactccagaagcacccataattttcttgatgtcactatggctaagcaaaggttgtgtagtatagcaagaccagcctctaatggtagtagtggcagataaaaccaaaatcgttagtacgactacttgcaagcaattagcctagagcatgcaaggcaaggaatttaaagcagatataaggttaattcttttaggtggatgcgacatggtgttggggatacaatggctagcttgattagagccaatcttatgggatttcaaaaatttatggatggagtttaggtgggatgggaagggaatggtgttacatggaattacagtgggtcccttgaagtttgtttcagccactcacatggagtgggatcttaaacatacaccaatagttactgctacccatattttctcgatgcaattggagttagttacttatgagtcacctaaggaggccgtagtaaaggagatgttggaagaattgcaagggctactaaaaaaatatgaaggtataatccttgcacccaagggcttgcccccatcaagaccttaagatcactgcattccattgctgcctagaagtgttcccccaaacattagaccgtatcggtatcctttagtgtagaaaagagagatcgaaaaattggtcaatgagttgctcgctgctagtagcatccaaaaaagcgttagtcctctttcttcaccagttttacttgtgaggaaaaaagacatgagttagcgaatgtgtgtggattattgggcactaaatgacatcacaatcaaggacaagtttcccatcctagtgatcgatgagttgttggatgaatatcatggggcaaagttcttctcaaagttggatttgagatcatgttaccaccatatttgagtacaccttggtgatatccacaaaatggctttccggactcacgaagggcactgtaaggttttggtcttcaacattccaaggcatcatgaacgaaaatttcaagccttatttgagaaagtttttcgacgatattttggtgtttagtaagggttgggttgagcatttggaacatttggaaattgtgttggaggtcttgcttcaaaaccagttgtatgctaagaacttgaaagtgttccttgggtgaggaacaattagaatatttgggacacttaatttccgtgcaaggggtggacattgatccaaccaagattgaatgtgtggaacagtggcctatacccaactctttgaagtctttatgaggattcttgggactcataggttattataaaagatttataaaagattatgagaagaccggtcagcccttaacagatttacttaggaaggataattttttttttttttttttgtttggagtaaggaagcgaaggatgcattcaagaacttgaagagaaccatgtgtatgactcctgtcttagcagtgcctaattttcagatgaaattcagtattgaatgcgatgcagcagatgggggaattggagctgtactatcacaataaggatgacttgtggcttacttgagcaaaggtttgtcacccaaacatcttggcatgtttggctatgaaaaagagatgatgacagtcgtgtatgtggtgcaaaaatgatgtccttatcttatagggaggcatttcaaggtgtatactgataatttcagcttaaagtacatgttggaacaatgcatctttattccaatgcagcagaaatggtcctctaagttgattggttctgattttaaaatatatttcagaagtgggaaagaggataaggttgttgattcgttgtttagaatgaatgagtcctctaaaagagtaatagtgatggctatttcatttctgttggttgattaggtggaacaactcaagcaagaatggcaggaggacgtggaaattcataaattaattcaggaaatgcaagcaaacccaacttctcattccaagttcagttgggaacatgacttaagtacaaggggaggctatggttaggcaggagttcaaacttgaaagccgttatacttaaagaggctcacgctggtgtagaaggaggacattctggtgtaaagaagaccttggtaagagtccgacgaggtttttaatggaagaagatgtgtaaagagataggcatatttctggttgaatgtgacatatgtcagaggaataaacatgaaaatgtttcttaccctgggctactacaactgttacccatccttgagcaagtttggatggacatatccatggttttgtagaaggattacacaagtcacatggtaagcatgtcatatttgtggtggtagataggttgagtaagtatgcccatttcatgcctatgagccatccttatactgctttggatgttgcacagtcattcatggataatatctacaaattacatggcccaccaaagtcaattataagtgatcgggatcttgtttttactagtaacttttggcaaggcttaatttctcaactgaatgttggtttaaggaggagcattgcttatcaccctcaaactgacagtcaaatagaagtggttaataagtgcttagagcagtacttaaggtgtataacaggtgacagaccaaaagagtggactaaatggcttcctttggttgagtggtggtataacactgcctaccatttttctactcaactaacaccttttgaagctatttatggctaaccaccccctacgtgtgctactcgtatacctggtgagtctagtgcggctgttgttgactagagtttaagggatccggatatcatgatatgaccactcaaggctaactttattcaagcccaagctaggataaagatgtatgcaaaccaaaaaagaagttacaaggacatttgaagtaagagatatggtcttcctttgtttgcaacttcataaacaaactattgtgtcattaaaagggaataggaagttgtctcgttgattctttgaaccatataagattattcaatgggttgaacaggttgcctaaaaataggaattaccaactgagtaaaaaagtccatcctatttttcatgtttcttgcttaaagaagaaaattgggaagtcaatcactccttacattgagttaccagtaacacgagaagatggacaattgcaactagagcccatttctgtcttggataggagagtggtcaaatggaacaatcgtctggtgacacaatggctggttcaatggtcaaattcttttccgtaagttgcaacgtgggagcatgcatttaagttgcaacaaaagtttcctctattttagccttgaggacaaggcttttctgaaggggtaggaaatgcagcgacccattttaaattagggttgctgattttattttggttattttaggtatttttgaataagccaagcttggcaattgcttgattttatttgattttattcagtgatttatgcttcccttttttttctgctgagttaatgactcttaggtataaagagactggttcttttggtagagattatgagaagattattcaataaaatttcttttttttttagcttatattgtgtcttcttcttcctggctgttacaaagaaattggtggcgataggtgcttcaaagcatatggattttaagttgtaacttcaattagaatttctaaatgacttatttgcagactggtagcaccatcacagatcaa

SEQ ID NO: 11740 - DNA, 3126 bp, Vitis vinifera
  Intron number 6 from transcript GSVIVT01007559001 (locus G SVIVG01007559001) derived from phytozome v7.0 (chr-ID chr1 7; pos 12122132 to 12125257 reverse strand)
tgtttgggttccaggtttgtgttttatttttatttatgttcttgtttttgagggtaaaatttgttctactatccatccacactccttattttggtttgtttgatgtagggcatctattggggcaaatatagcatatgttttgttcctttatttgcttttctttttcttgctttttgattttttgattttattttttttactttttgcgtttatctttgtttggtgacatcctgattgccgttatttcttttatttgtcattctaatgaatttagtttcctggaaaagaacattaggaaagcattaggtaggtagttgacatatatctgtgcacaccataacatgtagtgctgcaaaaaagaattgtaagtttcaattatggggtgattcttttgctaaaatgttaattgcaaatatgatagtctggggagggcttcatattggggtggacttctcatgtttttctattttaattcaattgtttgtttctgataaaaaaaaaaaaatgttaattgcaaatatgatagtctgcatctttttggaaactcagctttgacaatggtcttgggtggtgagtttctatggattatgtcaggccttctcacacaaagataattgaggctaaagcttattgactcagacaattatagctgttgtttgttgctagcatggacattgcatcagacagaaaattttaggaaattagcagggtttgaagccaaatgtgaaaccaattgggattgttttattttttattttttatcagaattgggattgttattattgtaagagtgatgcccttcttgcaatgtactatctctatacctctccttgaaggacaggccatccttcttgtatctttgatatgatttgttttggtgaagctagcatgcgtagctcccagtgacacatttgacttggtggttaccctttttaagggtttgatagcagtccataatgaatgggtctaagtgggtggggctagcggaatggacattatcttggctagcttatgggtttttggttggaatagaatgccaaaattttggaggacaaaaaggagattggtggttgatcttttttttttgataagtgagaatgtgtttccttgcaactatttgggtgttgatcattaaagagttttctagagttcccattaacattagtttaagcaaattggagatcagttctgggtgcagtgtatccgcccctgaagagacctttaagctcaatatcaattctttctccttgagtaactagggtgagattgaattttgggccttatttgggttatgaggatgatattatctaagcttctcaaggcagttgggttcgggctagttttttttttttttgataggtaaattaagagaaaatataaaaagtgtttggaaaatggcacaacaaagtacaaacgaagtatacaaattacaccaaaagacaagtaagaaggaagagagaacagaaaataccaaccactctaacaaaatccaaccctctagacaccccagaaaaagggactgcccccttatcaggccctcttgatgccacagttcccaaaaccaagaagcaccccagtgctagacagaacacgatctgccccctgagcaaatctacaaaaaatgcccttaaccaatctaagagcaaagttaaagcaatctcacactgagagagctggatccttactgctcctcctttccccaactgtcagaggagatctatcatagttgaccgagcattccagttttgaggctacccatttaagtaaagatactagcaccagtagagagcttaaaaattgcaagatgattgggaatcttcaatcttttggtagagggagagtcaatgaaagcttcttattgggtggctaatgcacagagaggattatggtagtacgataatgttaggtgtggaaggtcatggtatcattagagttttgaactctttgttcctggaaatccaaattggttaattaggaagttgggaggtttgctacgataggagctccctatcttgttgactttattgaggatgccatgcctccttgagctttggacaccttttctttggggggccaaggcagggctctttattgtccttgtgggaagctctcatgttgtttagtttaattgtgttcatgagcactctttctagaggactgttcatagtatattcttctttcacttaataaaattatagtttctgttaaaaaatgctatccgtttactgtgcaccgtttctttgaaatggaagtgaatagaagaaggaccaacaattagattttcttttaattagatttaatcagggagaagtcggttgatgtgacagaaggagcatcatgtcttcattttacagcctgaatgtaccaaaatgtgaaaattgttttgcatctataacctaatatttgaacaaataatatatatggattagttttcaaatacaagcacacaacatagagaactgagtaattcgataaatatattgtagaaaaaaacttgaaaggaaagccaaagctaaattttatatatggtcacttacaaaatgctaaggacttgttgactcattggcttgaaaattagatagtatagttgtatgccttccttgattttcgagattgtatcattataaacattcttgttttattttcctgatttgtaggatagaggatttctaggaatgagtgaatctcctaacttagtaatttagtttcatacttatgtaggattgtacactataaatattgtatcattttgttcaaaataaaataataaagattgttcttttccacatggtaaccaagtctgttcaatgtctctaagttctcttctaatttttcttcccgtggtcttcattactgttgatttctagtggccttcattatcactattctttgcctccagtggccattattgccatcactgtttcttcctctttcattggccttctttattgttaataccattgttataattcaacagttttttcacattatctgttgcaccactattctctcgagttctatctctattttgctacccactacgtttacatttcagaactaaccaccgacttgtgaatataaaaaaatctagtgtgcagatttctacaagagaaaaggcaagcttaa

SEQ ID NO: 11741 - DNA, 6510 bp, Vitis vinifera
  Intron number 13 from transcript GSVIVT01000850001 (locus GSVIVG01000850001) derived from phytozome v7.0 (chr-ID chr 13_random; pos 2903316 to 2909825 reverse strand)
caggtattaactctacttgaatgataagaatcctttgatgtgaagaaaatcatatggccaacaaattatgactgcatgtaaatgatgtaataaggaaaacataattggcttaacaaccaataatggctgaaatttacaaatctttctgaatgatctttagttcttgtgtcatcattagtaatggttttattgaactttgtctctcatagttctatcactatttaatttagttctattcatgttatagaagtatttgggtcaaaagtagagcacttgttggagaatcgatgctgtaattgtcaggttatatagcctgtataggttgggatttaatttgaatttgtttctttttctatatagttgagttgatttattttctataattagagactgattttagtttttgatttatttcctataattagtgtttgatttagtggattaattgtaggtctagaatagagtcttttttctcattgtaaacattataaataacctgtaaatatatctagtgaatatataaatattatttagaactcattctctattttcatggtatcagaaccttgtgctcagtacatttttttctcttctatctattgactctaattattggtgttagtcccaattttttccagccttaatggttggaattgttcgcatatccttttggccttacttagaatccttactggtgttggtttcaagaggttggttgtttgttttttcttggcatgtcctccccattacagtgatctcttcctatctccaatcagcctaagataatagaaaattttgatgcctcttccactattacccaaacaatcatgaacactaaaaacctagtcccaattcgaagagaattccaaattattctagccacatttaaattgaatgaaggcaattacctagagtggtcacaattgttaaagatgtacctgaggcaaaaaggaaattgaatcatttacttggatcatagatgagtaaggtggacataaaattcaatgctttggttggaacttaatgcagttggaaattagtagaacttgcatgttccttgctatatcaagaaagatttgggaggtctcttgttagacttatgcaaaggttagagatgtttagatttatgaactaaaaattagaatacgtaatactaaacaaggtaatcttttagtccttcaatactacaatgttatataaaggttgtggcttgaatgagatcaatatcaaaacttaaatatgaagtgtgacaaagattcagtgatatattaggaatttactgaaagggagagagcttttgatttcttggttggactacataatgattttgattagattaaagtctaaattcttggtaaagactcttttgtaagggaagcttttgcaattgttagaggggaagaaggacaaagagatgttatgctagattagaaccctaaattatggcttaacatatcatttttcaacctaaaaatattgttattactattgttggccggaccattgatcgtactgtcgttgcctcaaccacaaacccagaaaagaacaaaggcagaaggtcaagtgataaggattctcagtggtgtaattattggcggaagttgagacatatcaaggagttgtgttggtaactccatggaaagccttcaatgttttggaagaagaaatagaggttggggatgaaccaagggtataattaatttttttattagatgaaccttatattaatctcgctaacattgatgaaaaccccctaaacaattatatcagttgagagggagaattgaataaagaagatattgaaaatttgaagcaattcccgccatgacttgagatgtcgtggggaacaacatgttttgcttggacatgtaagtattctcttatccttaatgtcttaaaaaatcgttttcaagccttaggtcattgattgagaagcttcggactatatgaccaattcttcgagttacctcttaacctatagttcatgcctagaaaatcagaaaattaaatcagtagaacatttgtcattgtagttggccaggaaatatctcttttggctaaaagtagcatccttgaaaatgatttgcatgtttgaaagctttttgttaacatgttattcatctcaaatatcataaaaatttgaattgtctatgaacttctcacattttgagtgggtttttcaagaactttttatgaggaagatgatcgggggtgtgttagagaaaaggatagattgtacctccttgaggctaaaagttgtacaacatgcataagttctcctttatttatccaaaagttctaggtccaataaaaccgaagtttggttattccatcttcgtttgggtcatccatcatttacattattaaagaaaacatttcctagtgtgtttgaaaaattacatattcaaaatttcctatgtgatgtctatgaacttgttaagcaccatcaattgtttttcccttaataataaaataaattctattttttcagtttaattcatactattgtttgtagacctataaagatctaaagtatttgtgtggtaaagtggtttgtatattttattgatggattatacaagaattacctatgtataccatttttttttctgataagtaaaagtattgtattatgaagaggcactaaaatagcagcccaagatgtacaagaaaaagacacccccttatagctgaaacaaaaaactgaccaacaagatgtacaaaaaacaaccctaatttaactcaaaatgaaacaaaagatggatgtcattactatatttcttgttttctagaaaatggtgagcacctaatttaactcaaaaatccaaaccttgagatttgataatgggaggatacgttgaccagtatctttcaccatatttacaaaaagatgacatttttcaccaatctcacaacaaaatgagataattgagagaaaaaagagacatttgcttgaaattattagtgccttgattttccaaataaatgttcccaaacctattgggaggaaactgtccttgccactgctcatcttattgatagactactcttgagttttttactctcaattactcatgagtcaactttgttagttatacccttaattcgatgactatagttgtatacctcttaaaaatttttgttgtgtagcctttgttcatattcatgctcacctaagaacaaaacttaatcctagagcccctaagtgtgtatttgttggctattctccattagaaaagggatataagtgatatcattcaagaaaatttttatatttatggatgttaactttcatgagagtcaagcattttttcatcaatcttatcttcaaggggagccatttgcaacagataagaaattttttcaaagttcattggccccatacactaaaattgattatgaatccgaccctaaattagtgcttgttcttgtctcaagctctcctagtagttccccagtcatcctcaagactcactcaaggcccactaactttgaacctgtggttccttagtctattattctcgatcaatgttgtcaaaagcaaaagaagatgtcaaggctataggacttcttatagcttaaggcgaaaggtgaaaggtgaaaaacaaggtgatagtttgactatagtaaggcgaaaaaaagtatacatatatttacctattcaatacttaaccaatataagtagcatcttcaacaatcaacattattaatttttcatttttaatggtgtcttataaaattaacaaaatagtaataatgatttaaagtgttaaatattacactccacatcataaaaaacatgatattgtttagagatattcatcatgtccaaatgcatattctaattttctagacatctagaataaaaaacaaaataagaaaatgaacatcgtagagaagcttttcacatcatcatcatagtcatcattgaaattaaaattatcatcacttccatcaagactaggttgatagccctctatctcattagcactatgatcgataagataatatttcatcttataccttatttagtttgatgttatattgaattaaattacaatctaagtatgtttaatcttaacccatgatcaaaggtgactagcctttatgccttacaccttatcccaaggcgactcccttggcttcgcctttttgaaaccgccttggttgggtctttaagaggtgacttttatttgccttgtctggcttggtggcctaggcaacctaggtgatcgcctttgataacactattattgattttgttatccaaaggagagagggagagatgctacaccactcaaggtttactttaggagaatatagtctacccttgaaccattgagtgttgctcctattatcaacttgaaagaaggtattgaaactcaacttgagtctagttccaatgtattggatgatctttgtttacccattaccattagagaagtttgactaactttattttgtttggtaactttttggcattttagagagcatttgttaccaaacttagctctattgacatacctaaaactattgaaatggcactaggggatgagaattcaaggaagacaatgcaagaggagatgagtgcctttgaaaaaaaaaaaaaaaaggaaatgcttgggaggttatggatcttcttgttggggagaaacatgttaggtgtaagtaggtgtttataataaaatataaagtaaatgagacacttaaaagatataaggcaagattagtagctaaggcatatactcaaacttatggaatagattatcaagaaatctttgctctagtgggaaaaaaatactatttgtatactgctatcccttgctactagctttgattgatccttgcattagttagatgtaaagattgccttctcccttgggaatttagatatggagatttatatggggatatcacctagtctagaagaaaatttcaaggggaacaaaagtctattgattgaagagggctctatatgggcttaaacaaccccctcgagcttggtttggaaggttttttaaggcaataaagaacatgatttagatttagagtaaagggaatcatatgctttttaaacactttgggagtgagaaaataactactctcaccatgtttgttgatgatatcaatgtgactggagataatttagaagaaatggggagaggaaaagagaagttggaaaaaaggtttgaaattaaagacctagaaagacttaaatactttctaaggattgaagtttcttggtcaaatgagggaattgtgatttcacatatctcctcagagaaactgaactgttagggtgtaagtcggaagatgcacccattgagggtggcctcaaacttgatggagggccagagaatcctctggtagaaagagagagagatgtatcaatacttgatagggaaatgaatttacctatcacatatgggatctcatatgatatttgttgtgagtgaggtgagccaatttatgcacaataccaaggaggtgcacatggaggcagttacccggatacttagatacttgaagttaattcctgacaatggtattttgttttaagaaaacttggaggatgacactgggggtttacatagatgctgattgggcaggatcaattgcagacaataggtcaacatctggttatagtactttattgggagggaatttggtaatctggtggagtaagaaacagttcgtgattgctagctccaacactgaagcagaatttggaaccatggtgcatggattatgtgagcttttctggataaaaatcattcttagtatcttagagtaagtttaggaaggtcctatgaagctctattatgacaagttgactattagtataactcacaatccagttcattatgactgaactaagtatgttgaagttgattgtcatttcattagggagaaactggatagttagttggtatgcaccccttaattaattagaaagacagctgatcgacatattgacctagggacttgcagcttaactattccaatccatcataaacaagttgagaataaaaaatatttacttaccagcttgaggggatgtgttggagaatcggtgcagtcattgccagattatacaacccgtatagcttgggatttatttgaatgtgttcttttttggtacagttagagagatttatttcttgtaattaaggcctgatttattttttttaattagtaactgatttagtagagtacttctaagcctagaatagagttatttccttttagtaaacattatgaatatgttataaatatacctggtgaaaatacaagtattattcagaaatcattctctgttttcaatactattatagcctttgaatttacgcatgtagaatccttcaagaacttttattttgtataatccttgaatgtaattgagtggcctggagaattattttcaacatctgtcttcctttttggtagtgtgcatgatgaaacttcacaaatgcaggtcccacaggtaacagaggaggttgctgttgttgt

SEQ ID NO: 11742 - DNA, 13469 bp, Vitis vinifera
  Intron number 1 from transcript GSVIVT01027144001 (locus G SVIVG01027144001) derived from phytozome v7.0 (chr-ID chr1 5; pos 17449106 to 17462574)
aaggtcatttttctcaagtcttaaagatggacacaaggacagacaaaaatatgtggacgctaacgtgaagaaacctgataaagatcaagaaactaacaacatcaacagctccgcaacaaactgatgtattgatgagttagagagttacacctgcaagcagttcgaatagtggttaaaccaaacttgtattctttcataattgttctcttttaaaacccactagtcgtagcttcaccaccacttgctatgatacgtatcccaataatggagggggcaagtctcttcttacactgttcatttgttgacactaaaaaaatattgcataagatggtgatggtgggactaaaggccatcttactttatcaaaaatttaatttattgtagacccctgttggggtgaggaccggggagagtggatgtttctttttttcatttttcattgcattctttttgaagtgtgggggaccccctctctaggcatggatcccggctgcatgggacgtgtagcagcaggaggggatggctggccatgcttgctgatgggtgaacagcagggcaagtagtggcttgccaaggaaggaaggaaaagggagatttaggaaagaagagagaagaaaaagagaaaaaaggaagggggagaagaagacgtttgagcaaggtggaggagaatccaggaagaaaggagggacgagcggagagaaaagaggaagattgatctttctgctaggacttccaggtaagattactatgatcttatcatattctcttattcgtttgttgcaaatggtcagattcatgtttgggctcagtttggtgagtgatggtcatatattattttccgtttgttttactggttttcaatctgttgataactcatgaagcgaggttacagctattaaatcctcagacccctcatccttgctctgttccttagcaatttctttcttcatacctctcatgctaccaacttcctgctcatgcacacaagaactgcacatccactactaaccttcattttcccccctcattttcctcccgttttctcactcctcaaaacaccagaagaagacgtctaccaagacggcaatcggagatgctcaaaactccaactccacttcgagcctaacgccaaagctccaaaatcctagcatggagagccccggatgcagttctgggagcataaggctctcttacggcgctccagcgagtcccatgcacctcgcattctacgtgacggcgtcgccatcaactctcccctcatcgtcgccgtcccttgaagccaatctacacagctcacccgctacaggaactcggtggcagcggcattgtcggcaacgtacgtggcgaactctcccccagacggccaggttcgaccgaggaagctcctcatgcgcctataaaggccgcagctgctggctccactctcggacacggacaccaggccgcagctgctggctccacttccagacgccgacaccgaaacatgacaacgaacacggcatatgtggcggcaatcgaggcggcgcggaggattggcagcttggaccaacttcgaggacctccggcgatgcctctctcacctccatttcctccttcatcatcatctgagttgaaagaagaacatgtgatggaaggcccagagagagatgagaattgatttgggctttggtgggctggacccagatgaaaggtccaagtttgtcatgaaggtagtgggtgccttgggcttgcccatgatgtcattggacttgggcttgagttggggcactaggcccaagctgtgatggtgatggagccttgggcttgcccatggtggcgggtatgggcttaagttggagcccaggtccaaagttgctaatgaagggccccatttctccttaagccaatcactctcatggcccatgtccatttcaagctagcccattaggctgcccaaattctaaataattcttttaaaaacctctaacatccataattaattaattcaatcattcccttttatttgttatcttattttatttctaccaatttagttagctcaacttaaacacaactaaaagataatttattaggatagaatatcgtttttaaaacttaaaataatttatattttatcttcattgctttagttatgtctaatcaccatatatgaaaatttgcatataattaatttatgttaatctcaatgaattttctacattctaaattttaagtcccatcttcaaaacttatgtcatttaaaaccattcttaaaaaattcgacttcctaaattaattttcaatttcgaatatttgactctttagatattattcttgttattatcattattagtccgtatttatgtatttaattcttttaaaaattccaataattaaaattcaattctccgaaaattcgacttcttaaattaattttcaatttcaaatatccgactatttactttcattcgtttagatattattcttggtattattattattagtccatatttatgtatttacttcttttaaaaattccaatcactaaaattcaattcttaaaaaattcgacttcctaaattaattttcggtttcaaatatctgactatttactttcatccatttagatattattcttgatattattattattagtccgtgtttatgtatttaattcttttaaaaattccaatcactataattcaattcttcaaaaattcgacttcctaaattaatttttggtttcaaatatccgactatttactttcatccgtttagatattattcttgttattattattattagtccatatttatgtatttaattcttctaaaaattccgatcattaaaattcaattcttcaaaaacctgacttcttaaattaattttcaatctcaaaatttccactactcaatttcactcatttaaatatcatgtttgttaatcattattattatttcatatgtatttatttatcctcttctaagaatcgcattcattaaagtccaattccttcaaaaatcccatgtcttaatttaatactcgatcctaaaaagtccactattcgtctaaatgttattttcatcaattagaattataatctcatacttatctagttatttaaggtctaaaatcctttaaaaatcctctgccttaatttaatttttcaatgactcgttcaaatcttattttcatcaattagaattataatcccatacccatctagttatttaaagtccgatccttcaaaaatctaatgtcttaatttaatttttcaataattcgtttaaatcttattttcatcaaatagaatcattattccttatttatctagttatttaaagtctgatccttcaaaaatctaatgtcttaatttaatttttcaataatttgtttaaatcttattttcgttaatcagaattcttatctcatctatttatttatttagggtccaattcttcaaaaattcaacgttctaatttaattttcaatcttaaaaattcaactactcattttctattcgtttaaaatattgttttcgtcaaatagcattattattctatatttatttatttattctaatcgttaaagtttaattcttcaggacccgacttccaaatccaatttccaatctcaaaagctccaccattcgtataccgccgtttaatgatcattctcgttattaatgttatcccgtccatttacttgttcagttattcatatgccaaagatctcatctctaaaagttcttaagctttcaatctttaagttcacatcttcaatctctaaaattccatctttcgcaattatttacctaatctttattatttcgccatcgttgttattcccttcattcgcttgcttactcatccacttatccactcatttaaaatctcgaactctcaaatcattttcaaaattccgatctcgttcaaattcaatttctaaaattctcgttctcacattcaacctttaaaagtctgatattcaaataatctccaaaactccaatttacaaataatctctaagacttcgattctcaaatgaatttcaaaaatccagttttccttcgaacaattttaatccctgtttggtgatgcatgtgatatgttttgtgctctatattgtgcactgactcagcttttatgatagcgcattgctcgtccgtggcccaggtacgcatccattcctattctggccattctctacgcatgttctgattcccatatgtacataatcgacttaagtatccattgattttcctattgattgccacgtcagcttcattttattagtaaagacccgactttaggaacttagagggatgctacggtctttactgtaccttcccgacaagtaacctgaccctcgaactcgatccgatttttagcagattacctttttcaaaatgaggagtcatacttagggttttctttcttattttgtttatcctttttaaaaaataaaacaaaaataggtagcgacttcgaatcatttttcctaatcaataaaatcatttttcaaataaaaatcgagttcaccatcgagtggaaaatgcatgagccgaaatacggggtccacaaaatggcgactccactgaggatagtcttagagggtcaaacttgaacttgagatgaagcaaacatggcatttgatgagtcgatcagcgggtacccatatcttgattgcacattaagagttcccgagttttcatttgggacattggcacgttgattgtgtttgttgatatcttgattgaggatcttgatacaacgatgtttgtttttgtgcttcattgatatatttgtttgatttgacatgttgattatgatgatttattcgtcctgattgaggatcccgtgatagctattttctttgtgcttcattgccatattcgttggaaatattgacatgttgattgcattgattacctatcttgtttcgtttagcatagtgattccgatatttgccatgattgttttggtcaccttgcatgtatagattcattgttagcatgacgtatatcgattgatttggcacgttgattcactagcttgtatattatattgaccgtctttgagcatgatgttcgtatcgccattcatcctgattgttatagcttttgcgtgggcatgagtgatatatcctgtactctgcttgattgcatgttgcatgattgcccttcttctgcgtgattgcatgtcgcctgtttttgtaggccgcatatatatccctttacctctaactctcttggtttcgatcattcctttcatcccggttctcattattgcaagtgtgagaccttctgtgtgcttgctctttgaccgagccagagattaggagtagggtctagcgatgggctatatcgatgcacgggagcattctggaggagagcgacactttgatgtcgattggagtccgatcattgaagacctgtatagctcggagctaggtttcatggatatttgtgtggccagtgtgtttccttttcctttttagcttcctagggttatcggatgcacccacatagttcactgtgcactatagttggcttttgagcgttgagagtttgagaggtttcaccataggaaaccccttgggatgttgaggtagtgcatctgtggaggtgatgaccaccttgcatggaagcgccctgtctcttcggaggcatgcagagggttgcatatcgtcggagagtatgatcgcttctgctagggatcttttaaagtccacccatatccatttaaagccactttcacctcgtaggttggaccgtaaatcatttgattaggactccttccctacacgtgggtgcatctgagagcttttagagcctctatggttatagtttggattcggatgtttttttttttttttttttttgtctccagttgagagtgcatagagatcggtgcgagtttgagtacggtcggatagttcgtattcttcttggatgcattgctcattttagtttagattatcattcctttcgtactttccctataccatatcctcattttgcttctcatcttgtcaggatcggatttcgttcacagtctggatacaccctctttgggtcagagtagaggggagattagtccggtattgcgagagatcgagcatggatcaacaagttgttatagtggatcagtttacgactgccatgtcttctatccaggaggctttggctagccttaggcaggagattagcagccaacagagcagaccgcccatagcctaggatgagactcttcatgattcgctgccacagccgccgccaccaccagtgccaacagtgcctcagtcctcaccttatgtattgcatgggcattctgaggtcgctccgcccgctgttgtccagaccattgttgttgatgacgctcatgcgcgtatggaccgcctcgacagtgtatgaggcaaatgagagtgttagatggataagttgtttgggatgattttgagggtatgccggtagccagtttgccggctaagtttaggatgccagacatcgagagatatacgggcattggttgtccgcgcctccacctcagactctatagcacagtgatgagggctcatggtttggacgagtctcagatgattactttattcctactatctctgagtggggcagcccggcgatggttcgtttctttagagtcttcacgacgccggacatgggatgacttggcccgggagttcctacgacagttttcatttaacactgtcgtggatgtatcgaggagaaagctcgaggctcttaggcagagatcagacgagtcaatttcttcatttatttcccactagcgcgggaagattgccgagatcatggatagaccttcggagagagatcagatacagatggtcttgaggagtttacaatccaggatcaccaggcacgtggtcgaggtatcgtttgcagattttggttcattggttctggctttatacgatgtcaaggacggcatctcgagatgattgtggacagattcttcccctagtgatattaaggggaagaagccctttgtaggacagaggttagtggatgtgagcgtcattggttcttccagtcaggggcctctcaggtgccatcagccgatcccacagctttccgagcctcattcttcctatgcacttcatcagtacaggccacgagcacctcgtctggcttatgatcagtcttatgtgccgcagactttggctttgccttattatgcctcccagggcattgagagatccctggtttcctacataaccacatgacagccatgctatgctgctcagttcactgcgaaacccacaacgccttatttccgacccagagctcagcagacttctgcttcatttgccttgaggacgcatgggcagttctcgcagttaggcatgccgttgagccaggctcttcggaagcttacagaggcagggttgttgactgctctcgctcctaggccgctacctcatccgattccacctcaattcaggatggatttgcactgtgcatatcatcaggggcctggacacgagaccgatcagggtttaatacacttggataaaccgagtgtgaccacaaactcgttaccgactcataccacgcatgcagtccctccaccagccgatggtattcatttcttggactttgatgagaccgacgaccacgtccatatgttgagtgaggacgatttagacccagagcccatcatgccatatgtgatttatgagatgagtggggtgactctagggcctcggatgcctgctccatttcgattagttaccaaggcgacgtcggtgcaggctgccactgttgtgccattgattctgccacattatagcattcgggcgccattcatcttgatcccggatgttgagggggttcaggctccacatgttgataattctcaaactttggacgttcaatatattcttcgaggaggtcgagtgatgtgacaaccacctcctgcggtagctaggccagttgagggtacatctgctcccgaggaggtcagagtagaggacgatgagatcttgagacagctacaaagcactcaggctcgtatttccatctggagcctgttggtgtcctcgagtactcaccgtgatgctttgattcgagctttgagccagatcagaatcgagactaccgcatttcctgagggattgattcatatgatgacggccggcagggccacatgcggggtccacatttatgtatcatttaattggcattaaaattaattatttctcaaaaaaccaatagaaaaattcttaaacaagagaaaaatacgaaaaaatatattaattctttttttcatctttagttttattataaaaatataaaaaaagtcaaatataattaaaattaataaaaaaagcttttatattttaaattaattaatatttatataaaaaattcaaattagtgaaataaatttgaagtaggatactaaaataattgattatttttatttttattttttaaattttcttaactcttttacttcaacgtttcattattatttttgttctccctcattttctcattatctcgaactttatgaaaccaaacatagcttaaaaataatgatttttttttaatttatttatttttgccttcttctcaatttatatcagtgtggaccccgaaatttgctcgatgagttctcactcgatggcgaaactcgtttttttttttatttgatgaaaatttgatttttagaaaaagacttggagtctccacttatttttgttttattttttttaagggaaaaaccaaataagaaagaaaaccctaagtgtgactcttgaaggaaaaaaacgggtctgtgaaaaaccaagtctaggtccgagggtcaggttacttaattgggaaggtacgatggtgaaccgtagcacccctctaagcccgcatacgcacaacctctattaaatgaattgaggaaattgtggcaattaattaattaattatggataccaagaaaaataatcaatatacaagtcatggtgaaaattaatatgcacaaaaacaatgatgaaatctaattacaaaaatacacaaaataaataataagagaattatgcaaaatgatatattgaattaaataaataaaagatattaaaaaaagttttaaggaaatttcaaaggatttgattaaaaatgattttgaattaatgatttccatttatttacttataaaaagaaataatttattttctcaatttcagttgtattcaattttcaaaaaaagctatttacacttattgtatcaaaagaattcattacaaaattttaatttgggtacaaaaattattttttacttgcttttattggaaaataatgaatttttataattttatttacaaaagtatttagattcattttcatttaaaagagtgatttttataaattatttaaaatgacttaactttatttgcaaaagaaattttaattaaaaagaaaaacaaatatttaaaatctctatttctaaaacacttttaatctcattaattaaggaaaaaaaaattcatttgaaaaaaatatttttagacaattttattaaaaattaatttttggaacaatttttggacaatttttattaaacaaagaattttttttaacaatgtcattaaaaacaatttttcgaattctattaaaaacaatttttttttggatttttctaaatgcatttttctgaatttttataaataatgaaaaaatatttcttttattaaaaagaatattttaaaattagtattttattagaacatatttactgaatttttccgctcatttaaataaaatttctaatttgtttgatgttcaattctgtacacacttaataaatacatacgaatatttacacaaactaataaaaataaaatcaaataaaagtgaaaaataaaatatgtgcccaaataaacttataacaagctccacgtgtcatcaatttatattcagccaatgagattacagagtgggtccatgcaaaaacaagaataacacagatgtaaatatccagagatgtataaaattgcacacaaatattcaaacccaaattccaatttcaaattagtcccataaattttgtcaattaaaatgagcccaaattactataggtcttaacctagaacatccaaattaataacaaaaaaatacaaacacaatcaaccaaacctaaaattggataaattaaaataaattatactagacctaaatttaatatttcataatctgagcctagtttaatatacaccacaattgtcccatgtccaaattaaacaattcaaattgaccaagttcatatcaaacattcaaataattcaacaaatcccacccacattatgggtcccaaaattcacatcaattaacaagcccacataaaaaaaaaaagaaaatacatggtcaaaagaaataatatttcaaattcaatccaataagcccaaacaaataacaacttaacaatagaccaagttcaaataaataatatgcaattgatataatccaaatatctccaaattaatcactaaatacaatatacccacaaacccaaattaacaaatttcaaattaattcactaacaataaattaaatcaaactatgtattaatctacccacaataaattaaccccaaatttcatattaattcaacaatccaaatttcacaaacaataattactattaaaataaaataaaataacaataataataataataataataatgataataataataataataatggaaaataagtgatacgggaagtgagataatgagagaaaagggaggaggtcgtcggtcgacaggtgatcttgccaaaaatagtggatgatttttttgggaatcacaaataaaataaaataaaataaattgaaataaaaataataaaaaaataaataaaaatggaagagctgtcgggtgtttttgggggaagaagaaaaaggaaaaaataaaaaataaaaaataaaaatgggggtaggctctcttgggaaaacaggaggagaaaaactaaaaaagaaaaaaaaaatggagaataatggagggggctggctgggaagaagaagaggaatggaggaagaaaagaagagaggagggaaaaaatccccccggggggggggggggggggtcgggggcccaaatagggagaaaaaaaaaatggggggaaaggaaagtggggtggggccggccgtgtgggaagaaagaagaaatgggtggggtgagaaaaaaaggaagagagaggagagagaaaaaaaattaataaaataaaataaaattataataatataataataataataaaaaataataattcataaaaaaataaatactaaaaattaaaagacgagtaaacctaaaataacacgtgtaatcgaaatttaaaatttgatttaaaattaatataaaaataaaattagaataaattttaaggtttataaccagtatttttaaaaaaaataatattttcttttaataaatagtttaacaaatataaaatataataaaggaaaaacagtacaatcctaagtacatatctaactaaaaaaaacagccaaaagaaaaaaaaaattattctgctattttgtttctcaaatcaggagaaccgtcatacatctaaacccacacgaaaaattaagaacaacttagaaaaaaaatatttttataattttaattgacatgaactcattaacaaacaaatttgtctagctcaattggctgcaccgtcaattcattattgaaatcactgggtgaatctctaatttcctatgtagtaatgctagcattttatatttgaattggtggcttcactttctttaaatatgaagaagaaaattacaacatatacaaaaaataaaaacaggttaaattatttggtaaactaatatcttaacatgataattcttatgtaaaatgtaaaaaattttgtacaaaaactgtaaacttagtttatatcattaaaaattaatttttttataaacttagtttatctacttaaaaattattttcaaaacttataaaatttaaaaattaattttttataaacttagtttatctacttaaaaattattttcaaaacttataaaattaaggaaataattagtatttaaaaatggttacattttcaatgtaaagctgtttttttatataaaaattattattattttcgatttaaaaaatataaaacaaagaaagaccaaatttatttatttatttaggtgtattagagctatagtcaatgcttttaaaaaagttgataaattaactctaaaagtgattgtcgttaatgaaaatgtaagacaaataagtttcgaacttttgtaaaaaaataattttacttgatataataatagatccatgaagaatttattaaaaagatttgttagaataaatatataaagagttaattaaatagattagttagaggacatcaataaataaaagcaatattacgagggtattatgggaaaaaagtctacaaatatttatactttcatatatactaactataataagaggactgtgcatgtgagggaggagtgcagataagtgatgtttttctaaaattactttaatttttttttttatttcaatacgttttttaatcatttaaattattaattttctattaatcaatacttcaaataaatcctttaaataaaaatttattatgataaccctagaaattggatttgaacaatataaataatttaatgtttgaaaatgatttttaataataactaactaggttatcattacggtaaaagttgaaccaacgtatgaatttatttttatagtatttttaatttttttaataattattattttaaataaattctttaaattgaataaaagatgaaacaatatatgtatttgttattttatagttacctagatggttagttttctgctaactactgttttaaataattttccaatgtaataataattattaagaataaataaaatgatattttaaagcttatattttacaaagtcaagaatgacactaatacaaagtaatacggtacaaataattattaaatatttaaaattaataaattaatttttagacattaaattattaatattttatgaatatcatctttacttttattataattaatttgatctaatgatctaccaaccaagaaccctctgattaatccatacagcctaccaataaccccacaattaattcatacagcctatcaacaacccccgaactaattcagacagccttatttatttctacatgtctttcacacaacagttgggaggtcaaatatttcaatatctcaagttctcagccataaagccggtcgaaaaaatcttatcaaaatgaatttaaatcatatcactgggcgcatgccatgaatagtaatcagcaacaaccttcctattcattcaagtatgtaggacaactactatatatgtacttacacaatgctttacgttccaatataatttcagtctcatctacaagctaagctgagtgtc

SEQ ID NO: 11743 - DNA, 12304 bp, Vitis vinifera
  Intron number 1 from transcript GSVIVT01038795001 (locus G SVIVG01038795001) derived from phytozome v7.0 (chr-ID chr1 2_random; pos 1089723 to 1102026)
attgcactggtattttctttttctttttctttttcttttttttttctcgggaaaatttacatacattttcacccttgaatctctcactgaattcatatctatgatgcatctagacatacaagattttggatctcttgtgagttgcgtttctgtccttaatgaaaagatctggatatgaattccgtatccattaggaaagtgagtcgatctgttttggattctttgaaatcataaagggacaccaaggcagagaaactcttgaatgaagagcctaatactaataaccactgaattctggaattgtattgtgagggaaaatttaaattattccaagttggtagttcgcgattgcaataacaatttgaagctgttccagtatcatcacaagtcattatgccgccaacgttgcccttcaaatgtggaaatccaatctgatagtgccttctacacatgtggtttaggatgcccatctcctgattttggctatctgtttcatagctcagtatgtggattatgacatgggccagcaattatgcttgctggatggacatattccgtgtcccccattagattatgaaggaaagactgggttgttcctggactgtatgtataaagatagggtgttgaaggggggacatagtatcattctctaatagaaataattaaataattaaataatataaattacatcaattagggaaagaacgtaaagaactcttatttgtccatttgtactaagtggtttccttctacattcccatctttgtagcatgggcactcacacacagacacgaacacaaaacaaacactacaagacatcacatgactatgcctcattggtttctttccacattcccatctttgtagcatatgggcacatacacagacacaaacacaagaagacatcgcataactatgccattttatttcttgtcaatctttcaactccaaatatctttagttttggtaatttatgggacatgtgataacagttaggaggattctggagttctatttttctagtttagcatagtatttacttttgagattacaattccatcctttcaatttgagcttggtcctataaattccactaattaagattagtggatttatttttaattctagtctcttttaatccctttgtcgtcaactttagcacaccgatcttttttggaaaatctcgtacccatgttaatctgcatagattcattcagaaaattttaagtttattcctgaagcatcagaccataatggagaaaaggtgaatctgtatcaatcatttaattaagtcaaattttctagcaccatgtacaaagaaactcacacattagtttgcacccagttcctagacatgggataatatatgttctcagccagacctgtccgtcacactaatttatttgagaaagagatttacttaaattgaggaaaataccttttctttatggacgacaaaatgttgcattagtcaatttaaggaaatctcttgaactaaaatttggccaaggaattgcactagtctgattttgacccaaatgctatattaacaatttcaatacttggagggcaaatctaatgtacacacacacgtacatactagtatctctactctcctaataggttatttctttaaaaccatcttatcttctttattgaaggaaagtagtggtctaacaacatgcccttttttcatgtttgactgtgtacaccatcatctgtgattagatgacaaaaaatttcagacacattgaaggaggtccatgtgttaacaaaactattgtgtgatatggaacacacatcttaagcaaggtcttgagaattaggaaagattcctttacacaaaattacaagttcaattttcaaaatctcattgttacatatcttcccagtgtactcccttttaaacccattgatgcattcaatctaacttgaaatccgagaaattctaaatggaatttagtttctttctaaagaatactcaaattttagcatttccttttttctatggtaaacatgttagaatgtgttttgtcaataacctttcaaccatcaacatagtaatattaatccatttcatattatacatggaaaacatagcacatgattacttgtgttggaagatttgaaaattatgtccaaatttgaatggctacaatttgtttgtaaatattgtaattgatttttatgatggtatattttatttctttccttatttcttctctaaaaaatctgcatgtaattaggttctctgatttaatcctaaattagccatagcctagtcaaccttgtatctgtacaagttgtactcattctttttaagaattaagagacaaattattcatccctcatggtattagaggaggtaacaattctggaatttgtgtcatcctcttctaggttttcattgccattttttctttggccttttttgctaactgttgtgcttagccttcattaccaagccttatatctataaaccttatatcagtcccattttcatccaatttaaatctgtcagcttaaaaatcaagagtgcttagccttcattgttgaatcagcttgaaaatcatattccaatttctacaccaacttcaagttttttctctatggaccaatcaggtaatatccatgcaatgaatgtctctaaggactgcttttctagcaccaggatcattgattcaggtgcataagatcatatgactagctttttaaaattattgtccacttactccacatgttctagaaagcaaaaaatagagattgctaattgatcttttttcttaatagctgatcaaggtacagtcaaaatcaattccactttgtctctaaaatccgtattacatgttcctaatctttcacataaccttttgtccatatgaaaaatcagtaaagatttgaattgcttggtcatattcacttcctttagttgcacttattaggactctataacggggatgacgattagacttgctaaggaaaaaagatggactatactacctagatactaattgggagactggtgtttaaaggtctcaaggcttgatttctacctcttcttcaaaagttaaatcaaatttggctttggcttagatgtctaggacatcctccatttccattgttgaaaaatgtctttccatctttgtttaaaaactttgactatcttgattttcgttgtgaaatgtgtcttcttgctaggcactattgagtttcatttctaataaaaaatcctaaatgttgttctccatttagtttgataaattcagatgtttaggtccttcttgtgttccaaatcatttaggttcttgatggtttgttacatttatagatgattgcacttgatccactttggtttatctcttaaaatcaaatttgaggtcttcactagttcctatctttcataaactcattagtacatataagcttttgagaatcaaaattccttaattctaagaattaagaaattacaaataaatagggaaagacaatcccataaaagactcaacaacctaacaacctaaccaataactaacctataacatccttagtttttaataataatacttttgaagtttctttttaactaccttcttgctaagcaatcacaagcataaccttcttgtctatcctttaccaagcattaagtgtccaagcatgcaaccaaggatgaggtgtcgaaatctgtgtaacctagaggacactaagtcgccttcatcacttgatacctagtacggcatagtgactcaacaagttgttgcacttgccaagtagctacaaggattaagcacatgtcatgtatcatttctagcaaactataatacctaccaagaagttgcaaggattaagcacgtgccatgtgttgcctctagtaagctgctgtacctgctaagcagttacaaggattaagcacgtgtcacatgttgtctccggtaagttgttgcacctaccaagcaactacaaggattaagcatgagccacgtgtcatctctagcaagctattacacttaccaagtagctgcacggattaagcacgtgtcatgtgttgtctccatgcaataagggatacactgatcacttccctttgatcggcatctaactatgagtcacctatgtgttcacttaccttgggtccctataaataggggggttcacttaccaagaaagaaaagtatagaagtatggaaaggctcctatggtggtgctattctagaggtcggatctttgagtcatcgtagaggatgtagtgtgaaaattccagtctaaaagatgagtggtcttataatgcatgattttacttggttttagaattatatatctcatgctttaaatgttatatgtattcattatatatttttttaaaatattatgagatatgctttgaaaatgtgttggtcaaatgcgacatttataataaatatatgctccttgtattcttgatatgtatgtatataaatagttattgtggtttggtgataacgaaggggtggatacaatctagggaagctctatctaaggaggttgggttttaagcgggaccattgtgacccctccaatcattcttgggagcttacctagtacgcattattcattgaaaatcactagtactgtcattatggtattttatattattactatacatgtgattgtaatataccctagacctatattgtgttgtagagatggaaggacacattgtagccgattaacctagtgatcttttgtgccgagagatgaaagggcactagagcaatttgtatgagaagcatgcttagagatgtaggggcactatgtctataaggcaccatgatatgtgaaacatgtatcatttgtggatgcatatgtggtatatgactatggagaaaggggctccatagctgttatattgcatgatattgggatgtgtcgagagttggagtggtaccatagcctggattatgcatgtgtttgattgattatacattgggttgtctgatgttgcatgcctacttgattgttatactatctattatctatgttaagtaacaggtatgatggaactcttttttctattctggattgaccatcctaaaccctgcattatatgatcattcattgagttatactcagtagttccctaaatttttcatatgagaacctagtagaaccagatatcgagcaagttctggaggatagacaacaaggcatatagccattgtggccttttttttttctttactttggatagactattgacatgtagcaatttccttaggtatctacaagtttttgtcccttaaggccaactttgtatcttagaagagtaatgattatatagttcctttaatatgcttccttgtgcttctctaacatagtttatttgatcacaagttaacttccctttgtaggatagtatctccatcttagtccttaaactagagaaaagagactctcatgtggggatgatgcctgcaaggggtggtcatctcataaccgaatttgatgaaacataacagtaaaaaaatgacaaccagatcttatccctacaaaataggaatttcaatttctttcctaactaactccgaaaatctttgattcttaactaactcctaaatctttgacacttcccctgaagttggtgtgtagatgtctatcattctttacttgctgacaagaaacttgaagttagaccttaggagtctcttggttaggatgtttgctatatgttgtgttgtaagaacaaatgacaagcatataacattaggctcaagtttttcttttatgaaatgcttatcaatcttaatgtgttttgtcttgtcatgttatactagattgtatgcaatattgatagctactttgttgtcatagtacaatttcataggaagagtagtgggcctccttagttcttctaggttacgtttcaaccataacatcttgtagatatcatgtgtctagctctaaactttgcttctgcgttacttcatgccaccacactttacttcttgcttcttggaggaactcggttaacccatataaacatacaatacttgagatgtagatcttctattagtgattgatttgtcctaatcaacgtcgatgtaaatctcaactcctcattgctcgttcttcttaaacaataatcctttccctgaggtgctctttaagttccttatggttctatagacaactttaagacattttttatgtggaaagtgcatgaattgatttgccaagctcattgcaaaggtgatgtttggtcaaatgtgtgataggaatattagtttgttaaccaacttctaatatcaagttgtatctactagcttccctttgtatatttttttttctagcttcaaattgtattatactagagtgttatcagtctacaaccattcatacctatttgttttaggagatcaagagtgtactttcactatgagacgacgatgcccttcttggaatgtgcaatttctaatggaagaaagtgtctcaatgaccccgagtccttaatctcaaattcagaagctagaaccttcttaaacctttttgtctcaagcaagtcatctctagtaagaataatagtgtccatgttgacaattaacatagttaacttccctttgggtgagaacttcataaacattatgtgattagttttcccccgagtataaccatgtttatttacgaactaagtgaatttatcaaaccatgccataggcaattgtttaagcctatataatagcttccttcgcttgcacaccattgatctgaatcctatggtgaagcttggaggagagtccatataaacttcttcttttaaatcctcattgagaagtgcattttatacatcttagtgttgcaatggttagtccagatttgcaataattgataagagcactctcactacatttaacttggttactagagtgaacgtttttgaatagtcaataccatagagagctgttagagttgtatttcactataaaaacctatttgcaatcaaccgtggactttccttcaagaaaggtcactacttcccatgtcttgttcttctgaagggctctcatctcttcaagaatagctttcttccatttaggaacattaagagcatcctatatatttttaggaatgtctatgctagaaagttgtgaactaaatgcgagaagagaataagataattttccataggacacaaagttaaacaaaggatgtttagtacattacctaggacctttcctacaagcaattgaaacatataaatcattaacaaactcaatttgagaataggaagaattggactcaaacatggatttacctgtaggattgaaaaaaattagatatgttctcgagttaggctcatagggctcctgcaaagtgggtttcttttttcctttaatcaaggttcttccttgaatagacaatgaattcgttcggtttttttcctagcttctcacactttttaggttctatgtaattttttgatggcataatagtcaactttccattcctcttagtatttaacctattacatccatggttgttatacgtgttcttgaagtagggtttgggtttggcatgggtatttctaaaataggggttgccacgggtgctggtgcttttaaaggtgattgagtagatttttttgaatctaggacaaacattacaaaaaggtgtttttattgaaggttattaaataaagaatattcactatcactcttcccatggagatgatgattaaaaccatttttttttgtttttaaaaaaaagacatccataataacaaacttttctttttttggaaattggatcaaagcatttgtatcctttgtgtgttggagaataaccacaaaataaataaaaattcattttttttagctctttgatcaagttttccctaattatgattgtgaatatggacaaatacgatataacaaaaaattttaagaggaatattaaccaaaattcttgatgagggaaaacactttttgaaaaaaattgaagttgtttgaaaatccaagaaccttgatggcatcccattgatcaaataggtgggctataagaacaacctccccctacaaatatttagggacctttgttgtaaaaattaaggatctagcaacttcaagaaggtgtttgttttttcttttagtcaccccattttgttgaggagtatcattataagaacttgggtgcacaataccattttcctcagagtattttcctaggattttattaaaatattcattcctagtgtcacttcgaaaaatttaaatgtttttttgaaatcgagtttgtaccatgttgtgaaaaattttgaaaacctatttagagttaagacttttccttcaataaatatacctaagacatgcgagtatgaacatcaatgaaagtaataaaccatcttttccccaagaatgtagaaattctggacggtctttagacataactatgaatcatagaaaaaggttttgatgctttatattactgtgaagggaatgggctacggtggtgttttgctaactcataaatttcacattgaaatgaagatgaataattttggaaactaatattttaaatactgaaagcttggatgtcctaacctaaaatgccataatagaatttcattatcattagtactagaaatagacttgagacaagtactttgaggttgttccttaaagttagatccatcttcaaagaagtaaaattctccactttgtctagtactgtcaatagtcttccttgagttcaaatcttgaattttgcattgagaagaggagaaattaaattgaaaattttgatcacaaattatttgactggcagacaagagattacatgagaaattaagagtaggaagaatgttatgaagtgtgaggaaggaagaaaaaactatgaatcttttctaacaatagctaaaagggacccattagttattttaactttttgattccctacacaagttttgtaagaagaatttttttttttgaaagatccagtcatgtgatcagttgcaccggtatcaatgatccaaggatgactggaagtggaattaacactaacaagagcgtttgtgaggtagttacctttctgagctaaggaacaaaagggagatggggtaaagtttacattgaaagagactaactcctaaatctttgaaagtacacagtttggagtcaaaatatagacactcaaatctgataatgggaaggaatactttaataataatttgattacatatcttcaaaatgaaggcactattcatcaatgataatgtgttggtactccctaataaaatggggttgtagagaaaaaaaataggcatttactagaggttgctaggtcctttctattccaaatgaaagttcctaaaatctattgggatgaagtcattctagcagccacctacttgatcaaacgtatgctatctcaagtttttgcattcaaatctcctatatatactcttttagagttttttttccccaaattttcaaggcattggttctcttcctccaaaaatctttaggtgtgtttcatttgttcatgttcataaccacttgagaagcaatcttgatctaagggctctaaaatgcataaaaggaatataaatgctaccatcctctcaccaaaaggaaatacatcaccatagatgttacctttattgaaaactgaaataaattctgctcttcttacaaaatttggttagaatacaatatgtacatcctatatatacacaatcggggattatattcccctaaaatatttcccataaattagggatcttattcacctaccatttaccatcctataatctctcacataaatcatattgtgccaaagaaagaaaaggaaagaaataaatacaaaattatttaaaatatgctagcaaaaacaaaccttatttctctgaaacctatctttaggggggaagtaacaagattgtggaagatagatcataggattctggtgtggttttagagttggattttgattctggtaaggtagtagcaaaacatgattctggtcactttttagatcaggatttactaagtgatatatttgatcattcgtctaatctttatgatcattctccttctcatccaaccccttttaagagtggactagttaaaaaaaaaatcaacttgaaagtctgtccattgaaatgaaatagagtccaagttcctcaagtcttgacaagagcacgaattcctcaaaacctatattgcagattcaatcacctgagactaagcacaagagacttgaaacaccttatttcaatggttattctaggagaaaatgatccatactacctgtgcattctctaatctctgaaaccatgataggtaatggaaatgttaatcctagtcttgatactaatagtgatttagatttgcttattgcttttaggaaaggaattataacaagtacccaacatcccctctcagattttgtgtccttatggagattgtcatcaaaataccatgcttttattactcatttgtcctttaatgaaactcctaaaacagtcaaagaggccataaatagtaaaccatggaaatatgtcatgaatgaagaactataagccttggaaaagaataaaacttggggtgttgtgaagctatctaaagcaaagaaaataatgggatgtaggtgggtctataccattaaatacaatgtttatggaaccatagagaagtatggagcaagtttgattgctaaagagtacacttaatatggtatagattaccaagaaacctttgcaccgatagcaaagacaaatactattagaatttttttttttttttttggctgctaactttgattggcctttgcataaatttgatgtaaagaatgtcttccttcatagagatctaaaggataaggtatacatggatattccccctagattcatacacaaatcttagacgaacaaagtgtgtagacttagaaaatcactctatggactcaagcaatccttaagaacctggtttggaagattcactaagtcaatggtgaggaagggttatcaccaaagttaaggtgatcaaacactatgcttcaaacattcccctcttggtacaatagctattttgattgtctatgtagatgatatcattgttactagtaataacttggaaaaaaaaattagagaattaatgtcatacctagcaaaggaatttgagatcaaagacttggggtactctaaggtacttttgtggggatgaagttgcaaggtcaaaaaagggaatttttatttctcaacaaaaatatgtatgagatctactaaaatgaaaccgacatgctagggtgcagatgagctaatacccttatagagtgaaaccataatctagtggaaaagaatgaaccacctttgccaaatatttaagggaaactattttgtttatcacacactagacctgatatagcatatgttgtaaatatggttaatcaatttatgcattttctacttaagttggatatggaggttgagtgtagaattattagatatctaaagatagccctagacaagggaataatgtttcaaagaatgatgatttcaagttggaagcctatattgatgaggattgggcaggttcaatggtggatggaagatcaactattgagtattccacatttctaagaggacatttggtcaattggagaagaaaagaaaaacctatttggtcatatctagggtagaagcaaagtttagagctatgacttagggtatttatgagctactatggttgaaattatactcccagatcttaagatttagataaaagagtcaatcatgttgtattgtgattacaaggcaactataaatataaatcataagccaatccatctgacatttcatcaaagagaaagtggattctgatcaaatttgtatgccatgtctcctcacctaggcaactgctagacatcctcaccaaaggtttaccaaatttgggttttcatcaaatattagacaggataggaatgcaaaaaatctttggactggcttgaggaggagtgttggaagatttgacaaattatgttcaaatttgaatggttataatttgtttctaaatattgtaattgatttgtatggttgtaattttattttttccttagttcttccctagaaatttgcatgtaattaggttccttgatttagttctaaattagctatagcctagtcaaccttgtatctatataagttgtactcatccttcttgagaattaagagtgagaaattattcattccttcaacttgtttcctaaatttcctaaaagatctcattatgcctaatttttaggtacaactctttcggattcaattcagagtaccaga

SEQ ID NO: 11744 - DNA, 2133 bp, Vitis vinifera
  Intron number 2 from transcript GSVIVT01032812001 (locus G SVIVG01032812001) derived from phytozome v7.0 (chr-ID chr1 3; pos 566178 to 568310)
caagatcgaggtaactggccaatctcgcatttccatattagtaggcttcgactcaattcatatgtgtagaaattgtctcaaccacttagtttcagctccatgaggtagtttttaacgcatacagatctgtttataaccacaacgaattaaaatactaaagcatgttaagtataggatattatgctattgcccagcctctccaagtttaccaattttaaattatgactccaattttatattttgaagtgtatatacgacaaagatcttgattgtcttgtgaatttgatacagataccttccgctttaagttatttataaatttaacataagttgctttgaacatcctccttctgaaaggctattagagcctgggatggtgaatcatggttttgagggattataagaaaaggttaatttattttaattttgggtcctgtcatggaattttcttttgtgatgattcaaataattccaggattatctgggtgaagttcctggagaagaatttaagactggtattcacacaaaaggagaggcttagttgaatatgctgttcttatttgtagttcaggcttatgcttcacaattttggtatgatgtactgccatgaattcattactccaaaaactaggtttgttgagaaagagttgagataaattaatattttgatttttcttattcaacatctgaatgttaatttatagacaaatatgtatagattacctaaagaggtttttagagaagaactcttttactttaatttttatctgcaattataattttgaccatgtgagaacacttctttcttaatacttcgagttgttttgttttttattttattttctcagtgtttgaaagcataataaaatttcctttgtcatactatatatgtgcatgtgttctcatggctgtcgatgtcatgtcttgatcggagagtggaagttttgctccacactagtgagtggaccgtcaccaataatatgaaagctaggactatgactgttaacaacaccatgttgtgcggtcctaatgaaggagattatgtcatgatcactttgtgtgagctgaagaatctactgtaaaaaataatgagagacacttttgcaagaagtggcttcaggaacactggttagaggtgacaattgaaaatctttgggcactcaaactgcctagttagggcatcaggtttgtatcaccataatgaggtagtaatggatgccttgttgtatgcacaaacctccacatgaaagacgtgggtagccattgagaatgtcaaatattgatgtcctatcccaggtagctgatatgacgaggaagttactaattgagaaggtgtgggcccatatcatcgacactcggaggattattaaggaagctaacatgatgatcacctttagccatgcttatctagatggtgatacttgtgtgataccctaatgaaaataggccatgtgttaatctggtaattggtttttacagggatgctgtcaattgtgatgactgaggttgtgtcatgtttagttcttttccccatgatagaaagatagttttgagaccatagcatccttgtaaacgtccacctccccttgaatatactaatttaacgtaccctatatttgtctgcacaggcttctgttacagtggtgcttttattccaccatctatcctcatgtaagttactaattgttgttgatctggtgtatgattgttagcacgagtaattaagaagcttcaatagtttgttagaatttggatcatcttattcttgaggttggaaattgtggttttagtggttgaagatgagtttatttcatctgatctgttgttgtgtaattaacaatgtggttctctgatttttgtttttcctctttttattaggtggtaggcaggtaccaaaccttacatgttatgttttactcgagtaaattctaatgtcattttttacttagattttagataacgaagaatgctatctatttgtgatcaggcttctaattttattttttttccttcaggccttctgaatatctttgggtccattatgcagtctttttccatgtgttcatttaacttctgaccattttgtgtccattgtatctcacagctctgtgctcattatgtgcttacagcttg

SEQ ID NO: 11745 - DNA, 5311 bp, Vitis vinifera
  Intron number 8 from transcript GSVIVT01035727001 (locus G SVIVG01035727001) derived from phytozome v7.0 (chr-ID chr4 ; pos 3722189 to 3727499 reverse strand)
atccagagaaaggagaatttcatctaacgtgtcaggtacaattctttgtataagcatgcactaggcttggatgaatgtttttaatacttcagatcagagatggtccattttagctaatgcaaaaaacttagtattttacttgtatcaaggagttgcatgctgccaattgttgtcaaattgaatctttatagttgtttggtgggaatctttagttagattggggaagaaatctgtgaagatttgagacagttcccctcctactctagttgaagattgacgatcataaccttgtacatgttaaatgctaaagaatggtttttctgacctcatcttttgtggaatgtattctgatgagaagtaaaaggtatgtgaaggatgggttatcctttaagaataggacaaaaaaaaagggaattacaagacaaaaataatcaagggagctttttaccaacaagggaacaaatgcttatcaatgtagttgaattgattctcttttataacttatccttgatccttgaatctattttctttaagtctgatattagggggtgaggagaggtctcgctccttttagatttgaaaatatgtggttgaaggaggagagatttaaagatgttatgagattgtggtgggaggggcttaatttcagtgggtctactagcttcattaagatgaaggctttgaaacctattatgagaagttggaacaagtgtttaggaagattgaagttcagaaggctttggccttgaattgtgtgaatttctaggataaggagaagagttgtcgttctctgcctctggaagaggaggattctaggagggaagctagggagaattacaagaaatgtgttcttttagaagagacgtattggagacagaaatcaagggaaatctagctgaaagaaggggatagaaacacaagttttttccaccgaatgactaatgcgcacggtagaaagaaccaaatggctagagtcaaaattaatggagcgtggatcactgaggacaatgatattaaggaggaagtgggtaaagctttctagaagttgctctcagccactagtgagtggagacctagcttacgtggtatgtcttttgagaggttggaagctttggaggcggaaaggctagagaaaccttttacagaggaggagatttttggcgcattgtcagattttagcgaagacaaagcaccaagcccagatggtttctccatggctttttggtagttttcttgggagtttattaaggatgaggtgatgaatttttttagggaatttcatgaagatggtcgttttgttcggatttgaacacaacctttttagtgctgatcccaaagaaaggggatgcggaggacttaagggattttgggcctattagcttggtggggggggctaaggtgcttgctaataggttaaagttggtgttagctaaggtgatttccaatgcccaaaatgcgtttgtggagggtaggcaaattatggatgcaatgcttattgccaatgaagccattgattcgattttgaagagtaagggtggagcaattctctgcaagttggatattgagaaggcgtatgatcatgtggagtgaccttttttgttttcggttctaaagaagatgggttttggggagaagtagataaggtggataaagtggtgtgtgtccactactagtttttccgttttggttaatggtactccttcgtgattttttcaaagttctaggggtttaaggcagagagaccttttttcgctttacctgtttgtgatagtaatggaaccacttagctactttttaaaaagaaccgttagtggaggctttttgtcaccatgccagattaggggtagaaggtgaaggggttaaaatcttttatttgttgttcgctgatgatactttggttttttgcaaggccaacaaggaccaagtgacctttttgagttgattaattatgtggtttgaggctatatcagggcggaaagttaacttggataaaagtgagctgatcccagtggccaatgtggaggagttggtttctgagcttggttgtaaggtggagagtttaccctccacttacctggggatgccgtcaggggctcctttcaagtctgtggcagcttgggatggagtggaggagagattctgtaagagattggctatgtggaaacgttaatatatttctaagggatggaaaattgccttgattagaaacacattgtctagcttgcctatttacttcatgtctattctacaattgccaagggaggtcagattaaggctagagttgatttagagagatttcctatggggaggtgagaccttagactggagacctcatttagtaagatgggcaacaatgtgtcttgataagagaaaaaagggtctgggggttaagagcctttctacgctcaataaggcccttctttgcaaatgtagttggcgttttgcgaatgagagaggggctttatggaaccaagtaattagggggaaataaggggaggaacgaggagggtggtgttctctaaatgtaagagagaggtatgatgtagggttgtgtaaagtaattaggaagctcgagcacatcgttagcagtagactctcctttgtggtggggaatgatcaaagggtgagtttttgaaaggatattaggtgtgggactacacctttgtgtgcttattttccttccttatttgtcctagctgatcccaaataagcttggatgatgtttggaccgggacaccgggaggagagggggtggtgggtgggtggagttagagtcctcgcttcactaggtcttttaatgattgggagatggatgaagtggagggccttctgttacgcttgtgtggttagaaagtgatcttggaggaggaggaggataaggtgcggtggatggaaacaaaggatggagttttctcgacaaagtcactttacaaagccttagtgtcaagctcttcagttttgtttctaatgaagattatttggaaattgtgtgtgcagccaaatgtaagcttctttgcttgggaggtatcatggggcaaagttttaaccttggattgagttaaaaagaggggatgggccttagcaaatgaatgttgtttttgccatgcggatgaagaatccattgaccacctccttctccattgtgaaaatacaagggcattgtgggagatgctcttcactctttttggagtgtcttgggtgtttccttcttcggttagggaaactctcttgggtttgaatggattctttgtggggaaaaaacgcaagacagtttggagagcgggtcctctttgcatttttgggacagtttggaagataaggaatagaattgcctttgaagatgatgtgctgtccatccaagggctgaaaacttattttcttaactcgctttggtcggagactaaattgtttataaaagatggtccatcgaccttttttgaattcattgattgggtgggttcccattgagggaggggttgttttttgtatatctttgtggaaaattttttgtttccaatgttaggaggtgagtgtttccctttctattcagtacatcttgagtcgctattttagcgcctttttgtaatacaatacttttccttctcaaaaaaaaaaaaaaaaagtctgacatcaactaatggttgatggagcttcttcccaatgaaggagtggatgctaagctgtatggttgttagtcttgatctgactattttcttgttgttttgtcttttttctcctgttctctcccttctcttttggttcttttaaatacttatcttttgggccgctcctcttccttcccttcccttttccttatttgccactgcaacagttgcaactaactttttcatgttaatgatcttacaagtaaaaataaaaataagggatatttggtggctcttttagctatgatcgtggagttatcgacacattgacatgccttgtatatcaaaacacagattgattcagttttggactgtaccaagtggatgttctatgcagttcacaataatttagtctcgtctagaattgttgtattcattagtattcctttcttctgtttgatctctcaatgagaactggggcagttcttttacacatcttccccttgaaatcacaggtagaaaccaattttctgcctttttttaatcagaaactcaaaagatcttttcaatcaattaaaaagatcaataagtacgagacatcctaccacaaggtacaaatttagatcaaccaagtgaatggatatcattacatggatccatattgctgaacaaacaagagaaattacaaaaagtgaaacaataattgaaacattcaaaacaaacattagatagactcaaggagacacataatctccaacaaaagatgccaattgctttgctcctcttgtagctagctcatctgccacttgattagctaagcgaggatcccatcaaatgcagcatcctaactttgtaaagatatcgaaactctggcatggccgcctatcaattctccatgaacccctcttctttttagctacccatgagataacaacaacataacccccctgcactgcaaaattggacaagccaaagctttttcttgtacaaggccctctagaagtgatagaacctcagcctcaatagcaaaaccatcacctgcaggtttagagtatgctttgattactaaacctggatgatctctaatcacaccaccaattccaagctacccctagggtgcccaagacacacccatcgaagttcaatttaaccactacttaacaggctcttttttctttgcttttttaaatattagaaatgaaacacttcatttcattaaatgaaatggaaggtacacagaaggatgagtatccttaacacatatacaaaatctgacagaggaaagaatactttgctgtttcttatgctgtgtctttacaacttacaagtaacagcctcaccatatttgtgaattttgtgtgtgcttgtgtgtctgggctttttggtgaatgtgccatagataccctcatttgcatctgtttgatattctatctatatatatatatatatatatatatatatatatatataaatatatttatcagaattgatgtcctcagtaatacactacactgagatgttcatatttttgaactttctttttataatgaaatcatggcttctgaattaaggctttctctttgagtttcaattggcagcttgaagtggtctatctatttttaccttttcttttgatcaatagttgcatatgcaattagtaatgcttgtgtgattattctatttccaggtcccttgtgtagaagtaa

SEQ ID NO: 11746 - DNA, 10619 bp, Vitis vinifera
  Intron number 3 from transcript GSVIVT01020400001 (locus G SVIVG01020400001) derived from phytozome v7.0 (chr-ID chr1 9; pos 20069602 to 20080220)
ttgtcagcaggcattttgattcacagatagatctggtacatcttataatttgaatgtagctttgcagtttcttccatgcagttagtgtttcaactttccagggatattattgaagattttagatgttttccccctccttaaatgatgctaattgcttttttcttcaaactaagagaaacacattatttgctctacctttattggttattagaatttttggctaaaagacttaattcaccctaaaatctaaagctggaagacactttattatgtagtaatattttatattcctgaaagttgttttgatgttcaattggtatcttatttgtttctttttgagaaataaatatattttaaccaaaaagaatgagattgtagccaaggcacttttcaaccatataagagaagtacttaacttagggagcttttatctcggacagatagattttagatattgccttggtagctaatgagttgatggattagacccaaagtcgttcatgtcatccacagccctgagctattcatagcatctaaagccttgagcatatactgatgcagattatataggatcagttattgatcggaggtctactataggatattgcacttttcttggagggaacttggtaacttggaggagtaagaaatagaacgttattgcaagatctagtgcggaagtagagttttgtgcaatggtccaaggaatctgtgagttgctttggcttaagattatcttggaggagttgaagattaagtgggagacatcagtgagactttattgtgacaataagttaaccatcaacattgcacataacctaatataacatgacataaccaaaaatgtgaagtagatagacattttattaaggaaaagttggacagtggcttaatctgcacaccatatgtgtccattggaagttagttagccaatgtcttaacgaaaggattagccaaagcttggtttcaagaaatcattatcaagttgggaataaataatatctattcaccaacttgatagggagtgttgaagattattatagcttgttatagtcgtatacatagttgtatgtaaagattattacgtatacacaacagtatatcttctacaaccatatattactactataatatatatttgggtatatttgtgtatataatccctaatttgtagggatatttaataggttagtttccaattctttccttattttttctttttgttgttgtatataattgtaaggtttctccacagatacaattgttcaaatgaattgattagagaataatttttggatggggttaaggagaaggtctctaggaacaaagttctaacggagtaaaaaaaaaaaacccctttattaggaaatgaagactgcaaacaaatatgaagtaaagaggataatagagaggagaggtcattcattttcaactcaaggttataatgggaggggagatcttcgaagcaagaatactaataaatagacatggagataggagaatgtttagtcttagaaacaagagaaacactaggtgttaggtagaggggttgatctcctcctcaaagatcctcccaaaaatgaatttttagatccattcacaattgaaaaacaagtgaaacaagataaatcaaaggtactttcgaaaccggctttctattagcaatggtgagaccacctaaccctaatgttaacaacttattcattggattggaaaagttattggattaagatttaataattggaccaatggttgaactacgattgaactatgatgttagtataacatataaatatataatttatatattatgaaaattaaaaataattataatgttaaaatataaatgtaaataattacaaagcttaaagatatatatatttttatctttttaaatttgatagattaaatcttggtaaggctacatgtattaatatataagtatcataattatgtatctaagagtgaataaaattttattatttaatttacttttcaacatgtatattctgtcattctattattttaaaaatcactttgttcttttacctatatcgttttgatgtttaacatcttatgcatgaatgcagttcaatatttatatttatcttaaaatctttaaactttttatatatatttgtttatttcttgtcaagctactatattttattaattaaaatcactacatggtaaagggttcaatgtaacttggtggttgtagcaagtcttcttaaccaatatttcaaacattgaggaaaaaaagaagaaaaaattaaaggggtagctaattgggaaaatctggctggtccacatgctgggctggttcaactggctggcccccagttcttcatctgttttaactctaaaatcggtgaatctgtccactgaactggaaagaggatcgactggtggtccaataggtcagactgccatgttcattccagtcttgaaagcatttgccataacaatgttcgtctccctagactaccttcacaacctcttctctagaagagcataattccatcttgaatccatccgaagccttaaaccttctatataatttagcttataaacttcatttcaccccattaactgattgctcttcctttctcctattctcaacttcataaagtcacattggaatctttaaatctaagatgtaacctcaataaggatcttaagagttaagaaaaagtaagttggaatattgcttagacaagctagaacaagtgcatccaagggtagaaaaaacaccattctatctacctaacctctagaacttcttccaaaatgaggttccaaaaatgaggagctctgtgatttccaaccaagataagatcaagttaagaaagtaaccaacccaaaaatgaggagctctatgattcccacctaacaagggaggctagcttgaggaggttgtcttgatttttgttgatatcatataagttgcttttctataagtttatctagggcatgaaatgtaaccaaaaacttggagaatgaacttggtgttaggatatcttcaacattggctcttgagaaaaaaatgttgttattagcaaattgcaagttggacagcctaatgctattacttttacaaattccttaatgacctctcttttgccctaatcatcattttgctcaaggcatccatgatccactataattgtgggcaaaaataaagacaatggatcttcttgccttaggcctagagaaatctataccaaaccccttgcttgtccattcacaagaatgttgatggtaactaaggacaactattctcaaatccagtctccatctatggctgaaactcttctaaacatgatgtgatccaaaaaattccaaccaaagtggtcataagcttttataggcgtccctttgagcctcattttgctagattggaacctagtttgcataactacaagattgactaaggagtcaccttgtgaatggctaccaccattagtaggttttgtcaagctaaattttgatggatgttttttgggaaacctagtgcaattagggatttgagggttgattagagatcattatagtagagtgttaagagcattctttaaaccaacaggtcaaggtttagccattgaggtagaaattctagcccatctagaaggatgattgttggtaaaagctttgggttttttcaattttctagtagaaggtgattatgctattgtcatatcatgggcaactaagaaagaaagaggaccatggaagtttgacgtgtgtttgcactagattattgacatttcttcagagttaggattgtccttctcttggattccttacttaggcaatgatgtggtagatgcattaggaaaacgtggaattagacatatggtttcttttgccgaagatttatatgtgaattgtagttagatttaattttttttggattagtatacactcatgtagaaaagaaaaaaaaatgtcgtatattaaattgaataaggaagggaaacatgctttcttttatagaaaagttacaacaaatcaaactaaatttaaagttgtatactcaaatttctaggaacaaaataaatttaaaatattcaacttatctctaaaaaatagcaacaacttatccctaaaaaacaacaacaaattatccctaaaaaataggtaacgaccagattatccctaaaaaatataggtaacaactagataagaaaaattctgatatgattgagattctcaacactcccccttaagctggcttgaagatgtcattcatggccaacttgcttactaaatcatcaaactgcatatttggcaatcccttagtgagtatatctgcaacttgttcaactgtaggtatataaggcataacaatcaatccattttctagtttctccttaataaaatgtttatcaacctcgacatgtttagttctatcatggagtactgaactatgtgcaatggcaatgacaactttattatcacaaaagaccttcactctaaacttagcttcaaccctacttctagtcacaacactctgctttttactcctctaagtcacaagattgcctccaacaaaagtacaataccttgaagttgatcccctatcaattacacttcctccccaatctacatcagtaaacacatccacttggagatgtcctcggttctcatatagaagtccttttcttggagtcccctttaagtaccttaaaattctgttcactgcagcaaagtgttcctgatttggagagtgcatgaattgagtcaccatgctcaccacaaaagcaatatcgggatgagtatgagagagataaataagtcttcctactaggcattgatatttctctttgtcaatcacctctattggacttgctggttaaagtttcaaatacggttctataggagtttctatagccttacatccaagtaaaccggtttcatttaataagtcaagtatattttttttgagaaatgaaaatacctttcttggatctagcaaactccataccaaaaaagtatctcaggggacccaaatcttttatctcaaattcacgagttaaagtttttttcaatttctcaagttctagactatcatcactagttagaataatgtcatccacataaactatcaacacaacaatatttccttctcttgagtgtttataaaacattgtatggttagcttgactttgaatatatccttgaagcttgattacttttccaaatctctcaaaccaagacctaggagactgctgaagaacatacaaggacttctttaatttgcaaaccttttttttttcctagcttttcttagcttttcttcaaaacctgatggtaaatccataaacatttcttcctccaaatttccatttaagaaaacatttttcacacctaattggtgtaaaggccaattaaaatatactacaagagaaagtaaaatccgaatggaattgatctttgtaacaggtataaaggtctcttgatagtcaattccataggtttgtatgaaacctttggctactaaccttgctttatatatttcaatgctaccattgggcttacgcttgattgtgaaaacccacttgcatcccattgtccttttctccttaggtagatcaacaatttcctatgttctatttttcaaaagagcattcatttcttcttgaactgttgatctccactatgagtgtcctagtacttcccgtatagttctaagaatgaataagtgagagatatttgaagtgaaagctctatattttcctgagagtctttgataagacagatatttcgcaatgggatatttggtacaattcctaactcctttttggattgcaatagggataataagatcagaaatcggtaaaggagtggagtccataggaagattacctggattttaagaactaggagttgatgattgaccatgctcaagattgacttgattattctcagtattaaaattaaacctgcacttagtataaacacgaagctcagtggacataggttgtagagtttctcctcctgtttgtgatgcaattttatttggcatagataaatcaatatttccccttttttcactaattaaaatatctattttttgatttatttcaagaagaaaaatactagattttggttgttcttgttgccaaaactgatcttcattagagctctccccccaaagagtagttttgttataaaaaggaatattttcaataaaattgagatccatactaacatgaatttttctagtggtaggattaaaacacttatacccttttttattaggagcataacctagaaaaatatattttttagttcttggatcaaatttggatcgaaaatgagttggcacacgaatgaacactgtacaaccaaaattttttaagggtaaatttgaggtgaggcgtgtgtttggaaaagtattcttaagagtttgtaaaggtgttgcatagtttagaacccttgtaggcattctattaatcaaataacaacttgttaaaattgcatccccccaaaggtgtgtaggaacatttatatgaaacataagagctctacctacttcaagtaaatgtttgtttttacgtactgcaattccattttgttgaggagtgtctctacaagttgattgatgtaaaatacctttctctagcaaaaaatcacccaaacaatcattataaaattctgttccattgtcattccgaagaatacttattttggtttgaaattgattttcaaccattaaataaaaatcttgaaagagttttcaacctcaaacttagagttcattagataaagccaacataggcatgtgtgatcatcaataaacatcacataccattttttcctagataaagtagtaatcctagaaggaccccaaacatcactatgtatcaaataaaaaggctttgaggcacaatacggttttattttataagaattgcaatggattttggccaaaaaacaggttttacaatcaaaagaagtacaatccaatcctttaaataaacctggaaacaaatgttttaaatagaaaaaactaggatgtccaatctgttatgccataacattatttgatcatgcctagggattgaatgaacactaccaataaaaccctgagcttgtttattctcaaaccagttgacatcaaaatagtagagattgtcgatcaatctagcactaccaatcatcatacccgagttcaaatcctggaattcacaaaaagaggcacaaaaaacaacacaataattagaatccttagataaactacttacaaataagagattacaagagagttttgggacatgtaaaatggattgtaaaacaatcttatcagataaacgaatagagccttgcccagcaatagaaaataagcttccgtttgcaatacgtacttttttatttccaaaacaaggtgtataagaaataaacaaatgaggtaaatttgtcatgtggttagaggcacctgaatctatgatccaaggtgcagataatggaagaaaatatgcacacgaaagactacctgactgagctacagatgctataggagtaccaggagttggtggagcaggttttagcagttgtagcagttggtctaattgttttttgcccaatgagggtgtcttggcagcatgtgctttagcagggaaacgattagagtcgctttgcttattagtcttccattcaacaggctttcaattagctggcttcccatgtagtttccaacaggtttcacgagtgtcgcgtggtttattacaatgatcacagcaaactcttagcttgtcatttagatgacgctggttattaggattgcgagaagccgctactgtagtgctcaataaggctgagttttccacacgtccagagagcttcttcccaagcataacattcctccggatttcctcacgacgcacttcagagaacacttcacctagagaagggagaggttgttgaccaatgattctaccttgaatttcatcaaactcaacattaagcccaactaaaaatttgaatatccatgaactttctaccatcttcttaacatagttacaatcattcatattttccactcataatcattgaataagtcaagatcctgccataaactcctaagcacattaaaatatttggtaaccggattctcaccttgacaaatatcgcccaatttgagttgtaactcatagatttgggactgatttccaaggtttgaatacatcagaataatgttgtcccaaagaactttggtagtagggtaacacatataattcgagctaatctcctcctccatggaatttacaagccatgccatgatcatggagttttttgcatcccaagtggcatatctaaggtccatcttcgctggttctttggtgtcactagtcaaataaccaatttttcctcagcccctaatgtacatccgaacagattgtgaccatttgagataattgttctcattaaggtggattgtggtgatctggacaaagtggggatgagaattggatgtgggtaattttgaggaattggaaccaacagtaatggaaggagtagattcgaaaatttctgatatggtaaagagatagcaatagaaatgaaaaagggaagaagaacaaaactagaaagaatgagaggaacaaaaaagggaatagccaattaacttggctctgataccatgtagaaaaggaaaagaaaaatgtcatatatttaattgaataaggaagggaaacatgcttcattttatagaaaagttacaacaaataaaactaaatctacagttgtacacccaaatttctaggattagaataaatttaaaatatacaacttatccctaaaaaacaacaacttatccttaaaaaacaataacaaattatccctaaaaaataagtaacaaccaaattatccctaaaaaataagtaacaaccaaattatccctaaaaaataggtaataaccagatcagaaaaattctgatatgattaagattctcaacaactcatctatgttttttatccttctttgtatagaggattgggtacttcttagaaggattgcccatccttctttgtatttaatattttaatacaatgaaatcattgtttcttatataaaaaaaggtggccataagctttctcaaaatcaattttaagaatcaccactagctcccccgaacttaaacttttgtccatcagctcattagcaatcaacgttgtatcaaagatctatttgtccttgaaaaaggatcttgtggaaatgaaaggtcttatgcaacaattctcaaattttccttgaaaggatcttagtaaggtggttgaacgaatgggccattgttaatattgttgaaaccataagacttttatgagtttgaatttaaaataaaactagaagataaggcttgactgagtcttattattctaggttatttagttttgataagtcctagtgtatttaaatttgattttatttctgatttgaattagagagaatattggatgatattttgtaggttggttagtggctaaatttagggtttgcttcgtttatttaagttctggatgtaaaccttttttttttaataaagtattatttagtttctcttccaaattcaataaatatcaacaataaagtctttcttaggggcaagaatgataaagctagtggtaatgcttttattgaagaacctagatttataaaattctctaaaaactttgaataagccctcttttaatttagatcaagggtgctaataaaaagctaaatagaaacatctaggagctttctccctattcatttaaaaggcaacctgctcatttcctcctttggaaaaggatgcatcaaccacctaacaccttccttggagataggaggccaatttaagccattgaggttccaattatccccatttaatgttccataaggtgaacaacaaatgtcaatatcaccacaaaaatacatccttggttaagtatcaactttctatcctttgccacaagggacttactttaatggtgtttttctttccttctaccacttgtaatattattaagaagccttgaacttggaattttcgtttttcttccacttcgctcttgattattgtctctattaaacttccttgttcactagtatttgttataactccactttcttggaaaatgtgatggttgcatacatctgacaaggtcccaaattcttcagtagatttatgtaaactaacattctaagaatcgaggcttttttattgtccctaacatccttgaatgtgacattactccaaactttgattttttaaaggcccaacatttttgacataattttgtctctcccactccatctaactctttgcccaccaggctctcaccaatgtctaaaacccatatgtaggaaccacatattctcaaaccagaaaggagaaggatcctaggtaaaacgattagagttttctaccataagatagtgaataggcactgatataattacagcagagttccatctctaactttctgaattgataaactgtactttaggagtcaaacttttgattcatggagtagtttcagcactactgtaacctaaatggctaattgagatgtttcgatgcaatttatcttcacctttccaaatttgtcatccttcccttatcctgtaggag

SEQ ID NO: 11747 - DNA, 1762 bp, Vitis vinifera
  Intron number 3 from transcript GSVIVT01028563001 (locus G SVIVG01028563001) derived from phytozome v7.0 (chr-ID chr7 ; pos 9897980 to 9899741)
tctttaaggttatacacaataacccaatactccctgttttctttttatgatgaatttaattctattatacattagaattttcttgcatttccagttttatcttcaaccaattcatactgacttcatttaatgaattaaactctgtattttatcaccttattatcattttattagtgtatagtagttgaatttaatgtgttgtatgatatatatcatcaaggatgctagttttctcaatgaaaatttgatctgcttgctaaatctttattttcatatgagatgtgtcatgatttgttcattgaattcagaccatgaagcttgaaaaacccaccttgaaaagatttatctaataatgttgacttttttcttgaaatactttccttccttccatgtatatgtttctcgttttggtgtttttcaataaaattgtacattgttaaaaaaatagaaaaatttcataatgatttcaaaatgatacacctttttaaaagagaaattccagatcatgtagtgcatccttccactagtttgtatggagagatatttaatcgataaaccaaaaaggtcaaacgggcttatcatgctgttgtttaaacagtgaatgtttattttatcccttgtgatttggtatgagatttatttattcatttatttctgttaagggttgtatgtttaagtgttgttaactgataaaaattttagttgtaattttgggaagcaagaattgtaaaagaaaagaaccttttttggcaactatctaaagagtattggcttaaagatggatttttacactttaaaatattcttgttgccccctttaatctcattagtggatggtttaataggtttacctgtttattccacaaaataccatttctttcaattggacatttgaagacgagaatttatgtcaaatctaactacttgaaatttatgagtaatatctaccaaataaggtttcttagtattgatgaagacccctactttgtgggctacttgtaagtaccctttaccttttggaattctgctttcttattcgcaaccatggtaaaatttttataaaaatgccactaggctgaaattaataaatcttaattagtcttagattctagaatttctttcttgggttggaaggtcctgtgaagagaatataatggacttgatttcttttgcgtggttgtcgaggtggcaggaaaaatggaggtatttgcattggccatcctacccctctttgcttgaaagccttcttcctcatatttttgtgtaacacatgtttgtcagcttacctaccaacaacattttttataccattcaaaggtttccgtgacatatataaagatggtgctcctactcatggaagacttttctagtttgtgaagatgaatagacattatgaatttcaaacttgtgtttgcatttagctccaaggctagcattagcaaatcactgcgattcctatctcttttctctatgtgctcatttttgtacatgcttaataccgtccttcctctcttcaatgagaaacatgaaaagactgtctagacatttttttcttcttttctccattttatagtgctaaaggcatgcaggagaactgggtttgcaatgcaattatcattctatgcttcttaactacacaaacatttaattctgtacattcgaagtacttctgaattttgttgttataacagtggcttaggaagtttctgattggacataataatatctaatttttcactgtctatttgacagcaattgaggag

SEQ ID NO: 11748 - DNA, 10804 bp, Vitis vinifera
  Intron number 3 from transcript GSVIVT01013767001 (locus G SVIVG01013767001) derived from phytozome v7.0 (chr-ID chr1 ; pos 7765508 to 7776311)
gcgacctaactgctcactcacaacttgcattaacagtaagttggcagcagcaatttcttatgcttatctttttggtccaccttcaggtcatcagatttgagcatttttctttgggtgaaaaactgatagatttacaatggaaccttttttaaatacatctatggatgcccactctgcaagcatcatcatgaaggattcatgtaactaagcccaaatggtaaggacaaaggtttagttgtttcatgcacttatgctgtctagattttccttagtttcacttagtattccaaagcttccatgctgctaaaaggcttgtccataatgtcatcaatcgccattctagaatctccttcatgcatgtctatgagccatactccttgagtagctttaagacgactatattcaactttgccaccaattatcattaggttgagccatcaaagttgagcttgtctcagggatgaaggtgaatgtcaagaatgttgaagaaaagagccttaccaatggtctaaggtgcatttttcattctggagagaaatgtctttactaatgacaataatcaattatattctcctaaagactaggttcctgttcttaagaataccttatgcatatttgaggtgttaaataggcatttagtatgtggaatattagtttttgattggtattttatccgtaaaatatttatacaaatactgtatggttccgttgaatttcaaacctaactgttcaaaacagaagttagtgttgacatgatatgtattattgtttccttaacagttcaagctattggtgtgagtggtaatttgacatggtattaaaactttggttccctgaggccttcaatcctaaccacttcgaaagaattttgttctttcagttttttgtctatgtgattgtcacttcacatgttggagggggccatgtgaattagagggggagagttgttttgtatttaatctgatatgtcctataaaagaaaaatggtatttaacttgatatgcttttcatgtttgaagggctttgatctacatttattttgatatacatttaacccattcttgacaatttaagctttttagagtttatacccatttgccttgtgggtaatttgtacaaaattctagttaaagttttggcaaatggactaaagaaagtgattgggaaagtggtactagagtctcagaatgcgtttgtaaaaggaagacaaatgctattttttttatttatcaaaaaaaaaaagaagaagacaaatgctagatgcattcttttttatttctattctcctttacaacttccaaggaagctttgatggatgatgttcatgtggtagaggagagggtgggtcagtcttgtggaactcgtgcttcttgagacgtttctaagaatgggaggtgaatagcattgatgcattgcttcaaaagctttgtgttaggaaggaatagtcgataggaagacaaaatgatatggatggttagtaagagtaggaactcttggtgagtcctgctcctttaccttggagatggagggagaagtgtctttcgcctcaaaagtagtgtgggcctcttaggcttctaccaaagtgggtttctttgtgtgggaaatagcttggggaaagattctaaccatgaaccaacttcaaagaagagattggtttttggaaagttattgttgtatgtgtaaaaaagtagaagaatcaatagactttctcctcatccattgtgggaaagctaggacgctatggcacttccagttctctttatttggcattttgtgggtttccttatttagtgaaagacttgttaatgtgttggaatggaacttttgtgggcaagaagagaagattggcatggagaatagctcctctttgcctattttggacaatttcgagggaatgtaaccaaagaacttttgaaggggtgcaatgcaaaaaccaatctcttaaggactcctttatttctaatctatatatgtggtcctctgggcctctcttcaagatgatgttcaagctggttccagatccttgatatttcattgagtggttgtgcactaagtattaaattaggattctgattgtttgttgtttctttttacttcttagatttatgctttgtgtactatgtgtgcgcctctttttgattgacctttttaatgttttatcattgcttatcaaaaaaacaacttaagctttttttttttcgatcagtaagtaatatgtatattcaaaagaggcgctaaagaagcgactcaaatagctacagtatagaacaactcacccccttacaaaagaacccaagccactatgaaagctaaaaaaaaccctctcccttaacgcaaacacacccattctataaaatctattaaggtcgaaggaccattttttatccacaatttggtttccgatcatagtaaatacacaaaagaaattttcagcttttggatggacaacaccccatcctcaaaagcaatagaattcctagccttccaaataacccaaaacaagcataacggtcccaaaagccacgccacctttctcttcttgtccacaaaggagcctctccaacctatgagagtttccttaaccgaaagcagaaaaacccaagagactccaaaaaaagagaggagcaaagtccatacctcacttgctctttcacaatgaaggaggaggtggtcaatcgactccccacactattggcaaataaaacacctatttgccaaagcccaacccctcttttgcaaacggtccaaagttaaaactctaccccacgaagcctcccacgcaaagaagcttatcttgggctgagcatgggacatccaaataatttttgaagggaacgaagcagaggacaccggctgcactaccctatacaaggatttcaccgaaaaaaccccatcctttgattccacccatctcaccttgtcctcctcatccacccttatcatcttttcttccaagcaacaaagaaaccttcccacttcttccatttcccaatcattaaatgacctattgaaagtaggagtccaacttcccctcctttccccctcggctgtccaaattttatttacccaagcctcttttgacgttgccagggcaaataaagaagggaaagcctcgcttaaagggctggtaccacaccacttatctttccaaaacttcacattcttgcccttccccacctcatagccaaaaaaaggggttacaagttgtcccaccttatttatcgctttccataagccaactccatatgcctccctaatctcacaagatgtccatcctcctttttcctccctgtacttccttctaattacctgattccaaagggcctttttttcgtttgcaaaacgccatgcccatttgcccaggagagccttattgaacaaaccaaggctcttaacccccaaacctcctatacttttgtctttacacacaattggccaccttgctaagtgaggtttttgctcaagagcgccacctccccacaaaaaatccctttgtatcttttccaatctcatcctaattgcccttggtaattggaagatggacataaaatagatcggtaggttggatagagtgctccgaattaaggtaatccttcctccttttgaaatgtactgtcgcttccacataactaatctctttctgaatctttcctctttttgaatacttcttaccatttttcacctgtatccctggtccttgtggaattatgaacaagatcctaactggaaaaattggttttttatcattggcttgaaccaaaaagatttttcttcatcttgtccatgtgtttgttaagattattgggaactagaaaataacttcaactgtgatgaatcacttggttaattgatttgtcctcaataggaggaagtattctttcacatatagctacttgtattgggaatttgatatttgtgctcaccttgtctataaaggtgctcttagaaagttttccatgcaaacatagatgccttggtttttgagaaattactatagtgtgaggataaccttctctttttccagtttctaaacatggttagttttttacttttcatcattatgtatgatgaagttatgttctaatttttttttttaaatcctaagttggtgcttattgtcaacctataattgagaaattggccatggtgcaagcatggaggaatatgtcacctcattatgatgatcaaaaggaagtttggtagtttacattgctcttgcaagcatataaattatggattgctcctttttgatgaactagcttttccttttcatgttgctggtatctaattaagttcacaagtaagcaaagatttgaaactgctaagaagtagttgttttcataaaggcatagtgaacgtatagttgtgaaagaaagttagcaaatttgaatggagtaaccaccaatatgttactctatgaatcacttctaattgaactgagagatggggaaaagagaagggaattgctggtttgcagtggactccaagtcttttgaaatatctgtggatgtgtttgggaagaaactaaaggggattattgtggaaagaagtagaggtttcacctcgtggataaggtttggaaggtccagtttgtgttggctgttggagggagtggaggcaaactgtaggggggagtttgggcagagattcgtcaaaagctgggaagatggaggaaggaggtacaaattggaatgtcgagcaaatgaggctagcagattctaattgtgttcaatgattgactcggatgcaaagagacattgtttagtgatcccagaaggaaaaggtttcttggaaggatgggctttgttggctgaaaaacttcgttcactcggaatatcgacatgtgatgagcctagggaagtttctgcatcttctaagcctgagagcagagatggggattcgaaggggaagaaagaaaaatcctacattgatgcggtgaatactagaggagtttcaagagtgagaaggctaggggaagcagcatggctacagcttggagaagaagatgtgtcaaaaggaagggagctgctagaccgatgccttgttgggagatggggagaaactttggtttcagttccacacctgtgtgatctggaaagatggggaaaaagtcactagaaactcaaaggaggagtcaagttcgtgagaatggggggcccctttattttgatcgagtttgagaataaaacagaggcaggcaaagtgttattaagaggtatccgatgttttaaggattcggttctgcacttggaaaggtgggacccaaaaacgggttgttctcaaagttgtgagcatcttaaggaggtttgggtgagagtgatgggattaccattgcatctttggaatcgggaagtttttaagaaaattggaaactgctgtgggggcttcgctgcagcggatgaaagcactgttgctttaaaggagctccaatgggccagattgctagtgaagtcggaggggacggaatggccaagctccctgcaagtgataatcgacaatacttgctttgctttgcaactgtggtgggaagtgctgccaagggtgtctgaagtgcttccgacgatcagaaatgggttggggaaggaacaagtggctagggaagaagaaggggggacatcacgcgtcgacagagtggggaagtagatgcagccaaacgaatagcttgcaaaagggctgtgccgtctgaagatggtgaaaatctttgtaggacagacatggaggctcttctttctgacttgatgtcgacaagaggggcagatacagacaagaccaaaagatggcagcagtctgattgggggattaattcaaaagctgggcctgtagctaaagctaagggaattttgggttgggacgtggagctggaagtggagaggaggcccattgtggagggcttgtttggaagcaaagaagttggtgggccatctcacttaagcccaacaactttcaggctgtagacaaatctccagaggaggcccattaaggagggccattcaagatcaatggaggacggtgggctgccccaatcaggcccattgccaaaaacgcacttaaagagctgcgtggaagtgggccgacccactttggaatctcataaaggcccagctgtgggacgacccactgttgaagaccctcttgaggctagggcttgcgggggatgccgagaggagatctgggggagtccagacggggctgtttttggactccaacaggcttcgtctcctccaacgccaaagactagaatgctcaccgacaaagctttgatagaggacggtccaggtacataggttctccttctcggcttcttttctcgttggggaagcgggttctctcttcttctttttctctttctgggctggatgagttttttgacgccacagagagaggttacaatcggagttgtggatcggaaatagctgggggattagagttgggtcctcttagaatgatattggcggatggtagggaggcggaggtctccggggtgtcgggtttggcaaatgagaggaccgaggaggggacaaaggttgttttggacagggctcctcaagagatgatggaggaaggggacgaagggggtgggctgagttggcagtcgagttgtttggctaagtttagccgatgcctcgaaatgccgacggagggctttgaaggggagatcctgtttctgctcagaagaatgaaagaaaggaaaattcggaaggggaagaaggggaagctggaaggtaggaaaaagagaaaatttaaatcttcaaagttcaaaagggagttgagaaagctggaatggactgtgaattatcttggaggaggaaaagaggaggcaactgctctaagtttaaatgaagatacgtcttctttcttggaatgttagaggggctaataattgtgataagaggaaggtgatcaaggccttgattaaaaagaacagagtggacctggtttgcttgtaggaaataaaaatccatgatatgtcaaggggcctaattaggagcttgggagtgagaagattcttaaattggggaactgtggattcaaggggctcagcgggtggtatagtggtgttttgggataatagggtgatggatttgatagagttagaaaagggagaacattcaatttcctgccattttaaaaactgtgaggatggctttatgtggactttttcaggtgtttatggtccaaccatgaggaaagacaggaaatgtttgtggaatgagttgggggccatctacggtctttggaatgggccgtggtgtgttgctggtgactttaatgccatcttaagccctgaaaagtgcagtagaggagggagcttgaactcagtcatgagaagattctcagatgtaatagaagatttacagctaaaggacttgcccctgatagggggccctttcacttggattggagcggtgaataaccagtctttctcaaggatagatcggtttttggtcaatgaggggtgggattaccattttagtggttcaaggcaatgtgtcctcctgagaccagtgtctgaccacttcccaattatgttagaaggaggggggttgagaagaggaccatctcccttcagattcgagaatatgtggctcaaagtggaggggtttaaggagctgttgaaggcttggtgggagggggacaattataatggttctgcaagcttcattctggcaaaaactaaaggttgtaaagtctaaactaaaggagtggaacaaagatgtctttgggagggtggaatataggaagaatttggctttggatcagctgcaattttgggatgcaaaggagaagactatcagactgtccttggaagagatggatgctagaagaaaagtgagggaagaatacaaaaaatgggttttattagaagagatgaattggagacaaaaatctagggaagtgtggctgaaagaaggggacagaaatacgagatttttccacaggatggcaaacgctcacagaagaagaaacaatgtggaccaaattagggttaatggtgtttggtattcggaggagaatgggattagtgaaagaatagtgaatgcctttagatctttgttgtccaatccagggaactggcaccctcctttatccgggctatagtgtgaaacgttgcagaatatggatgttgatgctttggaggcgcagttcgcagaagaggaggtgcatggtgcgctgttgggttgtagtggggataaagccccggggcctgatggcatcactatggatttctagtagtttgcttgggactttgtgaaggaggatgtgatgagtttcttcagggagttccatgatcacaacaaatttgttaaaagtctaaacactacttttctggtcttaatcccaaaaaaagtgggggctgaagatttgagggattttaggcccataagcttagtgggaagcctgtacaagtggttggcaaaggtcttagccaacatacttaaaaaactggtttctaaggctcaaggggcctttgtggagggtagacaaattctagatgcagtgctaatagcgaatgaagccactgactcgattctgaagaataatgagaatggttttatgtgcaaacttgacatagagaaggcatatgacaatgtggactggtctttccttctcacagttatgcagaaaatgggctttggggagaaatggatagggtggattaagtggtgcatatccactgcaagtttctctgtgttgattaatggaacgtctaagggttgcttccaaagctcaaggggattgaggcaaggtgaccctctatcgccttatctttttgtgatagccatggaggtttttagctcatttcttaaaagggttgtggatggaggttttatgtcgggttgtacagtgaagggaaggaacggagaaggggttcagatttcacacttgctgtttgctgatgacaccttggtgttttgccaagcttcccaagaccagctgacctacttaagctggttgcttatgtggtttgaggccgtatcaggtttgagaattaacttggagaagagcaaaatcattccagtagggagggtagagaatatcgatgatcttgccttggactttggttgtagagtgggtagtctcccgtccacttatctgggcctccccttaggtgctccgtttaagacagtatcagtgtaggatggagtggaagagtggttctacaaaagattggccatgtggaagagacaatacttatcaaagggggggagagcaactctaattcgaagcactttgtcgaatcttcctatttactttatgtccttgctgaagttaccaagttcagttagacgaagactagagcaaatcgaaagggacttcctttggggtggtggcaacttggagcgaaaaccacacttagtaagatggaaggtggtgtgcttaagtaaaaagaaagggggattgggggtcaaatgcctttccattctcaataaggctctcctttccaaatggaattggcgattcgcaaatgagagagatgctttgtggaatcaagtgattagaagaaagtatgggaaagatagagggggttggagctctcgggaagtgagagaggcacatggtgtggggctttggaaaggaataaggatggattgggagttggtgggcgctcgaatctcttttagagttggcaatgggagaagggtgagcttttggagggatagatggtgtggggattcccccttgtgtgagtcttttccttccctctttgccttgtctgctaaaaaggaagcttggtggcggatgtttgggatcccttggccgagaggggttcgagcccctatttttcaagagctctaaatgattgggaggtggaggaggcggaaagatttttggagcatcttcacgggaagagagtgcttggagatgtagaggatatggtggtttggaccgaaacagaaagcggaaattttttggcaaagtctctctactttgctctcgaagcggactgccctgttttgtttccttctagttgtatttggaatgggtgggtacaacccaaaatcagtttctttgcgtgggaggcaacatggggtaaagctttaaccctagaccttgttcagaaaagaggatggtccttggcaaatagatgctttatgtgtcttgagaaagaggagacaatagatcatttgcttcttcattgttcaaaaacaagggccttatgggagctactctttaccttgtttggggtgtcttgggtgttactttcctcagttagagagactctccttagttggcatggttcttttgtgggcaaaaagcgcaaagaaggtgtggagagctgctcctctgcatatattttggacggtgtggaagacgagaaataaactggcatttaaggatgatgagctgtcaatccaaagattgaaatattcctttcttttctctctttggtcttaggttaaattgtttatagttgattgtcctataaccatagttaattttattgattggttgggatcctattaaggttgtttttgggctaggtgactttttgggcctctttattgttcttagctttttggtggtgggtgtttaggtttgtataccttgcatagttctgtttacattgagtcgcttttttggcgcctctttttaatgacttatcttttacctatcaaaaaaaaaaaaaaatgtcacctcattatgtaaatgaatgaatttctattggttgcatttttttcttttttgataagactattggttgcatttttttgtaatcagattctttgtcatactggttaaattccctaggacctgtgcttttatttattgctgatcttgatggaaatttaggtttggg

SEQ ID NO: 11749 - DNA, 11988 bp, Vitis vinifera
  Intron number 7 from transcript GSVIVT01030456001 (locus G SVIVG01030456001) derived from phytozome v7.0 (chr-ID chr1 2; pos 5707697 to 5719684)
gaactagctggggtacaaaggtgagctgcaaatatttagaacaacaagaatagcacgtacctcaaataaaatctgaagttgcaatgattagcacttccctgttatttgattaatttagctgtaagtttacaagattgctaaagatgatcccctcttgcttcatggcataggcattatatagcctctccctctgtcactgcttcacgctttggttctgctttatggactttaagacgcatggtgataaagagtcattgagctcaactttaggggcaggttggttagttaggtcaacctacaggtccgaggtgggttgtctttctttttggtccttgctttggggtgaggtgcttttgtgcaccttcagtatcccccttccccccttccagctttgagtttttctttcttggaagaggttagagccttttctttttgggttgtgtgctaatgatgtttaggcagtgctagtgcaattttcaatggcggtatacccattttggtttcctccgttttgaggcagtttcttccactaatctcatgtttgatggttgagatttgtccacgtgccgcatccttagcctttcctcaattgagagttttctctttcaaatcctacgctaattattatttcttccttcaatagtcgataagtattatatctcccattttctttcttcatttatggttttcttcttcttcttcttatattcctgttccaccatgttgaagaaataaaaaaggatgaatgcctctggatcgattgaatagtttcatgctaagtttaatatcctactgttagtgggactttgcttcatggatgatggggatgtaatcctggccaaagggagtctagttgaaggtgagatgttcttgcccaaaagcaacttcgaggctgggctttgacttccacttcttccattgtttagaagcttagtgtgtcatcttcgacttgtctcgaaccaactatgtattaacatcgttcgtttgatcatgtcaatgatcgtgttagattacttaaggggtttgaatatttcaatgagggatgttatgtacatctatactatgaagtagtctcacattcctcatgaatggtacttgttcgcttgcttaggtgtgactggcttcatcaccggggcacccttgaccaataaagacctgaattgtggtattgttgccattttggctgaatgaaagtttggaccttttgaacccgatgaccttcctagggttccagaacacatgacatgtcacattagtttttagttttacttttcctcttttctttctgaaaggcgaatcttaataatggactacacctagaggggggttgaatagggttgaattataaaaaaaaatgtcccaacaaagattacctaattttagaaattttcaatgtcaatgaacttttctttcaacaacttttcaataaaacataaaatccataagcaagtatgtatgcaccaacactctcctaataatttataaatgcaattaacatgcaaatgcttcaacactcctcaaaattaattcaaaagaacaattatctccttaattcatttcaatttactacaagatatcattaactaaaatgaacaaaaaaattattgaagatattccatggataatcacacttatttcagcttagatatcttccatttaacatatatgcccaagtgaccaatgatatcaaaaactgaaaataaattaaagagtagaatgagagaatgagacaactgacaccagattttaacgtagaaaaccttcgaagagataaaaaaccacgagcctataattgataaaaaaacatccactatgaagaataaaaattgaatacaaagttttacttaactcaaaccaatcaatcccttctcggaacatttaactagtaccttttactttcagcttctcaccttcttcttcagaagcacacttggagtccacaccaagatcgatcttgacctcttcttgaatccacacaagaagaaaatgagtttttacacaaacccacaaataatgagagatgaatgcttaaggaatcaacccatttttcttttcagaaaatccatttaaaatttttcttggaaaacttggatgagattttcttagtatgcaaacaacctcaaaaatggtaaggaatgaagagctctctttcatgactgctaaaatctctcttaactagaaatgagagaagtttgtatttaaaaagcaaaagaaacccttaatctgatggctgaaatttgatcttaaaaacagattagttggattgatctacccctacgcctagatcgatctagaaacaggggaacttactacttttatcaaaaattatttttcccaacttccctaacactttttaaaataattcaaagcaatcaacatattgaaaaatagtgttgattcaaattcattcaacacacgcttggttatatacctcgacctcttatcaaagtcttaatcttcaaaggtcaagtagttcaaccaacatattgaaaaataaggttgattaaattcattcaacacacatgcgactacatacctcaacctcttagtaaagtcttaatatttaaaggtcaagtagtttgagaagaattgaaaaactgagttaagaaacacttaggaattttgtccggaattgccaacctagctaaacactcaaactttccttctttgtagattctccttgcctttactttttcttgtagtgatagaggataccaaggttctagagattagtgattcctattgagctgagatcactggtgattcaaaatcgacattgctttaatgactagaaggttctgttgaagccaacccaattgtatgccagtttcatctccttgggtttgatttttcctacccccaacctttctttcatcaattcgaaggagtgacttctttggaaaaaaaaattcttgctcctcacacctcctttagtagctgatcctataaagaggaagcgtgagcaacctttgttgaaacaatcttcttcggatgggaagtctcaaaacattgggtcaaacactaggggcttgttgagtcactgaaaatctcaaatgatagagcagggctcgttcaagtgttagggtaacccattcttttgggaccttgaagagtaagacattattttcctccactttgattgatctcattgtaagttttgaagatgcataagattctactaaatctaaagctccaagaatgataggtggagcaatggagaaagacacttcagatttcagggacataaggaaggttgtggccatgttgtcctctattgtagtatatgactcatattgagtgagaaacatatgtggagagaaaaaaaaatggcaaatgctagagtggagtgtagtgtatggtttgggggtatttttggaatttcaatacctaagggttaatataaatacccttttatgtaaccttaattttgatatagtgaaagtcttcttccttgttcctgtggacgtaggcattctaccgaactacattaaaatcagtgtattttcttttgttttctcaaatctcttcattaggaaccctccctaacctaagttgggggaaaagattctgagtttgagatgctttttgttggtggggatttactttcggtggttgaggtagctaagtggtcaactcttcctagtgatgccaaatttatttcgggtttttctaatcctgaggtggtagataaatcaattaggctgagctattgggtgcgaattgaagtttttgtttccttttccctatgtttttatgttccatgtgggtcattgagttggcttatagtttctgttttatgtgttttcctcatccatgtaggccttatagttcaacctggttatttgtcaacatcttagttcgtctcgactaaactaggtcgggttgagggaccaagtgagagtatgtcctcccaagtggaggtcatctcaaaagagttggtcatgttaaatccaagttggaggttgagtggaacattatgaccaatttccagcaagagattgtgtctcttagggtttgttttagggacttggagtcttgatagaagtcactttctaaagaaaaagatgacttgagcaatcttttggaggagattagatgagccaagatgatgtgcgaattggacctattccacttgcaagaaaactgagacaaagagaaagaaaaagtttgtgacgaagtttatatgcaacttactagtgacttgttggcccgtgataagcagaaccagaatgaggggtacgttcttggttagagtatttgaagcttggaattgagtcttttgaccctcttgagtttgattttggtagtaaatctgacgggtcttccgaccagttccttatgaatgatcattttccgggtacgaatggtggtcttacaaaattggatttagaggtgaacttttttttttttttttttgaaatcttattgactgtaaggattttggtgtttcaaggagcttgggttggctggtggacatcaggatgagccaagaaaaagacaaggtagttgcaagagcttaggtgttgttcatgaggtagttattgaggcttttagatcgaaggaagacgaggcaacgaagaatgctactctttctgtttccttagtcactaactcttcttaattcaagggtgataccttagagattgacattaatacttcttcaaaggagtctgggcttttgttggagaaagattcttttagtcttgaaattgctttaccacattaatacctcttcaaaggagtctggcttttgttggagaaagattcttttagacttgaaattgctttaccattggaaacctgacaatactttgtcctagccctctttctcctctccgtttttgttttggaaatgtttgccctgttttagactatatgagatatttcctttgtagtgaacgatatgctaaaaacaaaattttcttttggcaattctatgtgttgttgtgtaagtttgggaaagagatgattttgtgttgtaggtagaatgctctcacttcttaccaagaggtagggttgaactatggtatggtcctactaggggcaggtacaatcaacatgggttggcaaatacagtcgaagctctatataatgaccattcaagcctttttaattttttggctatgttatggtgttgcggcttatatgcttgcttgtatttaagctttcctggaggttgcttacccaaaatttcccattcttacattgcatagttaagttaaagcgaaccaaatttatttaatacataatcagttatgcatagtactttttaaggtgtatccggttccaaggtttaggtatgggtgtcccatctggttgtactagccaacatgcttcagttcgatacattttaataacctaaagcgaccttcctaagttggcacaaacttgccttcatccgcatgtctatttggatcatgtatagctcggagtaccagatcttcccttttatatgggttgatgttggactttttggttgtatgctcttaacagttgttggtatatgcaactatttgaatgaccaccttctcatgcctttcctccaggaaggtggtggtttcgaccagagtcctttgtttgtctttcccttcataatattatacaaaaatggttgacattcctatattaattggtactaacctccgcttcgtaggagtttccttagttgtcatgatgtgaggtgtggcccagtatgcccataggattactggtagcttttcgacccatttggctttagatatttccaaactttttttgagtgctgcgagtattgttctattactaatttctacatgtccattaccttaggggtaagccagagttgataaatgatgatggatacccaattcttggcataaatccttgaactctaaggatttaaactacattctattattgatagtgatctcgatcttgtggactgctgaaccgacaaacgatgttcttctagaggaaagtgtggatgttcttctctcttatttgagataatggttctgcttcaatccactttgtgaaatagttagtggcaactaggaggtagtgtcgttgagctgttgatataggtaatgacccaatcaagtctaacccctaatgaacaaagggccaagttgtactagtcgggtcatatttctatggtggtaagtgtcgtagaagggcatacctttgacacctctcacaagcctagacaaattgcatcacatatttttgcacgtaaggccaatagtatcccagactaagggcttggtgcatcaacattcttttgccatagtgatttccacattgcccttgatgtatttctgccaagaaatactgggattcgggatgtgataaacattggaggtagggaccttgtgtggaatgtaaatataactatttatcaataattgtatattgcaaggcttaaaatcaaagtttatgtgcattttttttttagtcctttgacaacgttccattttttaagatatttataggaatggtgtcctccagtcttcttcattgatagagttactgcagtttacacgcaattcgcatctgtatatgcttggttgctcttgatattccaagctgacactttgctgcttgtccaccctaagatgtactgctaggttagccaataggtcaacgatcacatttttctcccgcggaatttgttcaatattgaatttgttgaatgtttgtttgatttcattgactttagatagataggctcccattcgatcatctttggcctcatattgaggcaggacctgacatacgataagtttggagttccgagtacacttggatttttcgggctcctaaaagttgagatactactaatcgacgaagtaaggcttcatagtttgattcatttttggatgcttcgaatccaagtacaatgcttttgtctgtacttccgaatggggtttccatgtggattccaatccttgcaccatgttggtttgaagccccatctacatagagaacctaaacctcctatggccttggtttgtctctggtttaactccttttgtgaactcaaccacaaagtctactaacacttgctcttttaattgtagtatgtggtttatagctcatgttgtattcgcttaactccaaaaatcattgtagcatctttccagatgggtcaagttcgcagaggacgtttctgattggtaagaagttaatacgatgatggtatgcacttgaaagtatgattgaagctttcaagtagcaaccaataaggccagggttaactattccaattggggataactgagcttagtgttcaacaatgcttgaaagtatgattgaagctttcgagtagcaaccaataaggccaggattagctattccaattgggtataactgagcttagtgttcaacagtgctttgcttacatagcagattggtgtttctttatttttttcgttttgaaacaagataacacttacgacctgcctagagattgctaggtagatgtataatttctcatgaggttgggccattgagaggggattgacgggtgtgataggtggtttttttagtagtttgaaggcttcaatacatttcatgtcctgcagcaattttttttttttttttttagaaaaacaaaaatgggtttacacttgtcagttgattaggatatgaaactagataaggctactattttttcggcttcttgtaccttattctgtgtagttgggatcttcatgttgtgtatggcacggatttggtccaggtttcacttaatgccctgccctgtttccaaatgccctaaaaattttccactggcaacttcaaagatgcatttaattggattaagccatatctcgtgcttgagtatagtggccaatacttcggctaggtgttggggatgatcattggcccttttactttttaccatcaagtcgtccatgtagacctcccttcctatttgttactagaatactcatgccattttacgctgaaagccattaccttgtaacaatatgttccttgctccgtaattgagacagttttttccacgttgtcaaggtgcatgggattttggttgtatccactgtatgcatctaagaaggtcaatacctcgtgcccaacgacggaatccactagctgatcgatacaaggtattgagtaattgtcttttggacaagccttgttgaggttagtgtaatctacacacatcatccatttcccgtttttctttggtacgatcacgacattggccagctaggttgggtatttgacttctcgtatgatggcaagtagctttttttaacttttctcatatgatttgatttttaaatggtgcaaaacgactttgtttttgctatatcggtgggaaatggggttcgacattgagctagtgattatagacttgcggatttacccttggcataccctgtggttgccaagcaaacacgtgcgcataggctcgtaaacactcttctaggctttcctgcaaagcgtcatctattacttttcattgttgctttgctttcctatcacgatttcccaagtgggctttgctactttctatcgtttttgatcttcttttggcttggtcagggaggaggaatttctttaattgctatttgtcaggagttaccaagggtagtggtctcacagttgtaggtattgcatacattatagctagatggtaatgccaagcagtgagctggtttcctaatacttcctgtattccctttggagtttgcatcttaatcttttgatgctaggtcaaggtcaccacatgggtggcatgtatccagggtcgacctagaatggcgttgtacggggaagtggaggtttcaattaggaagtgggttggggtttttggttgatttgatcaccacctccaaggttagttttcctgtgcttgggtggttttgccattgaacccaaccaaaatggtctaacttggttccactttttgatgctcttggtccattaattgggagcaaccatagaaaaagatgttggaactcctagtgtcaactagaatcctttggacttggtatgacctaatatgtagggtgactaccaatgggccactgtgggggagagacgtgtctaaggttttgggcaatgaattctatcactggttcccatatcctgttgaactattatactcgagcacactaatgtggtaggttgaatatggtgttgttgctggacgactctttggcctacatgcataacaaatcaattttgggtcttgttactgtaggtgtcgataatatgtatagatggtgccaggttgtcatctattttgagggatggtagttcatcttgttcctttgcctcaaccgaggttggtcatcgtggatcatatttcttttcgtattgttgtaatcctttgcaccacactatattctcaagatatcgatgtagggccttacaatgatttgtttgatgtccatgaatgtgatagtaatggaaatcttggatttatcttgctattcggaaggctagacgggtgatggaggccatcagaagttcgggtcaccttttagtttagccaacaattcttgaggtgaggtcgtgaattctactcgggtagcgggggatttttttattgaatcttgtttgttttcttaggtccaactcctcaatttgaggtatgtttgacttgtgtgatcttccttttgttatctacgacccctaactcttcttccatgttggcgtatctgtttgctttcgctaagagttcctccatggcagtcaacccgcttttcgccagtgattgtagtagagggcttctaggctataaagcctttctgaaggcaacaattaccgtccgctggtcattgctttccacttggaccattttagtgatgaactagtgggtgaatttttgcaatgatttcgttgttgcttgcttcaagttgaacagataatctacacttcgtctcgttgcaggcatcttaggtcataaactagtcacacgattgcgtgaagctgtttatggaatgcagtggaagctaatggaacgacgttagggatgatccattcaagctggtgggaaagacttggtagagcagtccctctcgaacatccacaagggccatgagttactggaaatgatatatgtgtcactggttccatcatagaggttgaattttggcgggacgtagtgggcacagttcttcttggaacaaatgtaatgcaagagagaatttaaatttatttccccagctttgagtggccttggcgagtgaattaggttgcagtttgatttgttgtacttccgttgccaatttcttgtattttcgttcaagatcctctggtttttgggtaggttgaaccttaagaatggctgttcaggttgttgaggcgccctgcatgcagctgatcacacttccctctaaaacctagtcatttctatgaggggctcccccccacgtgtccttcccaaactcaagaccctttggttgatcaggacaaacgtataacccgtttggaatcactctatctggactaagttaagctccgtctaacactagaagtaagaaattttccttctttcacaatgccagacataatggatagaccaaactgattgaccttttaaacggactcacaatgttaaatggaatagacaaaccaagttggttggacatttcagacggacaaatcaatccagtcaagtccttaggatttttgacatgtgtggttaaccacgcctgatgtctgaacattgacctagtcgcttgatgtctgagcatcggactagacgctatttacacccaaaagtcaatatcaattaattgttacacacaatcctagacattggcaaactaaatgaacagttagctacacggtccgagattttggcacaacagtcagcaaatggcactaatcaacaacccttacttgatgtgatcgcctagtccacacagtagtgacaacgttgacagtctgcgcaatcatcattacaagataaggacgatgttattaactctatataaatccctcaagaagcacgaataaggtacacacgctcattctctcccataaaatagttaaagttatcctcatttgacttaagattcaaaggggtgtgcttagaccacccgtccagacatctttctgtgtaggaaagaagtccgtctgactccagtaaagttggacgaactcctcaacaagtatgaataagggaagaagtccgcctaactctaataaaactgaacaaacttgaatccaactggctcgacatcaacaattctaggttgataggtacacattgtttaaatttcaatgcaattggcttattaggctgtcttgtcgaattagaatattttctatttgctgttggtgttcttactgctgtcattccagcttgtgaaggatttgtgatagttggttctgcatagcatctaacttgtctaggttgtgctcggatttccttcctcgtttgcaaattctccattcatggcttctttgctcattctgagatgctattctcaacatcttttccacagacaaggtcattgaagttgcaacgattagtaatatccttttatttatttatttattattattattattattattattattattattattattattaatttagctatataagtttaaaagattgctaaagatggtcccctcttgcttcaaggtgtaggctttatatggcctctccctctgtcactcctttaggcttttggttatgcttattgactttaaggcgcatgggatgagagtagttgagctcgactttttagggatagatcggttagtcaagtcaacctgcaagtctcaggtgggttgtctttctttcaggtccttggtttggagtgaggtgattttgtgaaccctcaaagtcaaagtctcctttttccctttagttctaatttttttttcattaaataaggatttacttttattttttatttttgaaaagaaactgaactaaacgttacattaaccttactataaccctaaaatgtcttggtaattacgtggctatccatgttcagattggttggttat

SEQ ID NO: 11750 - DNA, 4230 bp, Vitis vinifera
  Intron number 5 from transcript GSVIVT01016512001 (locus G SVIVG01016512001) derived from phytozome v7.0 (chr-ID chr1 3; pos 3252472 to 3256701)
ttgactctaagaaggaccctcccaaattcaatcttgtagaccctgttgaaaggaacacagtcggtgtgccgtccggcggttgggtagctattcgcttcgtcgctgacaacccaggtgtatggttcatgcattgccacctggaagtccacacaagctggggtttgaagatggcttggatagtaaaggatggcaaactgcctaatcagaagctgcctccgccaccctctgaccttccccagtgttgagctcctcttccaaaattcttttgatcccaacctggcctcaactgatgcctccatttttcccttttgtaatttattaattctgtttttattgttttatcccctgaatgttcttttctccaacttataaaattgagaagtttttggtaataaaatgttggttactattaataattcagatgaccaaggagatcactcaccgcctgccttcccaaatctaccacttaccaaagtaattgcaaccagttaagctaatgtactgcacactgccaacaaaaatttcacaaggtgcttgcgctgatttagtcaaagcccacaccagaattagcataatatataatactttcgtcaaattcaattgatagtggacagagcggagaatttttgtttggacccttttaaaggaaaatatctgcaaaagccggtcatagccctttgtttgattgtaaaagaaaatgactttgattaatgttagggcacttcgatttataacacaaaaggctggtattttgcgggtaatggtcatacctctaaaggtgagaggacaaagacttaatatttaggctatttttcccgaattctatgagaagatatttatcacatgctctcctttggtaaaatattttataacaatagagtctataattatttaagaagatattatcttgataagcttatcattgcaacattatgcaaggatgggtattctcaaccctactattagctagtatcattatcattatggttttgggcacaagatctaatatttcgagccctctttgttatcaaaatgtataaggcactttgatatttttgaattctttaatccttaggcaccttgatcttatggaattttttattctttgaactcatctaagaagactataagatgtaattgttcataaagaatggttcattcctagagaaaaactatccaagtatttccaagcaggttcaagtttaaatttctctaatcctacacctatcatctcatttgccttcaaaggcaaacaacctttcagggcaatcatcgccccaaggatctaggtagacttaggtcaagaaatccttgacccttcctcttttattgcattcacctcttaaggcaaaggatattaaagggcaatcataacctaaaagtctaatcaagacaagaaatctttaaccgtacccttctcacttcttttacctccttaagcattacccttgagggccatcctcatgtaagggttcgagcttgttcaagtcaaagaaacctctaaccttaagaggaaaagggattgtcaagggtatatgcaagctcagatgctcaagtcgataaatctctaactctatccttattactttatgcaccttctaaggcaacaaatccttacagacaaccatcccacaacggttcatgcaagctcaagttcaaattttcctaaaatccttatcatcccattcacctcttaaaacaagggaccctcaagggcattcattacctaaaggttcaagcgggctcaaatcgagaatatcttgacctaatcctttatgcctcttatgtctcaaagtaaatcaatgcatgcggtgctataaacttcttaacccatatatacataagaacgttggaggtaaatgttacagctaaggatattaattagtggaaaaattatcaaattacctacaacatcattcctccatgatgggcgtaaagtggaagacttagatgtcaagaattgaatgctcagaatccacctcactaatatttttaagaatgataactgatgcaataagatggtgaatttgatacttttaaaaatagtcacaataatttttttttagcataaattgatatttttatataaggtaacacctttacactatgtttgattctaaaaaaaaaaaaaaataaggaaaacactaaggaaagaaaataaagaaggaaaaagaaaaaagaaaaataataaatttaaagttaataaattatttttatatgtttttttaaattcatttcatttttttttctatataaacatcaaacaatttaaatatatagaatttttattaattttaattttatatatattttcatgttttctatgtaaatcaaacataataatatttattaattttttattaattatttttcttaacattttattttcttttttttcttaatattttctcaaaaccaaacataatagctgttttactaatacctatgaggactaatatgagtgataatgaaaattaatttttaagatagagatcattaattaaggtgaaaattaacattatttaagatgataatcaatatattttatgatggtcaaaattatgaccaacatttccaagtgtagtgaataatacttcctaagatttttttttgaattgagatgacccatacatgaaagaaatatttatgatctactacattaactaaatattgacataaagttaaaagactatttatgagaaaagtggaaatatttgctttgctgatgaacactacctctcttctgagtaatttgaacaggagaaaaaggatgtttgacctcacttcaatttgcttcaacaacactgagaagacaaatcccaagcttctatgtttgtttaattaaccattaacaaacacacttgaagctacttaaccactaaaacttgcatgtcaaggaaacattcgaatttgatttttggagaagccacggattaattctatcttaaccccaccaccattccaaaccaaactcttttttttttatcttccccctctattccttccggaaccaaacaactgagaaattaagtttatacatatggttttccacgaagatggatttaaaaataaatccatgcatgcaagtatgtagatacatagacagattttgtagttgtaccaactgcatatcccttttgaggcactcatgatcatcaccttgtgcattctttcttcctactgtatgtattgttcaaacacaaatcttacgcatatttaattacaaaggcttccccacattacgattgacaggagaatacttgcaagacccttcaaataaaactatatgtatcacttgtgtgacattttaatttcttggaaaatgatgtgctttccaaactgcttgttgtccagtttcttaaatgggacatcagtgtgttagaggtgtgaatgagttacttccgtacttggaatcagacccataaaactggaattaatatcaacatctctgtcaattcatatacctaatctttcaatccacttctctaatcttctttgatacaaattttgttttagttattcaatgagagtgatcatcccccaagacagcaacaaagagtaggttcctatgatcctatcagatgtgttacactcaagaccaagagattgagaatgtctacaagatcgtcacatcaatattgcgtcctgataagctaagctgaaacggacatgtcttatggtgaaaacaattgaaggtccagtggaatgaaattctttcaccataatttcggcatttgataccatgacatgaaagcctggcttcatcagccccgcacaatgctagaagtctttacgcagtgaactattgttggtgaaccaactatttctatgaaccgaagttttattcattgccactatttatcaatagaaggacacgtttgaaattcagaaaaaatggaggataccattaccatataagaaagggtaaacgggaatcggaagctggtcaataaaattcagaaatatactctctttgaaaatactctaaaacaaaacttgaccaacatctggtcggatcgagaatgtcattgtaggtgtttggttctctcccttttcctttaattttgttgttttctctacataatttcatcacctaatcaaccaaacaggccctaccatttctatataggccgtgccacaaccttccacgagtctcatcaaggagccacttgagggttgtctggtacattgttgctcaacccaaccaaatagagaagattttcaagagaa

SEQ ID NO: 11751 - DNA, 7551 bp, Vitis vinifera
  Intron number 3 from transcript GSVIVT01012933001 (locus G SVIVG01012933001) derived from phytozome v7.0 (chr-ID chr1 7; pos 13785664 to 13793214)
ttcatccttgtttgcgtttttcttttttgtgtcgtgtttcgtacatggaaatggaaatgcaaatgggcaatgagaatgaatgttttgttttcattctcatttcttcttgaataagaatgaatttaataatttcaattcttatatttagatgatcaagaatgcaaagttggaatcattatttgtttccatattaatgttaggtaataatgaaaataagaatggaggaagaaatatatatataaacataaattcattttataatttttctatagaatcaaaacaaaaaaattatttctaaaaacatattttccaaacaaggttttggttttccatttttttttttttttgaaaacaacttgtactgaagatcaaaatgtctcctattagagatgaattgaaatcttgcttaggtgagattttattcacatttgaaattattttttatttcattattgtctttagttgagttatccaaaaataaaaataaataagaaaatggataaaatgactattcctactcttcatttttgtgttcgaaaaattccttttgaaaaattaacgtctcatatattactttgaaagagtttaacaaatggtggcactattgttttaccttcaataagctttgtccctctcgcacgcatcatttcaaaactgtcatcttcacttgtatgaacttatccattttactaaattgaccaaaaaaatattcattttttaactttcattaaaaatacttctaattttcacttttcaaataaatattaatacgacatttcttttgttaaaaatgaatgacaatattttaaaaatttagtaatgaattatgatattttaaaattgatagaaacgtcctaaatttattttaaaacaaatattgatactatacaaattacactagataaatatgaaatgaatggataatgattttcttgaataaataatacaattataatttttgaaaatataaataataaataataaataataatgtatcctttttattaaaaagtaatcatagatattttggtagataatataaaatagcaatattaatactttaattatatttcttattcaaaatgagcaattaataatattttagaaaatgataatgatttataatattttatttaaaataaactataaataaataacccaattaaatttttttgttcaacatgaaacaaaccaagttgtttttataggtatacatttactatatagtatataagtagtgataaagtgtattttcgaccaatttggttgatagaaatctagcatcaatttttgagttaattttttaatttcaaattatttttaaaagtattaaatcattcacataggctgcacacacgagaaccgcacaggatgcgcacaagctgcatgcacgagaagcgcacaagccgcatgcatgagaagtgtacgcaatgtgcataggccatgtgcatgggaatcgcatgggacacacacgtgggtagcaacatgaggagagattctctaatttttctaggcatgttcttcatcgcaaggaattgatttgggaacatctagatctaggtatgagcatttttttttggatatttattttataatggttttttaagccattatttttcgttgcattagatctagagagccctaaggatagatgcatgcaccctatgagatccaagacatgggaacaaagtaatctagggttcccaacaagcttttccatacactgctctatataaagacattttaaggttagtcttatatgtaattcgatatgcttaaaaagcatctactaacttagtagctcaatactttttgcttatgttgaccaccttcactagaatcccttgtatctctctatttactagttcaaattgtccatttgcctatggatggtatgaagaagtaactctatgtctatctccacacatttttagcaaggatgctaaggtttatctccatctcttggttttaagcattaaggtatggtaaacaattgttagacaacatctagcaattatatgttcaccttctcttgctttagcacctcaaaaacttccaagtagttgttatgaactttattccccttcaaaacttaaggaaatggagtagtaattctcttatcttttctttcagatttctcagctttaccttgatctatctttcttttttccaagaattatagtatttttcaattcctttttcaaccttattttcaattttctttcattcatcaatgtagttaaggacttttgcacttctcagtggcacaacaactaccacctcttgttaatctctagaagaactctaacctcctcctaattcacaaatggcttttgaattttagagagttggaaattttcctttctccccattttcttgcatattaaatttattcaaggtagtttgattgttagtgatagcttatgatgtttgagaattgaattttctttcttcttcattccactttttgtacttagctaccgatttcttaaactcctcattaaaccttccttgttattcaatgaatacttacatcatagtttctaatgaagatgatgatgatctagagggttgattgttctagaattgagttgaatatggttgattgagttgattaaaaaaacttctgagaaagagagaaagaaagaaagacttgtgtattagaaataagaggaaaatgagtttttagaaagaaatgtgaggaatattcatgtccaaaaagggtcatgtctcctaaagaatgaccgagaggggtcatttttctaattttataataattttggcccttatgtcctatatatatatatagatagtttatgcatgtggattagacactaggtcatgttccaatgatgatatttgatttgttaggatagagcccttaaaagcataacatgatgtaataaatttggaattcattatttatttaatgatgttctagtttcacttttatctatccttattccatgtattatactttatgagcattcttgtctacttcttttgcattatacatgacttaggtgcattagcagttgtacaaaagatctaagtcataggttccttacaaatagatgacttgttcacaaccggttcatgggtttagctaacccattagaaattgtagtgcaccacctcttaattataaggatggttggtcttggctatcaagatgggtttcccatggtgagtgtactagtgtgaatggttacacattaaacaagacctatggtgagtcatgacttaaggctgtcaagtagtcatgacctcaccaagttgcttcattgtgttgtctctcaaccttgagagaatattgagtttgtgttaaagttagcagtggctttaacctacaagtgagatcgtaagctgatcatatattccctatggattgggtcactattgatagaaaccgatagcaatatgtattctcaataaagtcaccatgatatctcatggaattgagacaatgtgtctcttgggtgatcctaaggaggtgtgctcatgaaaactatagtcatagtagttccttaagtggaacttgacataggctctttaaaagctaagacatgtcagttgaatacataaaatgaggatttgtaactgatcaaggatagtaaagattgtcttgaaaggctgatagctttcgccttgttagattatggacactagctcataggaagactgaacacaatggatagtaggtcacgaacttgagcacattgtgtcttgttgttatttacataggatattggagttcaattgattctctatagtggaatgttgaatcaacttcaaaattggattatgagggagccaatacttctataagtctcagtggtccccactctaaactcatatactttgttggcatggattatgagggttgaattggctataggttcacttttattcataaggatgttttggtaattacacaaggttgcacagggataagtgaacaaggtctctaaattgagctaattgattaaattattaggccttattgagttaattaatcaattaggaaccattttgggctaaattaagtgacccgagcccatgtgcactcaagtcacttaaacccagttaagaaccctataaatgacccctaggggtttaggtttctataacatttatcttccgccatccaaagagaaagagagtcatagcctccaccctcctccccctcccccctcccccattggaagtgtgccaagaacaaggttgagtcatcaagctgaagatcatgggtttatgagacttccaacaacttcaaaatcgtcttcaacacttggaatttaaggtttgggaatatccaaacctaaagattagtacttaaacctaaaagattaattttaaaaaaattggtattgcttcattgcttagatctaagatgccaagatgattcttactcacattaagcttccacattatatcagtttacttgacttcaagtcaagttgggactcttcaataccacccttgatcaacttgctactctaagcaaaattaagacaccaactcgaagctccagtttaaattaaactcttccaaagactcactacacagtatgcaacataaaaaagaggttcatttgagggaaaaattattattcccaatttttatttttatttaaaaaaacaatttattaaattttcgcataatggaactaaaattgccaccctcttatagattctctagggttaccaaagtttctaagacattcaactctagtattaattatcattgaatactaatcatattcctacaagcactaaatatagggtggtgattcatgttggtaggtcgtgttcatgtaatatcaaaggctagatacttgactaaaagacaaccaattattaaacatgtagcatatcatataacccgtttaacctattttgtaatctttaaccaataattgatttatttaaaatttgattgtgaataagataagtcaattgagtcataaacatgtcaagtttggaggtaaataatatagacttatataagacttataatcaagtccattgacataattgttaaataagtaaatttgaatcaaacacaattatactcaattggaacctatgaaaaacatgttgaatttgaatcatattagcgaattatatcaaattttgtcacccttcataagaacttagagttcatttgagagtgattaataaaaatgtttttagtatacaatatttttgtctagtgcttttagtgtgtaacatttatttttctattttgtagcacttataatataaatacttttatggagaacaagttcatttataaaccaaaaaagtatttttgatggtacttttattaatcatttttatataacaaaaaagtgatttttgcaaaagccatatgtcaaatgctattaaaatcacttctaagtattttttaaaagtgagttttgagaccttcacaaacttttaattgttaggaaccttggatttctccattccttgaccttagatctcataaggtccatgtaaactatcctagatttctctaaatctatcgtaatggaaacatatagttataaaaacaatattaggataaaaatctaaagatatagtgctcatacttgggtctagatgttcacagatcaattcctctcgatgaagaacattcctaaaggtcttgtagcttggtgaattatgaaaattgatagccttgtattatgatttaccataggtcttgtccaatgtgcatcacatatactattgcactcatcatgaaaaactcatcctgacgggcaagacaagtcatccctccaattaaaaggtggtatactacagtctctattagattgctcaaatctatgaaccgattatggacaacttatgtacttacaaggagcctatgacttgtatcttctatgaaactcataatacacctaagttatatacaatgtaagagacatgggttgaatgctcaaatcaatgtcaatacatcaaagagatagtaaggagacagttaagtcttaactttgttacatcatgtcttgtttttaagggctcaatcccaacacttgtttttataaggaaaacactttcaagtattaagaaacacttttatcccttttaaaatcacttaaataggattttactacaatgtcatgtaatttactctagttcaaaacaaatataagctaaatctccaatcaggttccatgtcataagtattagtttctattcttgtcttgcctattagctaatcaatcagttcctgctcttaaatttaactgatgactcatgtgccatgaaaatgtgtgacttttggaccttgccctgcaactatggttcgatcatgaagccaggtagtttggctttatatatgttttagggttatcaatgatgtcttaaaatcaatcctattttgaattagtatttaacttttgcatttaacactaaaagaagcaaaagtaaaaataatttatattgtgatgccggattaaattttatgtttagaaattgtattttaaaaatgattttattaaaaataacaatagttataatatttttttaaatattttaattgaataaaattttattttgattgaatttaaggaaaaacatgatttttcttactctaaaatttaaataaagaatattgagaagcataaagtgtgagatccatggttacgagcgagaactattcaaatattctaaaaaattgtatttaaccatcaactgttactttactatttgagaagctctttcaaacaagactataagatatcagggtcatcctatagttcaaaaggagcactataaaatcattttttggaatttgaaaaataagcatatcatcatcactgtataagaattggaaggtggagagtgaaaccgccccacatgatcttgatcttgttgtacaacacatagaaaaatgtacatttcttcacgaaaaagaaatgtatgatgtgcaagtagtagatgaggatgaggggctttgactttggaacaaaccattcaaacatgtatgatgaaacttcctaagcatgcaggaatggttgaatgaactgagtttttttattaaagtaatcgaacttgcacggagcatttattcataaaagttcaattttgggattgtgagaaacattgaaaattatgtctaaaacggaaaacctaaatgcttccaaagtcaaaattacgggtcttgtataaccttagacttttgtagactgaatgtattttgcttgtacagcaactggatatgcatttcccttgcttttgagggtacttcttttgaattttgtaccaaactaccaatcaacttttgacttttactctacctctaaaaattaatctaaatatgatgataaatgagaaattgactgcaacccatttctactctctatccaagtgctggtttaaaatattgtccattagacataatttccctaccaaagacaaatgttgctttttgctaacaactcataactctattgtgttactcaacccatctcaaaactctacaaatacaagtcatctctgctttcacttctccacatctcccagaagattaatatttaca

SEQ ID NO: 11752 - DNA, 5663 bp, Vitis vinifera
  Intron number 11 from transcript GSVIVT01025372001 (locus GSVIVG01025372001) derived from phytozome v7.0 (chr-ID chr 6; pos 1324522 to 1330184)
aaattgttgcagcggtatgttttgctgtccctttctttgtattagtccatctgcttagctgaatgtgtgaagttttttaagtcaacatgaaaaaaatcatgctgtttgtcattttcaaggttacaactgtcctaaaaaatttctgttcatttcatgtctgcctaaatttggccattgtgaagtcatgtgtacaaggcgtctgttttttacaaagttttaccatgctattgaagtaattaaggtatccattattcaaaattaacttctatttccaataaaaaaaaaaaaaaaataaatttgaagataacttttctaaaaccttcgaaaatcataatgataaattttcctaggcaactttgttgattgtcttttgagttagaaatctggtttctttggtgttctttcctttcctttgtcttttttatttttatttttgtagtcaatatgctataatagagtgaagctacaatcctgcaatctcttttattttcacttttaagtcgcctttttccttgtttttaccttgctcacattctttgtgggtcaaatttgatccttgtcatgctttttatgtatagcaggattataaaatgtagtcttagtttagatggcttgttaacaagagtagaataaaataaaaggaaaaggtcaattgctatcttgatattcacatattcttttcattatgcaagtttgggagggcatggtaatgctggttttggtatgtgtttattgaatttttttaaagatatgttgtcttcttaagtttcaagaggcccaaatgatattttgattactaggattttgtatgaatttgttgtatgggtgtggattggcccttcctcttttagacattttgttgctttggaagcccatgggggcttaaggaatgcctttttcagataaaagaaagggtggcttgggtgttagatgtctttttaaactcaatagagccctcttgggtaaatggagttggcgctttgtggaagaaagggggaatctttggaatcaagttagtagtaggaagtatggggtagaagaagaggggtggagtacttgagaagtaaggaaggggtatggtgtggggctttggaaggaaattaggaaggaatgaccttttatgaaaaacaaattcgtcttttctgtaggggatggaagaaaagtaagattttgggtggataggtggtgcggagacgaggctttaagtctttctttcccttttttgtatgctttggccacttctaaagaggcatgggtgctagaggtttgggatgctttgggggaggatggggcctagaatccatgcttttctaggtcgtttaacgatgtggagatggtggagagattcctattctctttgcaagggaagagggtggttattaatttggaggataggatacggtggaaggaggcaaaggatggtaattattatgttaatccttttatagtgctatgaagggtagcaacacagtcccgttcctgaaaagcattatttggagcccatgtgttcctactgaggttggttttttttgctcgggaagcctcttggggtaaagctctaacattggagcaactaaagaagagggactggtctcttcagaacaaatgatacctttgttgtactgctgaagagtctattgatcatcgtctaaagcattgcaccaaggctagggttttgtgggagttgttatttagcctttctggtgtgctgtgggttctcccatcgttagtgaaagaggtccttcttgggtggcatggtttgtttgtgggcaggaagcgagtaaaggtttggagagcagcccccttgtgttttttttggatagtttggaaggaaagaaatggggttgcttttgaagatgaggatctttcaatccaaaggatgaaatattcttttgtttgtaatttgtggtcttggtctaagttgtgcatagatgaagggcctaattctttaattaacttttttgaatggttgggctatagatgagggcaggtgagttttttgtaccccctttcctttgttttttgcctataggcgcctattgtatacctcctatatgctttgggttagctgttgggcgtcctgtttttattaatacatttttctgtgtctttgcctatcaaaaaaaaaaaaaaaaaaggaaagaaaaaagaatgcttttttctcttctccatgcttttaataattcatctatttaatgaaatagctttatcccatcattttgaaatctttttcaatttgagtaagaagaatatttgattcttatgaggttgcaagagagagcattagagtttcacaaatcctattcttagtccttttaggttggcccatgatttgtggtgttcaatctcttctttgttttggattctttggatgcgtacttgtttggttaaggagctttactagattgacaggagtttcttagggaagaaaggaaaaatggttttgggggatgcctttgtgtttgacatggcttgtctggagggcaggagagaagaaatttgtgggagtggggagctgggaattggtactttgaacttcgtaaaatttcttgtacgtttagtttgaaattgtctctgattgtaacttagctacattcttgatatctttcattgttgagggaggggctcaagtgtttacttttgttgcccctagcactctttgaggggatatggtgtttttttttttgtttcctttggattttttggtatacaaactatttaattgggttatggtcccttttgttagatatctgttaatgaattttttctttgcttacaaaaaaagtattaggtttgaaatagttggtgttggcatgcttgataatctttttttgacataaaacagttttttgaaaactcgtttgtaaacatattttaattatttaaagttgttttcacttttttcctgatagctgttttaaaaaataattatgtgaagatggagaatgattgaaaaacaatacaaataaaagttatttttaatatatatttggaaacatagaaaacaggttggaaacatttcaagtttccaaatagatttttgttcgtaaaaattgttctcaaatattgttttttgggcatttttttcaaatatatttccaaacagacccttaatttccatgaaaatttcaatcttcttgaaattaaggactctacatcactcctcttattgctgtaaagaatttactaacccttgctcactccagtaaataggtgtcaacatttggaaggtttgggctaatttgggaaccgtgtgttaaaaaagttctcttctagaaatagaaaattgttttctagatttggaaaccaatctactagttttttttattgaaaacaattttttggagaactttttctgaaaatagggtgttttctgatagcatatttttattgttttcagttatttttatttgttttctggtgttgtttcaaaaaaataattgtacaaatatagagaatgattgaaaataaagcactatagataaatgttatttttaagcaatattttaaaaacaccaaaataggttgagaacatattccaagttcccaaacagattgttattctaaaacacattagataactatttttgacagttataaaaaactgtgtttgactgttgatctgtttttagaaacgttcctaaacatgcacttcgattccttttcatccattttctttacattccttgggcaaagtgcaatgcttttaccttctttcttttgatctaattaatcttgtaagattaaagtactctagaaactgcaagcttttccatggttagtgactcataaaaaagtagcatgttgtggccatctattctgcatatctctggtgtctttgggtcttttgcaatagtcggaccatctcggaactgtctctcctccctcgtttttgtttggattattctccacagctgcatttagagcagaattgtcatgaggtagtgttttcatcataagattagggattcttcattacaagcaagggaacacacttcattcaaggaaggaagtggaacttttctaaggatttgaatccttatctgatcttattctagattcaagctaacaaggaattcaaagatcttgtctctttcaaataaatcatcaagctttgcaacatcatttggtgattccatttcaatatgttgatagttgtcacctcttaccacaataccttacaatgtgttgtagtaggttgtcattgtcgatgctccttttgcatgaatcttgttcatcaactcaaacgctagaccaacatctcccttctttgaataggtatgtgcaacaatatctcaaatctcttaagccatagagagaaaaaagaatgtcttagctatttatggttgcattgaatccagcacctaggacattaccaagagtttttggcttcccatttctcaaagttgtgatccaaagtttttggttcttttactgtcttacacagatttcccatcttcccttgactgcatagaaaaagtttggcagcttgagaccactcaagaaaattattataattgagtttttgggtagtgatttggagagtaggattatcatgatgattggagactttagggactggatttctgatttggggtttgtttagccaagttgagaactgaagaagagaaaaaaaggataccaagaaagggaggaaggaggtggagaccctaaaggtaggagaaggaagggtagagatgccaaaaagggaagaaaggtggaatagagacaccagaagaattgtgaattgagccctagaaactgaatctgctctgatacctatgaaccaatccatttacctgatcagaaaatattacacaaatatatacagtagtataaaaggtgttaggattaaaacaccctcatcctattttttggaagcgataataaaccaatgcgaaaaataaagcacaaaaacacacacgagatttagagttgttcactctcaatgtgagagttacatccacttgtagccgctgcacattttcactatgatgaaaagagagtataggattataccaaaatgcctcaccctctaggcttttctctctacatttttctatctctctcaatatcccaaaaaaataaaactctcttaaaattggctaccctaaacataatataaatagggtaataaaatgacatgggtaaaatccccaaaatgcctcaacttaaaatactgttatgattaggataataattaggctccacacatcttaacaatctcccacttggagattaatccatcatcaactgtcttcacttgtaacggctacgacttctcaatccttagtcgagaagtccaactgaagttgcacacaactccagtttctcaattgttacggtttctcaatcagtttctcaactgaagctgtcaacatatcagctggattctgattcccctgaatcttcttgagtgttaaaactctatcttccaaagcttatcttacgaagtgatcccaaacctgtatgtgtgcaaattgttctattttgtatatttttgctattgttttagattaattgtggctcagcaaactatctgttctgtgtgatggttgtctcgtcatgaatttttctgccagtttgatgttttatgatgcatgatagtctgtagaatcagaaattttgacttatctgcaagaacatgcaggaggctgcaaaca

SEQ ID NO: 11753 - DNA, 10051 bp, Vitis vinifera
  Intron number 13 from transcript GSVIVT01028660001 (locus GSVIVG01028660001) derived from phytozome v7.0 (chr-ID chr 7; pos 11770909 to 11780959)
attgtgctgttaatacaagtcctggaacaagtgaggtacgattgttagaaattcatacttttacatgttagttgcattgttttggaagcaacagagtctttataggagttgcaacaagaaattgcaggacttctcataaactctttggcatgaaattaaatactgaaatgaacatgaagccactgttgcctagattgtgagatataatgctattgtaataatcaaaattttaaaagcagaagcagtctaagcatttgaactagtaaccattgagaatgagttgtttagccattggaataggtttccttaaaaactgaattgaattagtgttgggaccgtccaatcttttaagccacttagaccacttgaatgcaatgaggcgttcaggtcaccatatgagaatacagggccagtaaattatttatttattagtttgatagaacaagaagctctgtagctaaataacaacgtttcagatggttaacataaagcgccaagaacaacagttgctcatttaactggttaagctaattctttttctaggaatgattgagaagagaaactaccctgactcataagatgagtctccaataaatgagaggtgtcttgcacaaggatcctttacttttggccttgtcatctatactgactggtacatgtattggacaccctttcaaaactcactctagtttattccatttagagttcactgttttagacacattgtactcttgtcaagaaccaacaaccatatcagggtttatattgcatggggcttaaaaaaagcctggatgttgggttaatttcttgagttagctttgagatccacatctctactcaaagtacttgtcgccatgaattcaaatagatatttgaattgagaattcccgtaagtttcacaaaaactgcttgacgtagcagttccttttgtcattttgtaagacctttgctaatttcagttggcccttctcttgttattggatgttttatctggtcatactcaactcaaacagcaccaattggatgactacatgttacctgagtgacttttcctagagcaagctagttgctttccccattgttgtaaccttttgtaaaaagttagcatctttttaagttctcatttctttgaacttgagctatttataagaatccctatggctgatgaatggccaaaagaacaaagctaattgacactgatatatatggtttcaatcttagaagctaagtattgatactatggtcaataaatacaactatacacacttttgatgggtgcagatgtttaggtgcacaaattcacagcagtttgtcttgggtgcgccttaaaaaattttcaggttcattgtaaaattcttgagctgagaagtggaaaaaccattaaaaaactaagattgttcaccaaatcttcctttaatgggggaacttcattctgttttatagagacccaaggaaataattaatgtacccgtagggctttatgaagtgtggaccacacgtggtgaaacccggcaggcagcccatagtatgacctttgaggcagaagatcaagatattgattcctatgcaagtatacgcaagcacctgcatctttaagctgaagtatccgaatattgactgattgctaactacaaaaaaaattgttggatttggagatcaatatctaaataaaattggcaaatttcttctcagatctccaaaagaacaataaaaggaatatgcagaaaagagcttgaaaaacaacttcttgaataattttcaaaattttcatttactttctctcatccttgtaaatatttgatccgagtatagatactgcattccaacttgtgttgaatgagaaacacttgcctcatatcctactttgcactccattgccaattctaaggattcttaggtggtgaagtttggaatctttgtttttttcaaaaattttcaaggttggatgtctatcccatattcctagctatttcccctctctgttcaagatcccctcttcagtggccagaaaaattgagaaattacaaagggattttctttggtaaagggttagggagagcaagagagaccatcttattagttgggatttagtgtgtaagtctaaggtagaagggggtctagggtttgcaaagatctccctaaggaatcatgctctattaggaaaatggttatggaggctttcctaggaaaattttggtctacaacatcaggttattctaagcatttatgggacgcatactaatgtttgggatgccaacactaatcaagtggtcacatcattgcccatggaaggccattgcataggtctttgggatttcactaggtacactcggtttgtggtgggagatgaggcgagaatcagtttttgggaagacttatgggcggggggatcaaccttagggttctcaattttcaggtttattcagaattgttacaattaaaaagcttcctatctcatcaattcttggatcttcctatcctttctcttggaattttaatttccatcgtaacctatttgattttaagatagaagatctaaaaagactaatgtcctctcttacttgtttgctcttatctccatccactccaaatgcaagagcttggtcttcgtcttcgtcaggtttatttatagtaaagtttttctttgtaattgttcagtcattttgacccagtttctttcctccctactaattttgtttggaaatctcaagtccttcttaaggtcaagtcctttgcttgtttagtgacgcacaagaaaataaacaccaataaaatgttacagttgagaagatcctacaaagcctcagtcttgatgtttgtatgttgtgaatggagtatggagaatctgtagatcacttttgtttacattgtccattgactttggggttgtggcatagattatttagattgactaacctggattgggttcttcttaggagtatttgtgacatgataaccattgcatataagggattgagaagctctaatagaagcttggtactgtgagaaactacttgtctggttttgatcggggttgtgtggttggaaagaaacactaggattttaaggataaggcgagaactttagagattctttgggataccatttatttccttacttccttttgggcttcttgcaccacaacttttaagggcattcccattaatgtggttcaacttgattggttgtcaatgtgtagatccaaaggtgtgggctaacaaggcaaggttgttatgtgtactttacatatggtttatggtacaccacaagtgttttgatttacttagtattttagaggttccaattgtttagttctttgtttttgggaggatttcccattcttcttttgtaattttaaaatccttatttaatatatgtggaaatctatagaatcctttgatcttagggcctggtcagctctaaaggacctatatctagtacatattagttgttaatattagctagtagaattagtcaatcaatatacaagttaggataattgtaacagtcaacttttgacttggataactgtaaattagtgattaggacagttgtaaattggtcgttaacctcttagacactattttatatgtgtattactttttaatcaaaagtaagaattgtttttcccaaccaatatggtatcagtggctggctaaacaaacctccaatcagactttcatagtccctaaagtctccaatcaactcaataatcctactctccaaatcaccatccaaaaactcaatgatcataattttcttgaatggtctcagtcaaccaaactctttctatttaagccgagggaagatggggtatctatgtgagacaataacagagccaaaaacttcagatcttaacttagaatcatgggaagctgaaaactctttaataatattctggttgttgaattcaatgcaaccagaaatggctaagactttcttatttctctctacggcaaaggagatttgggatgatgttacacataactattcaaagtaaggagatgccactcaagcgtttgaattgatgaacaagattcatgcaaccaaacaaagagacttgacagtcacaacatactataatacattaaaggcatgatggcatgaggtggacatttatcaacatattgaaatggaatcaccaaaggatgttgcaaagcttgttgatttatttgaaagacaaaggatctttgaattccttgctagcttgaattcagatcaagtaagaagttgaatccttggaaaagttccccttccttccttgaatgaaaggtgttcccttgtgcatagtgaagaatccagaattagcgtcatgatgaaaacaccatctcatgataattctgctcaaatggtggttgtggagaacaattcaaacacaatcaagggagaggaaaaagatataagatggtgtgactatagcaaaagacccaaacatacaagagagacatgttggaaactgcatggaaggccacaacaagggaacaagaatgtaaaattatccaagcccgacaggagttttcaagttgagatagtatcaggcctcacctttgttgctaatggatccatatcagctgatgagaatctaccttttatgaaggaacaacttgatcttttgtataagatcatgggaaaagcagaggttactcccacttctacttcttgtgcttttgcacaatcaagtacactccataaagctcttacaacctgtattgtatataattctaactcttggatcattgattcaggagctagtgatcaaatgaccaaagaatccaattttttcttgttgtatataccctgttttggcaaacaaaaggtgtaggttgcttcttacttcagttagtggtaaaggaaatgtgcctctttcaccaaagattaccctcacttctatactatatgtcccaaaaatgtcttgtaaccttttgtcaattagcaaacttacaaaaacctgcttcagtaacctttttcccaaattattgtgtttcccaggacctcacttcagggaagatgattggctgtactaaggagagaaatggcctatactacctagacactgaggaagggggaacaatttgggcttatcaaataaaggggaccactgaaagatttcttgaatgttattggctgatgcatacgagagattaggacgtccaagtttcacttaccaacaacggttgtatcctaaactttgtatcaacctagataactctaagttcaagtgtgaagtgtgtgaattggcaaaaaaccattagcttccctgtcctttaagtaataatagaagtgaagttcctttctctattatacatatggatgtgtggggaccttcaaaggtaaattgtctttctggagctaggtggtttattagttttatcaacaattgcagcaggactacttgggtgtatctattaaaggggaaatctgaaactattcccatcttgcaaaaattctacaaaatggtacaaacacaatttggtgtccaagtacgagtgattagatctaataatggaactgagtacttcaatgaaagtctaagtacgtttttcactcaaaatggcattatccacaaatctacatgtgtggatacccctcaacaaaattttgtggttgaacaaaagaatagacatctccttgaagtagcttgagcacttgtgtttgcaagaaatgttccaatgacttttttggggggtattatccttaccacaacctatttaataaattgtatgccttcaaaactcccattgaaaccttgaaaaattatttttcccatataccatggcttgggactctctcttcaaaagtgtttggatgcactgtttttgttcatatcccaagtaaaggcagatctaaacttgatcctagagctactaaatgtatcttcttaggttactctcccactcaaaagggttataaatgcttccatcctccttctcgaaagaaattcgttacaatggatgttaacttctttgaggaccagccttattatcaaaagactaatcttcaggaggagaaattggaaatggaagatcattcccaagactggtccctacctttgcaaatgcctacttaggtgggtgagagaaatggaattcaggaggtgcctaaaaactcagatctacgaaatcgggggaaacctcaagattcagagttgtttgtttactcaagaaactaggctggaacaaggtcaagatcctcttaagcacaatcaatcattgaccctagaaaaaggtacgtctactaattctcttgattctatgattttaaatcctcccaatattgtccaagcggttgatacttatctagacattcagaagcttggaaggagggtggggagatgggttgttggagtcctcacttctcaagacgccttaatgattgggagatgagagaggtggagtcctcacttcttaagacgccttaatgattgggagatgagagaggtggattttttgtttcggaagcttcaacctttggttgttagaagatctgtggagaacactttgagctagagagaaagtaggaatggttgtttttttgttagttccctctaccgttcctacacaggggcttctagtgattctttcccttggtgcattatttggaggtctttggcctccagtgagagtgaatatttttgcttggaaagcgtcttggaatagaattttgactattgaccaattgaaaggaaggggatggaatttttcaaatagatgtttcttatgtaaagaagaagatgaaatcaatgaccatctttttctgttttgtaacaaggttagcatattatggaatctaatattctcccttttcggtgtgcattgggttttgcattccaccatgaggggaaacttgcttgggtggaatggagcttttgtgggtaaaagaagggagaaggcgtggagggctgcccctttatgcctaatgtggactttatggaaggaaaggaatgggagagcattcaacgatgttaaatgggccaaacaagctatcaaattttcttttttgtataattttatgaattgggctagggcatatatagagaatcacattttgtctttggttgactttatagattggttgtttgttaagtaagggattggctcttttgtctttgtgttgtctagttttttgggcatttagtgtatacttcgtgtgcattgttttcttcgtttctaatacatgctcttatttacctatccaaaaaaaaacccttatctacacattcctatagccatcagaaatggtgttaagaattgtttcaaatatcctttgtcaaatttttcatcttatcacaggatgaacaacagctataagacctttactacaaacttggattcaagttcagtcccaaaaaatatacaagaagcacttgttgaccccaagtggaaggaggcaatagatgaagaaatgaaggccatgtataagaatgatatgtgggatatagttgatttacctaaaggaaagcatccgattggatgtaagtgggtgttattatcaagtacaaagcggatggctctatagagaggtataaagcaagattggtcgccaaggggtacactcaaacctataggattgactaccaagagacctttgcacttgttgcaaaggtgaactccatcagaatcctactatctcttgcggcaaatagcgattggtcacttcaacaattcgatgtaaaaaatgcttttcttcatgggaactaggaagaagtctttatggatgtacttcatggattcaaggggcagtttaagaatgggaaggtgtgtaagttgagcaagtcattatatggcttgaaacagttctcaagggcttggtttaaaatattttcttggcccttgtggggtttggatattagcaaagccaaggttactatgcttattgtctatatggataacattatggtcattggggatgattttgaggaaatacaaaatttgaaaggtaaattaggcaaggaatttgaaattaaagacttgggaaatcttaaatatttccttggtattaaagttgtacgattaaaagagggaatatatgtgcctcaaagaaagtacaatcttgatcttcttctagaagaaagcagaaaatcagggtgtaagccttcaaatacacctataaatcataatcataagctaaggataaagttagacggagtaccagttgataaaagagatattaaaggcttgctggcaagttgatatacctatctcatacaaggcttgacattgcatatgttgttggtgttgtgagtcaattcatacatgctcccttagaagatcacttagaagctataataaggatattgagatatctgaaggctactccaagcatgggattgttattctctaaaaacagtcacatacaagtagagaggctcacattgatgctaattatgttggatctataattggcaggagatctacttaagggtattgcaccattgtaggaggcaacttggtgacttggaggagtaaaaaaacttgtagttgctaagtcaaatgttaaggctaaataccaagctatggccctaggtatttgtaaactcatgtggatcaagactttactaaaagaattacaagtagatgttgaagaacccatgaggctatattgcgacaataaggcagccataagcatcgcacataacctaattcaacacgaccgcactaaacatgttgaagtaaatagacgcttcatcaaagaaaaaattgatgacggtctcatttgcactccttttgtctcatctaaattgcagttggctgacatattcacaaaaggagtgtctaatccaagcttgaactcagtgacatgcaagataggaatgaagaatatctttgaaccaacttgaaggggagtgttggagatcaatagaatcctctgatcttagggcctgatcagctctaaggacttatatttggtatatattagtttttaatattagctagtagaattggtcaatcaatgtacaaattaggataacagtcaactattgaataagacgctataaattaggtgtcagcctcttagacacaattatatatgtatactactttttaatcaaaagtaagaattgtttttcccaaccaataatatattacattgttgcttctcataaataaaaaaaaatttcaaggttgggaggtagaaatggtggaagcattccttaagttggtttggagattgttctcagtaaaaacctaattttattttggtatcagcttttagaggtcctttttctagtcaaagtcgttgtgaaaaaccgaagaaaggcttagaggtttgccccgttttggatcacttgttaggagagaagttgaagatttttcgaaggctcaaagcagtgactcaatcattaaaggattcttttagacgaacattgtttctttggtccagattttgtctggaagcaggctgctcatccattctagatttgtggattgggtgggcttgcatcgatgtattcacttttcttgtttcttatcctttgtgtacttcctatgtacttgggttcctccccctttttgatcagcccttctttatcaattgttcgtttgcaaaaaacttacaattgctttaggaaagaaacctcctgcgatctcctgtcttttgaatgcagctagtcattatttatttcaatcttttgttggttaccatgaagaacattttctggttgtgatcttatgcaatgatcattttagcagcaatgaagatgagtcaaatgagaaacggattcctgcaaaaaagaaaaaaagaaaaagaaaacaaccatgtgtgaaccctaagtagcatcgagatgcccatgttttctttccttccctctactttctcgactagcaaacagatcataactagacttacattccaaggttctaagtttccgagtctgtaacctgtctcatcaaaacaaaaccaaacagcagaaccttgaaaactcaaaatgaacgtagaaatctagaccctttccaactataaaaaaaaaaattattgacgtcatttctctttttgtaggtgttgaatttgtgctaatccacttcattgtttcttttgatccaggttatcgttt

SEQ ID NO: 11754 - DNA, 5468 bp, Vitis vinifera
  Intron number 1 from transcript GSVIVT01010300001 (locus G SVIVG01010300001) derived from phytozome v7.0 (chr-ID chr1 ; pos 19206589 to 19212056)
aaggtttaaattttgcttaatttttttttctgggtttttttatttattgttttgatgttactgtgtgttagggtgtgtttgagtagtctgaagaatggaaaatgaaggaaaaatttttatcttttgcttttggtttgtgaaatttttgtggtatcgggttattatttgtgttttcacattcataactggaacagaagtcgttgcatgaaggaaaaatcttaggagagaccatgaaagaaaatttttgaatctatgtatggtcttttgttgttgtttaaggaattttgaaaattgaagccaaatactagtgctaggctaagttaaacggagtttagtattttctcaggccattcaaagtgaagggaaatgtgggagttgggattgaatgattatagtttcttttcttttcctccgtttttttaagcaaccaaacagtgcattaaaattggtattggtttgaggttttcagattttgaagagtatgttttgttgtttacttttaaggcttgtttggtgccgttaaattgttggagaaggaaaaaagttggaattctgaattgttattttttgtatcctggatagggaaaacaaagccttcaatcaacttctgcatcgattacaactattttgtcatgttgatattttgtctattttttatgctttgattttgattctatgtggcaattatcatctgtttatgttagggtgtgtttggtttgtgacataatttgcagtctttaatctatcatttttggtttgtgaaaattttatggtattagggtgattattttgcatttggttggttttctgtgttttatgtggcaatggttttgttttgactttattaaaccaacaaaagtttttgaatgagagaaaaatctgaggtatagaaaatgaaagaaatattttcaaatctatttcttcattctttatttttttgggttatgaagatcaaagtataataataataatattagtgcaagttaaatggatgcttttgtcttctcagttcattcaaaatagtggaactgtgggattgaaaatgtttaggtcctgtttggaaactacttgaaagcagtttttttgttctttagcatggtaaacagtttttttatgttggaaaacatattcagcaaatttctcacaaaaacagttttttgagaatttgttctcaaaacaaactgttttttagaacaaagtttaggtgtttttagttgttttttgcataatgttttgaggaacaattgaaaatatggagaatattttagaaacttttgtattgtacataagtgcatagtattttgttggagaatgagcaaaaaaaaaaaaaagaactatttgtcatatttgaattcgcaaacataattttgttcctgaaaataatcaaaaactatttttacaaactgttatcaaaaaatgttttttgaaaatgtttccaaatgggctcttagtttcttgtcttgttgtccattttctaagcatccaaacagaggattatggtgtggtttgaggtttctggaatttgatgaagtatgcttcatctttcattttaaggtttgtcctattgcagataaattgttgggaaaggaagagttaagattctgaatttggtatttccctttttgttttcctgttattctgggactcagaaacaaaagctttgaatcaactccttcatctaattcaactattgatgcaaatatgtctgccttttttttgggtatcaagtttatgtggccatgatttgatgctgccatgttttagagtgtatttggcgggtaagaaaatctgaggaggagaaaatgaaagaaaacttttgaactctctgatttttccctctttgattttttaaaacttaaagccaaatagtagtgttaggggtaagttaattggtggttgttatttcatgatttcattaaaaaataatgggaaatgtgggattcaaaaacattagttgcatttcttctccttttttgaagcaacaaactggagcattgatgtaatgattggtattggttttggtcttttgaccatgatttgatgttgaaatttgataagtatgtttggttcccaatgaattgttttgggagagagaaaaaatcagaattctgaatctcgtatttttttgttatttgggactgagaagacaactttcaatcaattctagcatctgatacagctatttttgggaattgatgtgagtttatcatttttttttgggaaaacaaagcagcaaaaatgtaagattgaaaatttcttctcttttctttttctcgtttttctcggaaccaaatggagcattattattttatgattagtattttaaagaaggctccagtttcatgagataaaggattatggagccttgttcatgtttataccatccactttaaggtaaatatgcaatcagtggatgctattactgcggaagtaggataaagtggaggaaatcatgtttagttgggtcctaataatttttgttttgtttttcttgcatttctcctgttactgaagcatctacttgggaaggcttctttaggtgctgggggttcatgaatgcaagatattagtgagttctcttgatcattgcatgctgatgtggaatcatttatcatcgagaatgctatataaatatgagaagatgcgattggttgattcctttttgttgtgttacctctccctcatgagaattctttagttatattaatgtctagcccatcctgtcagagagcgcttgcaagctggcatgccaagttcattaggtgaaacagataaatgaatggaggatatcccctttatgtctggtggcttcaaggagctgaattgtagaatttgagggattgcaacttctgaaagcaggcttaaaggatttgtgctgatatcttttttttttacttggacagaggaagttttcttagttaagagattttctttcatagatttcattagtagtatgggctgcttgaggggttgggcatcgtcttattttctttcttatatgttttctatcctgtcaagtcttttcccctctcttgccttttcatgacttgttgtgggtgctgtatggtatacttccatcttgttggttcattcttctgattctttgctgtgatttttatctaattgaaagaggaaaacatcaagctcttgctgtggattttttttttctcttgttaatctccatgtagggtaactatctaagttttggtctataatcttctagtctatatggcttattgacaccttttaatcatcagcggttcatgggtacatgttctagacttcaaccatttcatgggaatcagcttcttaactttcaaaggttgaatcagattgataaaagatcaaggggctctcaactttaaatttccagttaagtgagcaacaggaggactatttgatgtaataagcttcaaacttacaagtcaagttgctgggttctcaagcagtaaaccaccatatccagtctttcagttagtgtattacctagtcattgcattctagtgatgtcagttaagatctggaccagtcaattttacatataattgatatgggataagtatcaatttttttggatcatgaagttccctatatgatcaatcagagccaactaataagcagtttgcacctctagcaccacgtgccttttgtaaaaggtaggttatgacgatcattttgtgatcagctgacccagggatgtaccttcaccataagtccagctagatgcttttttgttgctcttttacaggcattttaggattatgcttctgcatataacatatattagtagtttgccaatgatttaagttattagggatgataatatgattagtatttactgtattttattggtgtaatttgtaacttcttttgcatcacttttccacaaatattttcacatatggatgagtaatgcttttgctcatatcctgtcatattaaatatttcatagtgaaagattgcgaagttagcaaatccttgtttgtgtacaaaggacttccattggttgatatgcccaagcacttccattcatcctgccttgcacaactgcacgagtcacaatggaatgaacataatttaatagcagtaaaagtttagtctcttgagctgttggtatatgtgcatgatggaataaggaatggttccttaatttttaaccttttcaaacagctactcatacaatgctcaagctcaatgctttaatgataatctccctgacctgaggacaccaagctcaatcttaaaaattcagacttggttgcttgacaagcccaacttgagtagctagccttgattacaaacttagatgtagtgagatgctgtaatatacccagaaacttatattaaagaagattttagcaaagggttaacaaacattgcaaaatgcaagaaatggtgaagaattgactaagcatttggagtgtccttcactaatttgtgttggtaaaggctggaatattgaagcaaaatatgttaaagattaggctaatgaactagtgcacttaggcaagctcagccaaaccaacaaaagacaaggttggacggccctagttgaggtaatataaaacttgagtttgaccaagttcaacaaggatgggcttgaacctacccacttaggtcatgtttggaacattggaatagactctgggattgggaaatcacttccatttccattcattaatatatttggatggttttttagaatgagaatgataataaaaaattcattagcatggaaatcagatcccattcccactaggattttgattcctctcttctacatggtattgtgattcacctccattcctcttgtttactggctccataaacctggctctgattgatactctatttagggctgtatcgtatatcatcgaaaaataccttaaatcccttgtatcatatttttcacagatgctgtcaaggacccttacttgctcattgccaaagtgcatgataaaccttctatattatttgtcttatttcctaatggtgcacctcagcttttaaaattgactcctgccctagtcttgctacttttggaaaacatcaaggacattgcgctatcttctttgctattttgtgaaatctccaatcaaggtggctgttggcttgagtcactcggcacatacatacagtcatctcctacagtttatgggaatgtttctttcaccaatgcttgctttgcatgaaggaatgaagcttgatcctgaaaaaggccaattgcatcatttctctgaaagggtgcattttcttgttatctcctcaaattcctgaagttaactctgcatcatgtctgaaatttttattgtttaataaaaacttgcatatttagctttaccatccaacttaccatgatggtagtacctaatttctgcacttttctgacattctaatgttttctgtcttttttttttattattattattttttttgtgtttcagtgaccatttgtggtttggcaaggg

SEQ ID NO: 11755 - DNA, 9166 bp, Vitis vinifera
  Intron number 1 from transcript GSVIVT01012510001 (locus G SVIVG01012510001) derived from phytozome v7.0 (chr-ID chr3 _random; pos 292386 to 301551)
agcaggaacgaatcgtgtcgattttgaaggtaatttaattagttttgattggctttgtccatttaaatttatcctcgggatgcttgataagataatttatagatggatactgaaatttttgttgataaatgttgtggtgatccctgaagtttgcattggatgaaatagtttaggtttcgaaaaggcttgtgtttgtgattttaaagtgtcaaatgttagccacaaattgttgctgagttttattagcagaatgatgaatatatttgttagcaacttggagcttttgggagacaattttaacaccgaatgttttcagtaccatatttttggttgtgcgatccaacggccttagttttgatggtgaacttttaccaaggacaaaactttaaaaaaacttagaagaccggtcaaatgaggagaataatttcaggaatggtttgttttatttttggtttatttgttttatgttttgatcaattctgaataagcagtttgtgtgaaaattttccctggtgtttggtatgtctaacatggttttatagagaaaaaaattgttattggagttagtgtgtatacctgacatcatggaatatagttcttctaatttgatgatgtgcttaccattgatattggcttagtgtgttgggtttcatgaggtccttaccattgtactaggtattaaataccaatataaaggattcactaccatggggaaattggaggctcgattgtttcttttatactttttggcatcctttgtatttctaaaagtgggttgagaaagttttgcaggagtatatatttgaacactcttgtttttaaaaaaagatatataagaagtttgcatttagctatgagcaataagtgaggactgaacttaactaaactgggactaacatggcctaattaccattgctctacccaaaaaatcagctcaccatttgctatatttaaaaaaaaatttgttgaaatattgaccttttatttgatatactgttgaaagtttaaaatattcattatataataaaaatggctaaattgattcaaattttgataagtgaatctggcttttgagacacagccaatgccaatatttgggatggattattattttctttgtaaaaaaattgatctttcaataatttttattgttttcaaatgtctaatattatatacttagaaattaatctgattggtgttttatatttttggttgaccttatgttagcataaaaatttatttttatatttttgatgattgtttaaaataagaaaatcttgaattttttttagcgttttaacagttttactattaaatatgaataaattggcactttggttcctgttgttgattaaacacccaatgttttgggattgtatggaagacatcaaatcacatgtagttgttcaaacacaagatttggcaaatcccatgcacttttgggggaatttgaaatcctatgagttatgtgcttttcaagtcccttgagattttcgtataacagtagttttatgaagagaacattgtttatttagtggaatcccatagttcataaaatttctcgaaattgtgtggaaggaacacttcctacaaagatgtcattgcagttaatcgtttgaaagccctaacagtagtccctttccttaagctgggttgttcagtttgagatatattctttaccttattcttaatggttgttgacaagtgttgtcaaggtctatgataatagtgctgaagaagatgggaaagatatatttcagtatcactagagagaccaatgggggattgttattgtgctagatattttagggccttttgtcattgtatcttaggtaagtattctatgttgtcaagacttatcttgaagcattgtaaatctttggagtcatgcccttattcttaagacgaagaagttccagtaataatatttgttgcccacataagaaagtgtttgtttcaccttttttaattaaaaaaggatgagaaaagagccaactgcagaatgggattaggcaatgtaaaatttgtttttcagttgtccattttctttttattgcagcgtggtttgaacctagagttgtctaatgtcatatttctctttcctctggaggcaatagtttgcatgataatggagatcttttctgaaggtttcctacatttcctgtgatttgtggtatataataatagtggtcgactcaaaattggggccttagcaaatgtttcctcattgactttcagttgaaatggttctccttaaagctgggactaatatgtggaagtatgagatctgcataccaattcaaattagaactgttctaaactttgacttctggttgaatgctgttcaccttggcaatgtgatgaacttatggacatttaaggaagtttaaaaccatgtactgctggttgatgtgaaactctttcaatctctgctctctagtttctttgatccctataagactgtctgctttaggaaaatgttatatgcatacagtgatttatctgtttggtcaatctacatagctcattgttttaatgtgaacctaatattatatgctactgatggccgctttttcttccatatgctcacttaatcactgccaaggataaaatatcgtgtgcaaatcagtgtaagagacaaagaggaacttaatattcttgagagtttgattttaaaacacatacatctatcacatgtgatacttgcctatttgatttagtgttggaacaactaggattgggttgttggccatatataatattaaaacatgcatatattacatgtgatacttgcctatatgatttagtgttggaagcattgggattgtctcattggtcatataatatagtttccatagttaagttttgtatggttgtacaatattatatagatcctaaaattttgctaagattaatttgttttcttgttaactttgttgtttccttgtttaaattctagggtcaaaatttttgttcatgtacaaccttgtatcaaggccttagaatgaatgagaaaagaattattctctcttgtttctctgtaacttcaacatggtataatagcctatctagggttttgggaattttttatttttttaaattattattctagtgtccttcattgccatcacatctcaccccaatagcctttttcactgtcacttttagcactgtatgtgaaggtctttttaaccttattccacgttgatattgatccgtttttatcactcatgtttgaaacatcttagtctgctactttaatcatcatgtcatcctttaaccaagcttctatccgcaaggaaaacccaaccctttgaatcaccttccaagttgaatgggttaaacttgatggagtggtcacaatcagcgaagatatccttgaagagcaagggaaagatgaattatgtgatggggactgcaaatccactagtaagagaatgacccgaaatatgaagtttgagatatagagaattccatgatgatttcatgactcatgatttctccactcaatgcaacctaaatcagtcagatctatttgcttctatttactgctaaagacatttgggaagtagtgtcaaaaacctgtttcttctaaaatatttgagttgaaaagacaagttattaacaccaaacaagggtcctccactgtttcagagtactacaatactctcaaaggattgttgttggaactacatttataccagaacctggagatggaatcatccgcttaaattgaaagaaataatggaaagggagagagtattccaatttttggtaggtcttaatctagagtgtgataaggccagtcgtcaagtaataggcggagaaccattttcatcactggatgaagcatttgcccatgtttgaggagaagagagctgtaaggaactgatggttggaaattttagaaatcctatacctgaaaattcagctttggcagtctctaagcccctttctatcacttgaaattataagggagaaggcaagaggatggtggacaacgagatagtatggtatgctcattgccataaaccaagacatactagagaggtgtattgaaaattgcatagaaacctcaaaatttgaagggagctatcaacaaaggaggacactacatggcaaaatctggacaagtccaccaaacaactattttagaggattctcaagaggctacaatgtttagccaaagcaacattgggaagctaagaaagttgtttaaccagtttgagaaccaaaccttgatctagttccaatttttggttcttgttccatggcttaattagaggttatagctatgctttagttacctacaaaaatgactatttttgggaagatctttggtgggataaccaaactttgtgctctcaatatgctggtctttatagagtcatttatgtgaaaatcctcactgtctcaaatgtctttggcaattcctttccactgtcttggaattttaattttcgtcataatcttactaatacataaattgatctccttcagagaatcatgtcttcctttagttcagtgtttttctcttcttctttgacatattcaagagcttggtctttgtcatcatcagacttgttttcagtgaaattttttttcttggtcttgtcaaaagtctcaaatcctatcttgttccttccggccaagtttttgtggagttcaaaagccccctcaaaggttaaggccctcgcttggttagtagtacatgggaaggtaaacaccaatggcaagttgcaattaagaagaccctacaaatccctctgtcctcaatggtgcattctctgcaaggaaatggagaatcgatcggccacctttttctttgttgtcttgttaccattggactctggcacaagctgttcaatctagcagggttagcttgggtccctccaagaagtattgtggacgtgatggttattgcttttaaaggtttggggaattcattaagaggcaagacactttggcaaattgtttgcctcactttgttatggatggtgtggcaagagagaaacaataggatttttgaggataaggggagaacagaagagatgttatgggacctgcttcttttctattcctctctttgagcctcttgtactgcagcttttagtggagttcctcttagtgttttacaactcaactagactacggtttgtgtttcaaaagtttgagagtgttagggtttttctttgtatttagttttctaaagttgggtgttttttctttcattcattttttgtttttgtgggaaggacctctcatccttctcttgtttcttttctttctcttgtatctcttccttctcttgtatcttttcttcttttaatatatttttctttgtttttgatcaaaaaaaaaaatatgactatctccttaaaaattctctctacatattctccttgtttaagaaaacaaaaaatcaaagtggctgatggatctttttctcacttagaaggaaaaggcactgttcaaatatcaccaatattgtctctaaaatctgtccttcatgttccaaatttatcttataatttgttgtcaataggaaaactcattaaagacataaatcacagtggttgattggtcatgctgaattaaaagatgggctctactacttggatgcaaatttggagaataagagtctagggtctcaatgcttggtttctattagtgattaggaggggaaagatcaagtttgtatatggtgtacatgtttagaacatccttgaacaagttgtttccttccttgtttgaaaacaatggtatagaaaatctccattgtgaaatttttgagcttgctaaacatcttgatgtaacttttcctttgaaaactccaaaatttttatttctatttagtttgatacattttgatgtttagggtccctcttttgttgccaacacttttggttctagatggtttaaaacccttatagatgattgtactcaaattacttggttatacctaatgaaatctaaatatgaggttacatccatttttcctaccttccataaattcattagcacttagttcggggcaacaatacatacaataagatctaacaatggaaaagaatacttaaatcaagacctcatcacatatcttcaaaaggcgggaattcgtcatcattcatctcgttgacatgcctcaacaaaatgggattggataaagcaaaaatcaacatctttttaatgttgctaggtcacttctttttttatatgaaagtcttaaaaatatattggggggaagctattcttactattgcatatttaatatactgaatgccattttgtgttcttaaataccaatctcccatgagtgtttctcatctttgtttcctaatttccaaggttttgggtctctacctttaaaaatattgggtgtgtttgttatgtgcacattcatattctcttgccagggaaatgtgatcctagagctatcaagtgtttgtttttaggctattcattcacccaaatggaatatgaatgttatcatcctccaacaaaagaaaatgtcaccatgggtattatctttgtggaaaatcaagcatactttagggacacctatcttcatggggagagcaaaccaggagaagataggtggtgggagtctagtcagcctttacctataccaagtgtggtatatagccttatgctgaggtgctacttctgatttaggtagaaatactggtcttgattccaattctagtataagtacaaattctggtattggttttggttccaattctagtactagtactggtcctggttctaattctataacaagtatacattctggtactggtactggtactggtactggtcctggttataattctactacccttggttccaattttggtacaagtacaaattctgatgctaatgatgatttgaatttgcctattgccatcaggaaaggagttaggtcttgtacccatcatcctatctctcaaattgtttcttttcaacaattttcacctcagtttcaagcctttctcactcaaatagcctttcatgaagtttcttctaccgtctaagaagctgtcagtttaaagtcatagaggaaggctataatgtggaaatgagagccttagataaaattcaaagttgggagatagtggagctaccgaaaaggaagaaaagtgtgggttgggagtggatcttcaacattaagcataaaactgatggcgccttggagaggtacaaagcaagattggttgctaaggggtctaaatatatgacattgattacctggagactcttgctgtagcaaagatgaatctcattagaatttgagtttaattggcagcaaattttgactggcccttacaacaattcgatgtggaaaatgctttcctccatagagatctagagaaggaagtatacatagatattcttctagggtatgaaaaggagtcatggacaaataaggtttataaactcaaaaaatcactatatggtctcaaacaatctccttgggcatggtttgaaagatttataaaagttatgatgaagagaagtttccatcaatgccaaggtaatcacacgtcatttattaaacactcccatagagggaaaattacagcattaattgtgcatgttgtcattgaaaatgattaagaagaaattgtggggctgaaatcatatttaggtaaagaattcaaaatcttgggtaaagctttggtatttccttgaaattgaggtatctagataaaacaaagattattgaatcttcaatggaagtttatgcaagattcactttaggagacaggtatgcttgggagtaaactagctaacacacctattgaacaaaatcacagactaagagagaaatttgaaagccaactgattgattgaggcaactacaatggatggtggaaaagataatttatttcacacataagatcaaacattgcatttgttgtgcatgtggtaagccactttatgcatgctccacttaaaccccacttagaaattgtataccaaattttgagatatttgaaggcctagtatcttgctttagaagagtagagagttgaagttggaagtctacacagatgcaacttgggctggatatattatggatagacaatcaactactagatattgtactttcatgcaactattggatatcacttagagaagtaagaaacaattagtagtagctcattcaagtgtggaagcagaatttagaggcatgacacaaggtatttgtgaacttctttcgattaagatcatacctagagatctcaagaccaaatttcaagaacctatgatatcgtattgcgacgataaagcaaccatcaacataactcaacccaatccatcatgaccaaaccaagcatgtggaggttgacaaatatttcataagggaaaagctggatagtggtcaagtttgcttaccatatatatgtactactaatcagctgaccaatgttttcacttaaggactcccaagtttgggatttcaatagatgattgacaagctaggaatgcaaaacatctttgcactagcttgatgggggagtgttggaagaattgggattgggttgttgaccatgtaatatagttttcatagtttaattgttgtattcttgtacaatattatgtagattctgaaattttggtatgattaatttgttcccttgttagattctttgtttccttgtttagattcttgagtcaaaagttttgttcatgtatagccttgtatctagaccttagaatgaaaaaagaattatttcctctcctacgtctctctaactccagcatttaggaattgcttcatgtatcttacaatctttgggtatttattcgacagcttgatgttacatatttaattgaaatgctcacttgtttattttggctttatgattatttgtttgtaaaatgcttctttcaggtttttgttatggatgagcagtgataactgctatgttatgattttatttttttgagttttataatgtatcacctttttttaaacaaagatgtctgctcattgcttgcatgacagaaattatgcaggttgattggtttgcattgtttaagagagcttttgaatgcaattgtgtttaatttttgtgttctactacatgtcatagttttattaccagaacattttctgtgtgttgataatttttgtatcaacagtcacagttaggtc

SEQ ID NO: 11756 - DNA, 12697 bp, Vitis vinifera
  Intron number 4 from transcript GSVIVT01015644001 (locus G SVIVG01015644001) derived from phytozome v7.0 (chr-ID chr3 ; pos 14784248 to 14796944 reverse strand)
aatataaattagggtgcagcaagtaactcccatgaaaaaccaattccaaatggtctcatgcaagctcaagatcatgttcccactttagttggttcagtatagaacttaaagctcttgcaagtaactcccaagaaaatgacttttaattgatcttacagaagtaggatcatatgccaccccagtcaagtttggaatggatgtgcccctttttaaagaaaggcattaccccgcctttaggaagaaattttgagggcttttctggatctcacttgtcatagaattagggtctgaagttgcaatttcaggtgcattatatttgcagtcactgttcctttctcacaagaaaggcatctgcagtaccatgttgtaatatgattgcaggaacaattagaagtcatctccctaaaattgcttcagatatcaatgaagcaaacttcagacaaaacactattggtgtgcattggacttttcaaatccccctgttaggtgcgtgcatgtattggatcattttgttaaggaaattggaaaatgaaatcttttattagaatttaatccaaacacaccaagacctaatatttaggaagtaaaactcaaaaacgtttggatgaaaaataacaaaaaagtgtaaagaaacaaatcaaagagatggtgagattatgtgaggtactatttacctcacaggtatacatatgagacaaataaacattaggaaaaagtactttatcgaatgccttccagaatgaaatgttaaaggaaacactgtcgatagaagaaatactgaagagagaacaggacgaagaagtaggtgaaaaaaccttatccatgaagtggctgagatcacctagaacatttgctatatgtgcagtggctcctttgttaagataccattctccatcaatcaggtcattaattgaatgatgagcttattgctttatagtataatctttataaatttatctccatctcataacatttttcctctcataacctaaaatatttatattaatatttccaataattttctaacattttcatactaatatttgagacatcatctaacattttcatgctaatatttttttagacaaaaaaataaattaataacaacatttagtaaataagacaaatacaatggtgccaaaaaaacaaaatagccacaaagcaaaagagaaaaaaaaggggaaaaaaaaagcaaaaaagacttactccatttgctaagtaataaatcaatcaacaaaatttatcatagacaatgaagtctcatctataagctttcttgtactttctcgcctagagtaatagggtagaaaaaaaattagaggttgggagcttggtccattggatccacactttcaaataatttgctttctctcctttcaaaatgtccaaattaagcacaaaagtcgcagccctccatgcctttgtttacttcttccctgcaaaagttctataccaatttaaaagatcaatctctcatacaagagaaggcaacaactactttctgcccaacaaagagaatatgagttttcataagaatattggtttaatacattgaatgagattgtgataaaatgatttttcttcatattttaaaagataaaacttattctaattaaggtcccttgtcttttttttttgcttttttttttttttactgatccaaggtcacgatcttcccacaagctatttcctaattgacgaaccctattttcatctaaacctaagaattccaagctatttattatgaaaactccattttgccttaaaactcaaaaaaagaatacgaggatttgattgagaattttttgctctttgaatctatcccaactacctttttctcactatcccttcaaattgatctcccttgcaagaccaaaataaatgtctttgatacttttcccaactttcgatcatggaattatttcaagcaacaaattcttcaacatctccacataactgaaatccaggaatcatttgagttggttatggcatatagtgagaaaaaataagtgctcaaagctgaatcaccacaccacatatccttctaatactccgcaataaaacaagttatatttttaaaatatcctacccgtcccaattgccttctataaccctacttcaaactcatccttcaccttacatgaatacgaacagccaacttcttcctagacttcctaataataactcatttccatatgggctctatttttgaagtaaactaccagctccactcactaggaagagtcttgctaaggaaaaatatgtttgattctgagtctatcttccttcttttcatgcaagcaatcgactattttctcaagtaaaaactttttctcaagggcttctcattttcaaagaaaacctctttgaatttttccaagtctcaactttcctttcttggaatttcaaactatgacataagtaaattagcatgctagataagaatttttgtttatgcattgctagcttttgtgaaatctatcttgcagcacacaagatttatccctaaacaactaggataaagtgaaagaaggcatcctcctctgatcatgaaaagacagctataagcccttgaatcctctatccataaagaattgaaggacatcccattgatactaggtccctaatcccctagattagataagagactttgaaaggaattagacacctccttaatttcaacatcctctatgagccaaaaaccattcactctttgttctagtcatgtaattgcttcctctatgaacatcagccattttggggaaaattttggtctttttattcgcctccttcaaccaaactctccagacttctgcctatgagaagttttttttttttttttttttttttcccagcatagcagcttattcttccactaccacccttctagcttcatcctcttcaacaaagtgagtagcttacctctcctttcaattcaaaaaacatcaattccttccgaactacgacactaccaaaaacctctttgttccaagcttttaggtccatctccaaggctttgagtttagaggccagaatatagctaaaaaaacccctcgaagcttcccagcatgtgttttagttctatctcattgcagctcttctcttagttgtagtttacttatgaataatgcatgaaaaaattgttcctcaaaggtcctatccagcccttgtctatatgttctattaaaagactctttataccagagtgtgaaagctaatttgtttgcatgtaagagttcattcttgcaggctaggttttggagatgattccatctataagttaaaagatcaaaaatgatggtggacttgtgctaccagtacagccaactacattgactgaagtaatgtgatctttttccagtacatattcttctgattaacctaaggttactaaggttcattatacatacaaaagactagtagtgacacaagccatgtctcggcaagcacttatgtaggaaacaattcagttctccattaagaggtccattaaaagaagaaattaccgataaccttaaccttttcttaatgtaataaacaaattttaggcatacaaccaaaaaactcaattctctattcaaaacttcaaaaaaattcaataaaccttgctatgatgtcgtagacaattttcacgtcctcaataacatacaacatttacaataaaaaacaaacctcatatttagatgggctattacaatttcctatagaaaatttgaacaagaatatcaaaagagagtacaaattaagaaaataatattggaagatacacatgtgatcactttgacattgatctaatctgttgggacaaaagataagtctctaacagctacaggtcttgatgtacacttgttatggaactaactatgacttccttgacaatgtcaaagcgtatgtacaagtagttagtttgcatgcaatctttgcaagtgtcagtctgatactctaacaaatggtagcagtaaagacaagtcttaaaaagtggtcaacataagcaagcttgatgttttatgaaataacatttgtctggggggcattttatgttggcaagttcatctgacttagttggtgtacttggtttgggatgaaataggatcaccaaaagagctagacctccaatccccaagggaaaaaggttatgtctccaagatcagtcattacaaatttctgtaaagagatgagatgcatgatgaaaactggaagggctcaatgtttgatccatggtgaagtaagtggtgtttgtggaagtgcccatcaagaactatagaagggttaacaactaaattaaggtttctgtagaattgaggcctggagggatatatattcatctgcatccggacaaaatattttcatccaaggatgagctagggcaaacatcaatgttattttaattcaaaggaaggtcttgaaattcaaatcatgcatggaagacatcatccaggaaatacaagttgtgggttaatcagacaaatgaacagaaatgcaaaaggagtatatagtatgtttgatagaaaaatagcctttggcttacaacctttgtcttgtggtctactggtaagggggctaacaagatggataacttgtaggtacaaggtgaaggatcaacaaaaagggtgatagcagagagcccccacagattactaatcattgttcagaatgatcattttatttttaaggtaattttaaggaatgttaaatagaaaatatttttatttctattatagactcaaaatattgtacaatcatagtttgaactgaacaactgcaaatatttttatccccaagcataagcatttaaatcatataaattacatgtaatgccatctaaatttaatcatattcttctacactacattatctttggtgagatagatgaaaagtgaatgccactatatagattgaactcatttatgtacttggtctcactaaaaaagcattatgcacaaatcaattatgtgaatattcaatgtaattaattaaattttttgggtaagtgaaataagaattaagcaaagcataatttctctccttcaatgagtaattaaaaataataataaataaaatcagataaattggaaattatgactaggagaagacaaaattttatttagaattaatataatccaaattgaaaatgtgaacatggaaccaaattataacatctcatgagactcatcagtttaaagaataaaagcagtaggagccataacatgaagacatggaaattagcagacaccttaaagcacagcatgggcagtacccatgttcaataaaatgatacaatattaaagacaatacagatcataaggggtggcccccaggttccacaatgaataagattagcacttttagtagaaaattaataggccagaaaaaacttcttaataggccacaatgaatactcccttttagacaaacaattgtggtggcatgcctaattcttgtgacattttttcaaataacttctttatgaaatcttagataattgtcacaagtggctactgcatcaactaattctcatgccaaagtagtgttagaaagttaaatttgatttaagaagtttctaagagctaaaattagatttatttttagttaaaaagaacattttatttttagtggttgatttggtttttatatttaagtagttgaatcataaaaggtttttatttttatattcttattattaggagtttttattttgttaaacgtgagtatatataaataaaaggttatgtaacattcaaacagaagtggtagaaggcggtaaatttgtaattctccttgattttttatcttcctttatgtaattgtctgtttttctctttcaaccctattacttcaagagactggtatcagtcatacaaaaaagatcgcaagtggaatatatccgtttcaattccccaactcataaaaaaacatttaagataattagagtatcaagatgaaagttttgtttggtttacaagatgtatgggaggttgtggagaaaagttacaaagagtcatcaaatgaaaccactctatccccaaatcaaatggattttttgaaaaatataagaaagagaggcaagaaagctctcaccatcatctatgaagcaatggataaagttacttctaagaagattttaagtacaagcatctccaaagaagcaagagagatattacaaaatatagttgataaggtgtgaaagtttgtgctcaaactgttaaaggagaacgtaaaggtttgtacatgaaagtatcataattaatctccaattaccttttctaaagtattgactattgtaaatttattaaaaggaaacgacattcgtgtgattgaaaaaataccttaatctttagatttgaagtttgattatatatactattatggccattgaagaatctaaagatttagattctatgaccattgatcaacttataatatcattacaagcctatgaagagagattgaaaaagaagaaccaagaaaaattaaaacaggttctccaagcaaaacttattataaaagagaatgaagtaaattttaataaaagaagtcaaaataatcatggacgtagttgtggatgtggtcaaggcaatagaggaagagatggtttcaattcatcaaacaataaaggaacaaaccaaaactcatatcacttaaaagggagtgaaagatggcacaactcaagacaaatgagacgagaaggtatgataagtcctaaatttaatattataattgtaaaaaaaaaaaaatatgttcataatacttataaataaaaagtgccactaacaataaggaagggcaagccaaccatgttgaaaagaaaaataaagaagaacctactgtattgttggcatattaaagagaaaatgagaagaaaaacacatggtatcttgaaattaaagcaaacaatcatacgtgtggattcaaaaatagatttgtggaatttaatgaattagaaagtgaccatgttacttttggagatgcatccaaaatttcaataaaaggtaaagataaaattttaattcatttgaaaatagaagatatcaatttatctcaaatatttaccatgtgcctaacaagaaaaataatatattaagtttatatcaactcttaataaaagaagtcaataaaagagcatgaagaaaatcttaataaaagaagtcaaaataatagtggacgtggtgtggacgagatcaaggcaatagaggaagagatggtttcaattcatcaaacatgaaggaacaaaccaaaactcatatttatcgagggagaatggaaaatgatgcaactcaagataaaatggaaggtgacagtatgataaatccaaaattcaatgttataactataaaaaaataaggtcattctgcttatgagtatagaagtgccactaacaataaggaaaggaaaatcaactatattgaaaagaaaaatcaacaagaagctattgtattattggcatataaaagagaaagtgaggagaaaaacacatgatatcttgacatcaaagcaaacaatcataagtgtggattcaaaaacatgtttggggaacttaatgaatcagaaagttgccatgtttattttggagatgcatccaaaattttggtaaacggtaaagataaaatcttcattcatttgaaacataaaaaaaatcaatttatctcaaatgtttaccatgtgcgcaacatgaaaaataatatattaagcttaggtcaactcttaaaaaaatgaatataatattcatgtgaaaaatcaaagtctctcaataagaaatcagcatgccaatttaattattaatgtgtctatgataaaaaataaaatatgtttattaaacattcaaaatgatgtaaaatatctaaaatcctatgtcaatgattcttctagaattcaatacttaagatttgaaaatctttttttggaggtttaaaattgttgagcaaggaaaatatagtgaaaggattgacctcaatatatcacctgaatcaattatgtgaaggatgctgcttgcttggaaaacatccctaaaaaggtttttcacaggaagcaatgacaagagcaaaagacctcaaagctcattcattagatgtatgcgacccaattcatccaaacacttttggtaagaagaaacatttttttttactttttattaattattttagaagaaaaacatgagtacattttttcaaggaaaaatcttaagtatttaaagcttttaaggaatttaaaacacttgtacaaaaggaaagtgactataatataaagacactgagatgtgataaaggagttaaattgacattaaaagaatttgaagaatattgtgaaaatcatgagatttgttaacctttaacagttccataatctccacaacaaagtgatgtagttgaaagaaaaataaaactattcttgacatgtctcaaagcatattgaaaaataagatgactaaagaattttatgctaaaatggtttatttattaaatcattttcctaattgaagtgtaaggaataaaacatcataacaagcttgaaatgaaagaaagtggagtatttcacgtttgagagtgtttgaaggtattgcatatgctcatgttctagatcaaaagtaacttacatcaaatgacaaaagcgaaaaaatattttcattgattatgactaaagctccaaagactacaagttatacaatccaaacaatggaaatattattattagttgagatatcaagtttaatgaaaatgaaacataaaattagggtgctcaagaagataactacgatattcgtcccctctatgaagaagaagaataaattagagaaagcttgcaagagattgttacccctccatcaacacctccgtcattgaagttccaacaacatcatcttcattgaaaaactcaaacgaaaggacaacacattttggaagtttacaagagatttatgaggtaacaaaaaatcaaaacaatctaatcctcttttgtctttttgcaaattgtaaaccaatatattttgaaaaaactattcaaaataaaagatgaaaagaggttatggacgagaaaataaaaacaataaagacgaatgtcaatgagaaataatacctcttccaaaagggaaaaggcaattagaataagttggatataagacacatagaagaatgtaaaaggagaagtagatagatacaaagaaaaattggtggctaagagtcatgagcttctaaatattataattagatttactttctaaaagtcaaagaaaacattttattttgagtagttgatttagtttctatatttaagtagttgagtactaaaagatttctatattttattaataggagtttctatatttttgctgttacaagtttctgctttgttaagtgtgaatatctacaatgtaatttttgaatacgagtgatgaaagacaacaattgtggtgccatgcctaatttttatgacattttttcaaataacttctctatgaaatcttggataattgtgacaagtggctactccatcaactgattcacatgtgacagtagtagtgtccctttttgcatctatatggtattttaagagtttcaaaaggcaactgaaattttaatagatgcagaaaaggaaccccttcttttgttgttaacagctagcagatcaaagttttctgggtaagcaaagaagtttgtaataagaacaaagacacacagcatgcttaatgccctaaaaagtgtaataagtcagaaaagataaatagtggttgccttagtgtaggagttttggattggcaatacttaacaaaagatcatgtagaagagctttcagcaaaacagctgttatcacatgtatgttttggaatatatctagtaggtttgagctgccaacaaaaacaacatttggaagagcaagcatgaatgattgttaccgaataacggcaaagttgaaggccaaaatcatcccctttgatcagattttctaatttattataaagacagggtttcaaggctacggattgttgatataacagctgaaaggacgactaattgattaccccatttgccatagggatgctgaaggtatttgagctcccaagtactctagatcaagttcatgcaactcttcacaaactaaattttatcaagtcatttgtttattgattctatgaaatatgttggcaatggtgaaaaggaggctgtacattagatatattctcaaaagattttcttgatgccatcactctaaactatgtggatatgctattcaagtttgatggagatgtgagtgagaaatatttttcaaggcaagggagaatgaagtaattttggggtcataatccaaagcattggtttaggagaagaaattaagatgagtaaactagaacagaaaatgaaggtagggtatgcatagtttgggctataatgacatacaagtgatgaagccctttgggataaatattgaaatggaagtcagaggctgtaatgacttaatgactgatcagataacagaagcagccaagtttggcatgattttatggattttgagaatgactttgtgactgatcagataacagaatcagccaatcttggcatgattttctggatttgaggtttcctgcaatagctgtatgcttcaatacaaagtgattgctagaagcttactattaccaagttattttctcaagaactttatgattatttattagaggctgttagcaagctcattaatcatcagttgttagagggctgtacacacatgattttgatggtctatatagtttctcaatacagtttacagaatggaagtactctatgttgctatggtgcttaacttgtctagggaaaattttcccttcaaatttgagttgaacttcttttctgaatctcttcactcatcaactaaacaacaagagtttaggaaagcttcaaacttcctgttaccttcacaaatcttctcggcttttagcacactccggtctatatatacacacaacaaacatgcatgtaattggatatatgcagtacttattgtctgattttgttttggactgatttttcaatgcatttgtggccaaattttgaagctattttcagtatttttcatacatcctagtttcaaagctatccaaggtagtacaatgaagtaatgagatttaatgcaatgaatcccttatggtatgttgtaatctcactgttgagcatttgtagtactttctcttttgtaaggagactacctttacaaaaacaaaagttcatagatcaaaagctgagagaactgtatgtaaatgttcataaatgtacatatcttttctccatgtggtagatcaccttggatgtagaactcctttttcaaaaccctacagtatctaatatggcattgatttcccaagcttttacctctcacagtgctcaaactcagattaggttcatacaaaaataatagatttcttaaaatcaagtcaaacccaagctaatcatgggaccaattcaatgaacctgtctattttccaaaacctaatattgaattgtaaacaaatctatagctatatgaacttaggcctatgaaaaatattggaattaatgactccaacagatcatcaaacaaattccatgcccaaatcaaattatatatacatatgaatcaatgcagaatatgttattaaaaacatggtcattgtgattttagcttagccaactaattattctgtgacatccacccaacaaaggatgctcttttaagctccatctgtctccctaatccctcttattccttacaaaatcatcttaatgattgtcagtaggaagaaaaccagcaccttgtcaaaatgaaggacaatacacaaaacacaaagatgatagttagaaaaaaaaaaaaaaaaaaccatatcttcagtctaggataattagatatatgcctaatttaattaaaagcaggaagaaacctcgattattgattatgattaattattaaggaatattaattcatagctcatacttcattagagtatcatatctaatagtactacagtacatgcatgtgattcacaaatcatatgttatcacatgcttacaattggcaagaaagagaaccactgtaaggaaactgaaagatctgaaaaagtttgagccttcaaatgaaaccaagaacaatggatcaaacactgccctaagctaaataatatttcacagaaaacgtaccatgtatagttctttttcaatgtgtatatctaggaaagaaaattatacattattatttctaggttgtaaagctttgattgctccaatcgagtggggaaaaaaaatgcttctgaggttaaattttcttctcttttctgtcaggtgatcttgggaaccagctgagaaaatgatatataaaacatgaggggaaattaagctaagcagaagacaatcaggatagcacaatcaccataacaagcagctacatcatagagaatgatgttgaacttaattttttattcgtaacacataactcagtgcaaaatagtagaatactctccactctgagaaaataattcacacagtactatgcatttgggagggtatccatttgtttattagatttgggagggtctgagcttgattaaaaaaaaatgctaataaataaagaaaaggtactaggattgcctgcaaaatgcactgagattcatacatctatgtataaaaagaaggaatgggagagatgagaaaactaaccttgagcttgaatactcaaagagctt

SEQ ID NO: 11757 - DNA, 8012 bp, Vitis vinifera
  Intron number 6 from transcript GSVIVT01028444001 (locus G SVIVG01028444001) derived from phytozome v7.0 (chr-ID chr7 ; pos 7632544 to 7640555 reverse strand)
cccctgttcctttcattgtgagtggatcattttctttgttttatttgtgtttaattaattgcatgtaatggtatcattgtgaacttgttcttttcatatacacaatgcaccattcttggatttattgtgtatttccacccgttagcaaaagttatataggcctatcttggtgaggcaaaaacttgattgtaggcaatcttgctttgcatggtagtttaacaagcttattctgtaatgggcaacttatttcttgaatttctttctaaaacctcaaaaacatcaatatatcaccaatgatgacaacatcttccttgattttagttatgcaaatttgaggaagtcatctcatttatttttgtaataaattcatctcattttattgaatgaattataaactccttatcaagaatgataagcaccaaaattgaactctaaaactaacaaaggatcataggtttttatttatttattttattttttattttttttgagacacaaacaaaaacaccttcaatcaataaatgatgaatacaagaaagatgagtaatccttcagagatgtacaaaagttaaataaaagcatcttaggttcatctaacccactgtaataattttaagataattaaatgaggcattttccaaattaaataaagagtttgaatttgagggatctttctttgattggagatctatttacatggagcagaggcctaaattcttagttgtgctcaagctagaccatttcttggtttcaaaagagtgggaggaccatttttcgagcccgtctcagtttgttcttcctaagtcagttttttatcattgtcctatcctcgttaagggaggaggggtaaaaaagggcaaaacgccattcaaatttaataatatgtggcttcaagttcatgggttcaaagacctcattagaagttggtagatgggatatgaagttagcgaatctagtatagtcattgccttatagtgaagtttaaggctcttaaaaagaatcttaaggtgctgaacaaagaagaccttaagaatgttatgtttaggaatgaggatgctctttctcaaattgattattcggagtcttaaggagagagtgtttcctctctcggttgatgaggtggagtctagaagggtggctttagaggagtatagaaagtggggcttcaatggaagaaactttaatggaagcaaaaatctagggaaatttagttaatggagggagataggaatacaagtttcttcacaaaatggctaatgtgtgcagcagaagaaacttgctaagcaaagtaagttattggtgctagtttgtctaaggagagtgagattaaggatgggtgcgcaaagcttttcactttcttatttttgagttgggagattggagatcgagcataaggggtttgagtttttaggttttgagggatagtttcaagagtgtagaaatctggaaggtacaattgtcctgctagttgtaccacatacaattgtttcctattctaattttattttatgattttatgagagattttatcctaaaatcaaggattttttttttctaaggcaaatgaccttagtcattcatgtataaatatcgatgtaagaaacactttggaagtagagtgaaaaataagagaagtattttttttttccccctcaaatttcttcatggtatcagagctaattttgaaccattcaatctgtctatgattaaatacggaatgatcaccaagaaggactcttcaaccttagaaaccacctccactcaagaaacgtttacctaatatccgtgaagttacctcagaagtgtgtcaagaagaaaatagaaagaaagttatgttagggtcacaaaccaaccaacctatcatcaagggctcagcccgagcagctcaggatcctcccaatccttctaacaacaatcgaccaagaaaagggattcttagctgaaaagggtaattttcttgttgcccaaaaagaaaaaaaagaaaaaaaaataaaaattgagtccttggattgttgactcaggaacttctgatcacatgactggtgatgctacaatttttccaaaactatacaccttgttcacgggattatatggttcatatagctaatggttctctctcaaaggtggctagtacaggttttgttgtcatctctaaggacctaactcttgactttgttcttttggttccaaacttagattgcaattttttgtccattagtaaacttactcaagaaaagaactatgttactaaatttttcccaaaccatcgtatctttcaggatttgaattttgggaagacaattgacaatgcaaaggtttgttgaggactttatattttcaaagtgactgattatattaaaagataacctcaactgacagttggagaaaaacgatctctttttgtctttagttctaataaagatagtgatgttatgttatgacactatcgtctaggacatcctagtttcttgtatcttagaaaacttttttcatcattattcactaaaagttcagatggtttttagtgtgaaatttgtcgattatccaaacatctttgcaaaccctatccaattcaatcatacaaaccatctcatcttttttccatgatacatactgatgtttgggggtcatctaagataaagaacataacatggattagatggtttgtgtcctatgtagatgatcatactagaatttcttggatatttctgatgaagaaaaatcaaaagtgggtcaaattttcaaaaaattttataacttgatctagactcagtttcatgccaaaatacaagtgttgaaaactaacaatgcaagagattattgcaattctattatgggattcttattaaaagaatgtatagttcatcaaagttcttgcattgatactccttaacaatatgggatagtcgagagaaagaatagacacttgttagaagttgtaagggcccttatgcttttttcccatgtcccaaagaatttttggggataaactgtacttattgcaacctatctcataaatagaatttcttcctgtgtcttgaattttcaaactctatgcaaagtctttctcaaatcatatccaaggattcagctcatttcttccattccactgaagttgtttggttgctcagccttttttcacattccccaacaactttggagtaggcttcatcctagggccactaagtgtattttcctaagatactctccaaaccaaaaagactataagtgttactttaccatcacaaaaatgttctacacctccatgtatgtaccattctttgaaaatcagtcctattactccaaaaccgatatttagggtgagaatagaatttagaacattggttttgggaaacaggaaccatgaccaaaccttaaacacttgagtctgttattgttcacaacttcaatcctatttctcctgctccaagtctcccactcgaaactattgaattcataggcactgagacaagtactccccttcgcccaaaccaatctcaaactgttaataacgattagtttattgtctacccaaggaaaaagaagaagtctcaagaagatataaagcaacaaacacatgccaagctagtacatgaaattgaatcgaattcagtccccaaatagacacactcaagtaatattgattctaatcctaatgactcagaagatgatgagctcttgccaattgctaaaaggaaaggagtaagatcttgcacaaatcatccatttataattttatatcctataagaatttttcacctggttatcaggcttttgttactagttttacgaatattcagattcctaataacatctaagaagccctacaaatatttgaatggaagatagccattgaaaaaaaaaatccaagctcttgaaaagaatgggacatgggaacttgctaaactttcaaaagaaaataatctggttgggagtaagtggatcttcacagtcaggtacaaagcaaatgggagtgttgatagatataaagttcgactagttgctaagggatttatgcaatcctatggaattgactattaaaaaacctttgctccaattgccaaattgaatacaatttgtgttctattgtcattagttgttaaccaagattggccttttcatcgtatgaacatcaagaatgctttcttcaatggtgacttatacatggaaattcctttaggtcttgagactaagacaaacattaacaaagtctatagactaaaaaaatcattatatggtcttaagcaatcttctcaagcttggtttgatcgtttcaccaaaggttgtaaagaggtttggttactcccagtgtcagtctgaccacactttatttgtaaaacatactactgagggaaaaactaccattatcattgtttatgaggattatataagcttgactagagatcatgatgaagaaataggcaagcttaagagtcttcttacccatgagttcaaaattaaagacctaaggaatcttaaatattttcttgggatggaaattgttagataaaaaatgggtattgtagtctcccaatgtaagtatgtcctagacttgttgaggagattgggatgctagattgtaaacctgcaaacacacctttgaactacactactaaactaggaacagttaagggaactgctccaatgaataaagggaaatatcaaagacttgtggtgaaactcatttatctctcacacaagaccaaacattgtcttttcagtcagcgtggttagccaattcatgaacaatccaattgaggaacatatgaaagttgtgtatcgtattttgagatatctcaaaatgactccaagaaagggaacacagaagagaaccattgaaattttttcagatgcagactaggttggctacataattgatcgaagatcaacctcaggatattgcacctacgtatgagggaatctggttatttgacgaagcaagaaataatttgttgtagctcagagcaatgcaaaagtagaatttagagctatgacacatggaatttgtgaaagaatgtggttaaagagactcctaaatgagctgaaagtttcagtagaagattctatgaagatgttctgtgacaatcaagttgccataagtatcgctaagaagctggttcatcatgatcgaacaaaacatgtgaaaatagattgccattttattaaggagaaaatagaagaagggatggtttcattggtttatacttcaacaactctccagacaacagatattcttaccaaggtgttttctagagccaacttaaagacttgagatccaagctaggaatgatcaacatttacaacccagcttgagggggagtatggaaatccagaaggtacaactgaaccgccaactataccgcataaaattgtttcctattctaattttatttcctgattttatgagagactttctcctaaaatcaaggattagattttttttttctaaggcagatgaccttagtaattcatatataaatattgatgcaagaatcactttgaaagtagagcaaaaaataaatgaagtagtctttttccctcaaatttcttcaaagagcttagaggagccttttttagaggatgtttttttatgctctctccaatcttagtggggatcaagctctaaggccaaatgattttactatgtctttttggcattcgtgttaggaaatcgttaagtctaaggtcattagtttttttagggagttcttcactcaaggcactttccttagaaacttaaacatcactttattggtattaatcccaaaaaaaatggtacagaagatctaaaaggtttcaaactcattaagtcttataagaggattgtacaagatgttaactaaagtgttagtgaacaaacttaagaaagtgattggaaacatggtttcaggttattgacatgcttttgtagaaggcatatacattctagatgtagttcttatccgttattgctagtgaagccattaacttaagatcaaagagcaataattccaaaattgctagtgaaactaggatcctcatttctatagaatatcttgaccaactcaaaaggaggggtcgactttgctaagaggaattatttgtgaaagatgaggaggaaatgatgaattacttgctcctgtattgttccaaagaaagtatgttgtggtagctgatattttctttctttggagtggtttggttgatgcactcttcagttacaaggaaccttttaggttgacatgactcttttttggagaacaaatggaaaaaagccttgattgtcgcatccttatgcttgttttggattctttagaaagaaaggaacaagacgtcttgtaaagaggttgagtagtcggaccaggcaatcaaagccattttatatgtacttttatgaattaggttagggtgtacatagaggatcacatgatgattattgatagattttatagattgattgagcttcaagtagggattagggttttttgtttatatccttctcgcttacattaagtgtctaccatgtacattgtgtgtattgtgttgcacctccttttaggcacttttaatatattttttcatttgccaatcaaaattaaaaataaaataaaataaactttgtcctctttgctttatgtcctacgtcaatgtgggtggaggattagttaagagggaagctagacctctcaagtgtttactagtgatttcatttttgggtttgtctttcactttgtatttgtactccctttaagagaatgtctctaagaataggaattaataagaaaggaaggacataaaaagacatttaatctcatgacttcaaagtttatgatgtttggaggctaagacatggaaaagtgcatccacatatatgcacatacaactgaaaccccatggagaattcttactgccatagtagatgatagtaaaatagaatcatgacattgagaattaagagcagataaaaagacaactttatcatatattagatagttagaattgaaactctccaatacctcttgaaaaatataaatttacattaaaatacaattaacttaaagaaaatggaattatggatcaaacaacatctgcagatgacaaattgtcctttaatatatcagattcattaagtggattcctcttaactttttgagggagcttgagtgtttgtcgtgttctattcttttcaaatctgactgatagttgtcattatttaattactcaaatactttcctataaaattttccgctaatcactgtttttagattttaaatcttttacttacataatttactactctgattgaatatttaatttagaacttgcatggctactattattgctttagccaaagtaagtttgatgtacatagttggcctgttatataacattttaagtttttggatcatttccatggtactgaagtctcaagtttttctggaactcatgctttggaatcttgctgcttccaacccgtcccacccatttgttgagcccatgtgcaagcaatagaaggctgaacatgaggcgaagtgttaagacttttgcctaggtaggcttgatatgcaaaatatagacagttggatcattacctaaggtcctaaccttttgggtcaaattggtaatgttagttagagttacaaatttggctatgttgcatttcaaacagcagaaacaggtaaaaaaattgcttttttcaacttcttaatcgcattcattggaggtttggatagtgaagcatttttagctaaacttcaaagtacgttaagattttgaaggttgattctaaaaaataatgctaaaaaaattatttggcctatatcttgaaattaaaaataatgtgatggtaatgtgtggcaaagtgacacttctgtagaaaattgaaatatgaggagaggtttttagaaatatgaaactgagacttattttactttcatgtactgttagaagactttgagtgccatgtcctgacaaccatttgtttgtgttatgttgcaggtaggcatacaaaataaaatatccgatttgaagat

SEQ ID NO: 11758 - DNA, 7285 bp, Vitis vinifera
  Intron number 7 from transcript GSVIVT01000383001 (locus G SVIVG01000383001) derived from phytozome v7.0 (chr-ID chr1 7_random; pos 390671 to 397955 reverse strand)
aagctaaagctaaattggaggtatgctttatacccttttgttgttagttgtaccttagaattacatgcaactaaaagtgtgaaggcttagatagctacaagtttgttgggcatttctcacgcaaaagatgatacattaaaaaacacattgagttataaaacatttgtacattaaaagctcttcttccaacagttgaattatttgacagatctttttgtatgcattttcattattggtgagttgaacattaatcttaacatagagaaatgactattatatcatcttaagagttcatctgtggacattttgttctttctcaattttctttgttaatctaaaagcctgggaaatggctaagtcactgtttcactgggacagttctgtggtcctacttaaaggactgtttgggccattgtagtgagatagttgctttggtccatttaacaatttggcataaaatcttgtttgcaatttgatatcccatcataattaactatgttcactatgtttcgtatatgattggaataaattcatttctttcatatatctctctgtttagtgtgtcattttggaatgaaaatagtataaaaattcagaaacacactgaaatccttgggaacaatacataaaacctgcttagatgcaaatgtacaagaatatggctaatcagttatatttcatgtgtgtacatccattcacatcagaaaacactgaatatgagactgggtgctaatgtcaattttagcttctttatataattagcacttaattacaactaaagcatttgtaaatgatatattgaagcaacaaagatgtttcaatcatgtgggatggtaacaatgtgtgccagcaatgagaagcacacatggaattgtctgatttacatgaatgataaagtatccacaatatgaatacacagaacaccatagtacaatgtgttgcatgacaaaatataaaaataaaggtaggaattttgttacttgaatctcaaagacaaagtgcatgaggagtgtggtcacatgggcttagttgaggagattgttttcaaaatggcattattgtatttttatatttcttaacagatgtgcactaaatatttgatgcatgtcgtttggaatctcatactataacgagggattagtgttgaggtttgtcatagattagtttagcagtgagaagaaattggtagatgtggattagtgttgttttaactgttttagtttgttctttaaaaatgagagtgggagaaaagtacaagaaaagaaaccaacagaaagaagatgagagagagaaagatagcataagatttaggcaatcatgctttcaaaacatagtgttaaaagcaagggtactcacaaccattaataaaacctgtgtaaagaaaactcagaacagaccaagaattcttattagcaccctgctgtaatagtgtcgacattttcaggctgtagagatttgggcaataactcgttgcagtaccttgggtaatactcatcccagagatgttagttactacttgccatagttaattctaagtaactactaataattccagcaaagcttataactattaattaaacaagctaagcatacccatttatagtcatataattacaaagaatattcttaataaacccagtttccccctttccacttaacattaatgtttggcttcattctgttcaatgcccaatcaacttcattgtttacattctcaagggcatattagttaagtaggaacatcaaactctcctacaatattcttatgaaatacttaatgattgataaggtttgtgataatcttttactgaaataggcttgtagttcaagaatgttaaaagtcagtaaaagatggtagaatctaacactgaatcagaaccaaatatctatatgacctaactcatacaagaaagaatattgatcgccaaatttcagagtggaaatgagaaaaaagaaaccatgtgatgcttgcttaattggcatgcatcagattctaaatttgtcacttcacttaaaatgtagaattgaagacttaggtttggaaaagaagggtttctagtctcggcccagatcacttgtgagttgatgcatcaatcttttgtgaaacagacatggactgttatatgataaagcacactaacatgacaaattagaaaaaggacactgacatgatgatggcatgataatatgtacaaacaaatgctatttggttatgagatatcaacttttctaatgcagccttcaatctttcttttaacactttaaaaagaattttatgaccaattcctggaatgaaatatgctagaaaggatgagggtagcgattaggtggtttggtgtggagtcaaagtcctttgagatctccattgagaaggtcaatggctgtctgcaggggaaaattgtggagagaggcaggggcttctctagctagattagatttggagagattagtctatctcgtttgctagaaagagtggagttgtgtttccaggaggaagaaagtttcttaggtcttttggtgtgggaggaaggggggaggagattcaggctactgtgctgtagcaatggaactggtagatttatccaatatttagtgttcttagtggagatgaaaagatttggtctggttttcccagaaggcatgggctgcccagggggtggcgcactcttgcagattagctctgtagccttgggatggtctcttcctccaagggtttaggttgtcccttggtggaagatgcaggtagtggagaggtgcaagttggaagctcctttagctgagtcttacacaaacaagactaggaaggctatagttaaggtggggggggctatttgaattcaattaggagtaagggaggttcttttgaggggccaatctttaaagctttgtttgatgggtagatggggggagtttataaccccaacttttgacctgaaaactttaaataagtgggctattttgaattggcagttgaaagaattgtggttatttttgctagggggacctcttattgtgtttgattttgaagattcttgagtcagaatcaatgctttaatagggggttgagaatgtttcagaacaaactttttcatttagatagatgggccctgtagttaggtgcttttggaatggggttcctgcaaaagaggtgtggataagattattaggactcgcattgcatttgtggaaggagctgttcagccttacgggacaggtgtggaggttttgttgtggtggatgaagatatcgctcagaattgaaattgtcaatgggttagatctctaattaaatctgatgggaggaatgttcttagctctttgcagatgattgtgggtttggtttgctctgtagcacagctatggtgggaagttccacccttgatgttgcaagtgattcctaaaggaggcttgtgggggattagggatgatggagctggtatcggttagtcaatgaatttgacaattctcaactaggatgttaaagaggctaatgacaaagataaaagttataaagtccttgatcagattgctaagagtggatttggtttgcttacaagagaaaaatccataatatgttggtggagattgtgagaagtttaggggtgggtaggttatggaatggggtgttgtggatgctaggggtgcagttgggtgtcgtagttttttggaataatagagtattgaagcttgttggcatggaagtgtgtgtattttggatcttttgtcatttaaaaaattgtgaggacgatattatttggatcttcattggggtgtatgggcctattgttgggagggagaggagggcttgtgggcaaacttgggagttataaaagggttgtcagatgatccttgatgtgtaggtggggatttcaatattgttagatttccaaggaaatgaagttgaggggaaagactatttacaatcgtgagatgattttcagagattatcaaggaacttggattccgtgatctttttctgttgggggccccatttacttggtgtggtggtttgaacaatcagttttgtcaaggccagactgttttttggtttcagaagattgagaaatcatttagtgggttgatgtagtgcaccttgcaaaggcctgtttcggatcacttgcctcttttgcgagatggggcagggatgaggagtggcaaaactcctttcacattttgtggcttaaggtaaagggattcaaagtttgctcaagagtcggtggatgaagcttaattttagaagatcttttagtttcattttggcttctaaattgaaagtgttaaaggcaagactgaaggtgtggaacaaagaagtctttggtaatattgttgttcaaaaggatctaattttgaatcaggcgggtttctaggattctaaagagagggaagcaactctcttttgaggaggaggaagccaaaagggtagcaaaagaagattactacaggtgggctcttctaggggaagtctcatggaggcaagagtctagagagatcttgttgaaggaggggcttaagaacaccaagttttttcacaaagtgattaatgcccataaaagaagggattttttggctaagattaaggtgaatgaggagtggctattagaggagatcaatattaagcaaggaatggcttgggcttttcaacaattattgtctgatactagggattagagaccaaacatcattcacatttatttcaagaccttggatcagtaagaggtagtgggcttgtaggggcctttttttagaggtggaagtgtttagtgccttgcatgacttaaatggggagaaaactcttagacttgatggtttttctatggcgatttggccctttaattaggattttgtgaaagatgaggttatgaggttctttagggattttttgattgtgacaagtttggaaggagtttaaatgctatttttctagctttaccccctagagaaaaggagtgtggaggactcaaaagtttttatacccattagtctggtgggtggcttgtatcaatttctagctaaggtcttggcaaagaaaattaaagatgatggtgagaaaagtgatgtctatgtttcaaaatgcttttcctttcgaaagacaaattttagatgcgacactcatatcaaatgaggccatcaattccatgttgaagagggattctagtggagtaatttgtaaattagatattgaaaaggtttgtgaccatgtcaattggactttcttgttaatagttttggaaaaaataggcttcggccaaaaaggattaattcgattagttggtgcatatccataacaaggttcttagtgcttgtcaatgggaccccttttgcattctttcaaagcttgaggaggttgagacaaggggtcctctttctccttatttatttgatctggctatggaggtgttgagttgcctactggagagggctagggaaggggcctactttttgggttttagggtgagacggaggtggggagaggagctagatgtgtctcatcttttgtttgtgggtgatgctttggtcttttctaaggattcttaagattggttagttcacctaagtttgttgctcatgtgatttgaagaattattaaggcttaaaataaacctagatataagtgaattgattctaatttaaggtgttgcagatgagaagatttagaaatggatttaggttgcaaggtgggggagattccatccacttaggtctgcctttaggtgcctttttcagatcaacaatagtatgagatgcagtgggaaaaaggtttcatagaagactgttgctgtgggaaaagcaatatatttctgaaggggggagacttacattgattagaagtacgttgtctggtctgccaaaatattacatgttcttgtttgtaatccctagaaaggttagattaaggttttagaaaatttataaggattttctttgtggaggtgggactttggagaaaaagcctcatttagttagttggtcagttgtttgctttgataagagccttggctttggataagagtctcttttttgaattaggccttccttggtaggtggagttagagatatgtttctgaaggggaagaagcgggttggtactcccgtgaagcaagagatgtttacaaggttggtgtttaaaaagctataagcaagacgtgggatcttttctttagtaggacctcctttgaaataggtaatgattggaggattatattttggaaggatagatggtgtagcggggagcccttgtgtaattcctttccattcttgtatgtttggctttatcaaaggaggcttgggtggcagatttatgggaagatttaagagcgaggagttattggaatctgtgcttctatgtacttaatgattgagagctggaggttgttgagacttttttctcaacattgccagtgaagtcgactagtagggaagaaaacgacaaggtgatttggaaggatgctaaaaagggtctattttcagccaaatttttctatttggtcttggaacccaagaggtcaatcacctttccaacaaacattatttggaatccatgggtcttgcccaaagtgagcttttttgcttggaaagctagttaggggaaagttttgacatcaaattagctataaaaaagagggtgaccattaatgaatagatgttttctttgtaaacttaaaagagagttcctactttattgtaccaaaaaaaggattctacaactattgttctccctatgcagtgtagtttgggtgatcccttcattgataaaagatattctattaagttggcatgactgatttgttgggaagaaaggaagaaggtatggagagttgctcctttttgtgtttttggacaatttgacggaagcaaaattgaagagcttttgaaaacaaagaatagactaatcaaaagttaaaacatttgtttatttgtaatctttcaccttgggttagcgtgtacataagagaagactcaatgcctttgattgattttgtagattgagtggggtcttgttgagagtaagggtggtcatttatgacttctctttcgagatctttcttttaggggtcccatgtatgaatcctgtgtacttttttttattattcatttgtacatacctatctttacctatgaaaaaaaaaaagctaagaaatatgtatgtatgtaacttatgtaattgcatcttccctgttcttgtgctactgcatctttttccatcctaaatgtgatgaaatcttgtttgtgtcttccggttaatgtgcataggttaccagtgacgcattatcaagtctgttggttga

SEQ ID NO: 11759 - DNA, 3773 bp, Vitis vinifera
  Intron number 4 from transcript GSVIVT01012881001 (locus G SVIVG01012881001) derived from phytozome v7.0 (chr-ID chr1 1; pos 6493800 to 6497572 reverse strand)
ctgctgaaggagtagtaagtgacccttttctttggctgcttctgttgtttcttttcaggtatgctattttttttttttaaattctgaggaagccaaacacatgatggcactcgtgcaaacacacagaaaattgcccaataacaaagtgccgcatgaaacactgagcaacccctcatacccactgaaaagttttgagcttgaggcatgttatgtatgcatcttattctggtatcaaatctcaaccatacgtcatcaaccatcagaatcttaatctttatacgttgtgacttgtgtgcattttttcttgaagaatggtaggccactaggttcttttgcactatcttaagatttacgttccttggaccttccctctgttcatagtacttgctactttaaccatttcaatcataattagtttaatcattggcctttattttgcccccatttctgctggaaatgacttaatatctattccttctagtttttgtactcaattcatcttattctcgtgctttttaggctgacatgctgcaacatttagaaatttgaaatttgaggattttatgattgtagttctttttgatagaaaaatgatttattagaaggggcctagcaaaaaaaaggtgcaatccaagtacacaggatgtattcatagttgtgtcataactctcttgttcattcatatagcattagttcttcaaggaatgttctctttgattcatcaatcactgtgcatgtatgaaaagaaaataatgcaaatagttgctcctggatttcttgtagacgtcaatctaacatcagattatttaggtgtcttttggatgcacttcttgttttttattttttcaaaaggaaaacaatggtaacttctgtctaaaatgcaagaactctttgagacttgccttaaaaagattttggattttacgctttgaggtataaacctacctctaatttacaaagtaatttttaaagacatgaggtaggtttatacttttcatataagagttgttatattttacatgaaaattactactattttctttgttttttttttttatagataaacagtcagaatatattagaaaaggctaaaaagccgcatgtatacagggggtatacacaaatgcccaaaaagacgaactgaacaaaaaagagggaaaacctcacccaccctcaagtgaccgcaagccactccaaaaagcctaaaagagaataggtatcctcaccaatatacaccctagcccaactccacaaattacatacaaaaaaattcttgaatttttgtatatctaaagacccccccctaaaagctaacctattcctttccttccaaaccgtccaaaaaatgcacaacgaaatggaattccaggtgtcttttctttttttccccacaaaagaacccctctaactaagtaacacttctataactgattctgggaacacccattggactccaaaaatggcgagagcgatctcccaaagagtcttaaccactgtacaatgtaacataatatgattcgcattttcctcttcacatccacacagaaaacaccggttagggagctgccgcccccttctttgaagcttatccaaggtgaggatcttcccccacgaagcttcctaagcaagaaaagatacttttgttggcaccttattcatccaaatgcgtctgttcgggaagacacaggctgaggacccaaccaacattttgtaagcacccttagccccgaaaacaccattgctttcccttttccatcttacagcatcctcctcagtcgaagtcctgaaatccttcagcagattcagcatatttcctatctgttccagctcccaatcattgaaatctctagccaatctgagattccaacctccttgacccaggctagagtcccacacttcacttactttggcattcctatgacccgccaaagtaaacagctgagggaaaatttgagaaagggcctcattaccgcaccacttatccatccaaaacaaaattctggtccccttgcctaccttaaacacaatactctcccagcaccaatcagcttccttcatgatctccttccacagtcccactccataaggcccacaaacgtccttagtcctccacccacacccctcttgaccatatttcacccctatcacccttttccatagattctccttctcataggcgtatctccacacccatttgcccagcaaggctttgttcaatacatctatttttcggatgcctaatcctccctcctccttagggctacaaaccaccttccacttaattaagtgagctttcctctccaaacttcctcccccccaaaggaaatctctttggattttctcaatcctttttgtaacagatttagggatgcgtaaaagggatagaaactactattttctttgtttaaaaacaataaaacatgaagtgtatccaaaaaagcacttatttttgtaattttattacattttccacattagttattttctcacagctttttttattttattttaaagcttccttacatggttataacttttcattagtatttttcctagtcttgtcaattggaatgtacaactgagcacattccttacgttgtgctcttgtgaaaattttatgagtggcggtcttgtgagttcatccctccttccactctaccctagtaataatggattccagtgtttcacctgtacttcctataaaatcattatatccatatcttttaattggaggtggaatttatgccaggtcactaattgtggatgtgtagattggacacctcttcctttaacatagtattgtagatgtcaccaacacataaatgctcaactaacttatctataatcagtgcaaaatagatatgactcaatctgaacttctgctgtaagcttctatgattggtttcttacctacaaagcttttcaacctagttttaggttcatactgcctatctttactcatgtattacccaaatacctcttcttctttaaagcccttccatattaattattccccatcagaactaagaaattattgttttgtttttttgattggggaattccaaaagtgtcaagtctattagaactttagctttgataatttataggtcgagtagtggaataaaagttaagagatatatgcaggtttaattatttgaccccaactttgagtgtttctgcctgctgttggaggatgcatgtaattaagatagttgtttttgcttctccctgtttttatcagacttagtggaacaagcttaatattaatgagggtgataactgaaagtaagctatggcctatcacctggaaaaaaaaagaaaaaaaagaaaaaaagtaagttctgaaaataaaggaatgttgaagaaagacaatttgaagttaaagatagagagagatgcaaactccataactaagtcaaaatagagatatatgattaataccatgttgaataagtatagatgtctgtacccaagtgatgaatgtatccagttgtggaaatcaaggtttaatcgacctagttaatattaaaagggcctggcttagattaccttagtgagagaatagttagaaccaaattactaataggaagcaggtaaactttctcattaaagaagaattatgttcaacccgttcatattgattatccaatatgctcatttctgtccttttcctgaattaatggctttggcagttgctttgagagagattgtaatgacatgaaatgttcgataattcttttgtgcacaggtaaatacagaaagggctatacgcc

SEQ ID NO: 11760 - DNA, 3103 bp, Vitis vinifera
  Intron number 3 from transcript GSVIVT01009599001 (locus G SVIVG01009599001) derived from phytozome v7.0 (chr-ID chr1 8; pos 9758777 to 9761879)
agtagaatttgaggtcgctaagagacttatttcaaaaaacctagtactatgaaatgtgaaataaaaataaatttcatagcataagtttagtattattttaaaatagttactaatgtctgtcctttaatattgtcttagcttgaatttaatgaaaaatattttcgacacttattttgtgtggacaagtaatgacccaatttcttgttatgtttcttcattcttccatgaaagagaatttagaagaaaaagtggcatatagcattacaattgaaaaattaataagcatgtactccatatgcatagtagacttaatgagtttccaagttgattaattggtatctccttttgatagatttcagccacctttttgtacatgattaaagtagtaatggagactaaaattacaactcccatttcattgtaaaaagttgggatgtgcaaggtgggtcagttcaattttgggcattaaaatcaaatcgaattgaacccaaaagaggaaaatgattagtttgacttgattaacaataatctaagttggtttattttgcttctatttataacatcaatttttttttttaatttgaacgaaaataatattattgaagcaagtcatctttggacggttgaaatgatattattacaactaatttcaaatcatattattataacttaatgatgtgaataggtattattgtaacccatgtcaatcatatcaaatagtccaagtcatagataaaagttataaaggtgtgattgggagttccatccaatgtgaaaaatgtatacccaattaatgatgtaaccaattgttatactgtatattattactgtgtgtataactttcaattcaattcagtttggttcattaatttttttaataggtaattgaattggtataacttggttttatatttaaaaaaccaaatttattaaaaaataaaatcttaaaaaattaatagatttgggtcaatttcattgattttgccaattgtacaccctaaaagaagggatgtccacttatcatccataaactttgtgtactcctaagttacaattttgccccatgtgattcacatttgtacttattatactcaattttccgtacaaatgatttattattttgcagaattttactccatgagattcacatttgtacttattattaccaactttgtctgctcttaagttacaatttctcctaattagattcacatgcgttactgccataattgactttccacatttatgcatgaattattatgtcaatagatgcattatcattttgtcaagttaatctgacttaggttaatcaccaaaggcaaggtgaattaattgactcaattttaataaattttaatttaactaagtgcaagtaataataataaaacagttaaaaaatacataattaaataactaaaaagaagagataacaggtacaaactccgatttatattttgctcaatcccatactctcctcaagctctcaaatgcaaattgagggttccactagcttttaagacttcaatcaaatcttaatcctttacacttggattctcaatttcaatgatctttttacactttaattcaagaaattcctcactcttgaacatactcaaaggtaacacttgaacaacattgatctcacaaaattttatttacaaataatataaatgaaaacttaaatggtttttcttggctaggatttctaagttaataaggatttttgcattaaaaagaaatagttaaaatcaattgggttttgtaagattttgatatatatcttagtttgcgagttttttgggattctattataatcttattgttttatcctaaaattgtcaaaaaaagaaatcagtaatttagtatggcaattttactccaaagattattgattaaaaattattttactaataccaacgtgtaagagttaaaggcataaaattgaaattaaagtaagtttattattttggatttggttaagtaatgacaagattaataattgaaattaatgtaaaaagaagtgtaaaaactttaaaagtttaaaatatcatttcattattaattagtttccacttgccaacatagacttctcattctattcaaacaagttttttgtacttttatatatatatatatatatatttcataaacttaacaaaggatacaaacaacaaaagaaaaaaaaaattgagctactaaacctcaatataaatttggggtgaattatcaaggtctattaaggagcatggggaagtgttgtatcacatatcgatgtgaagaaggtgtatatatatttatagtataggacctaagatgtgaacgtttcttttaaagttaggtaaacatttctttcaaaattaatggaatctcactatgatttatatacacatgctttcagtgtccatagaggttgaaataatacgatgatttttaacttatatcttgctttttatatgtgatttaatattgttttggattattgattatgactcatgaattatcatgcatggaactaatcaaaatgatataattaaattatattaatgaatttgagatagacatgacaattattaatttaaaatatcttatatgaacataaaattttaaatatagactcataatttatatatattaatataataaagttgaaaaactacgtttatctcaaatttatgcctagggcccaaattttgctgagagccagccggatgtcatcacatgcaagaaagctaggaaacaaagctaaagtttgcttcttgtgtgggaagaggtacttccgtgcttgactgaaagaaaggattttctacaagaaaaattgtccccttgtttgtaaagcctcaagttgcgacagcaataacgacaaaagtaggccaaagaatttgtcattattatgagactagagaggttttactgagaagttttccgagcgtgatatcagcattcgctgtatcacagtgatacaacaaatggtttgaacacagtgatctagaacccattagctcaaatttcattgatctgaacacgatgatcctcatccgcagaccattttagggaatgattaattcgagcgattttttaactgcctgtacgaagaactttatca

SEQ ID NO: 11761 - DNA, 2486 bp, Vitis vinifera
  Intron number 2 from transcript GSVIVT01028482001 (locus G SVIVG01028482001) derived from phytozome v7.0 (chr-ID chr7 ; pos 8169328 to 8171813)
catcttctatacctattggaggaacccagggtacaagatgtaagtgctatttattcttgcacttagctttagttttctggagcagggtaaagtacctttggcttatgcttctctggcttattctttctaatatttgcactttttcatttgtctttaaattattttaatattgtgttatattataatcctgaatgatgcaaggtcatcagtatgtagtaccattaggcaaaatgttattcttctgatgcaaaggtaaaatgcaggtgatgatccaaaaacttctgagtatgcatactttaagaaattgaagaaagatgcaagcaaaagtttctgtccactgcctgaagaggatgatcaattgaagaaattcaaatcaattaactgtagtagaggtagggtcaagcagtaatgcttcttcgttgttgtgtaggcgttacgccataatgcttcttgattgttatgtcggtattgagcagtactgtttattaatttttatgtaggtaggtattgggtggtactggttcttaattgttatgtgggtgttaccaaaatttctcatagttgctgaagtttttatttagtacatgtcacatgatccaatttggaatcattaagactaacattttacttttataacatgcagagacaaagaacatggtaaaagacagcagtaaggacctcaagtcctcattgcacattaaacaatttacacctgttaacttcaattcattcctctcaccacatggaggtgcatcaaagaattcaggtatgcactgtattagggcatttaagaatattctgaacactacacttgtcattaaatggctcaattcattcctctcaccatttgggggtgcttcaaagaactcaggtgtgcactgtactgggtcatgtaagaatattttgaacactgctcttttgattagatggctctttctcacacacacacacgcacaaaagagatgcctattattaaagaaaaaggaaggggatatgtaaaagaaacaatagtagctattttttatgccatgttacatgcatcttccctataattaaataaattttcttccctctaatatattctgagtctttttctatcttatttttatcatgaaaatttttaatcgtgtaccaataaccaaatgaagggtgctcattacacatgtctagatgcattgtatgattgtaaaattggcaacaacatggcagatataagttcaattttaccatcctgagaccttgtttaatcacatgttggctggtgttgctaagtcgaacaaatctcttccgatgcttaacaagaggtacaaagtgttgatgtcatcttctgtttaggttttttcagttaagtttgccatgacaattgatttttctgttgcacatacaatatgacacttgtgtgaggcaaccatcttctttgtttctcttgtacatctgttttcatataaaatttgtggtcccctcttggtcatctcccaataactatgaataagtgaatctattccccacttagctatcagcatgtcagacatggtgagatatacatgtcaactaacgtccagcacatatttcttgtttgggcacttacagaagtatccttctttatttactctagaacatatatgtagaagaatgagtgaattatgcccttatgtgttggaatctattttaaagtcatcagtttctttaccattttagtctctgaagtctgtacatatgcatatgcaaactcaagcaaagataagtaaacacaaacaaacaagcacaactacacagactaacttgtaaagtcagaaatgcacagatatggctctgtacccatgtccagatgaggtgcctaaccctgtccagcttgttagatcagttggtagattgaaattaaggttccataattttcaaaatttttcccaattctgtctagagtatgacatgagactagattatgaaatttctcacttcctcgaatgtggattacctatagaatcaaatttatactcttgattctacttctgcaagtaatggcatttgacgaatttgtagatgtagatttgaagggagctagcacactgttgggtgatacatgcagcatactaaaaaacacaggggaatgtagtaatgcatccaaaactaggggtatatttatactaagccctaatcattctcaaagatgctccattttgtggccaagaagatggaggtgaaaaaagatatatggaagtttacaaagggtttttatgagattgaagatgttcttcttttccccatcttcttggctgccaaaaatagaactaatttttgtatattagtgtggatatgtaaatcttctgaaattatttatcatttccaaatctcaaaattgatgttgctggcagatgcattttttagcatcaatctaaccatgtaggtgtctccacttaaaaattttaaagaattctttgtgaaaccaaagtaaattattttcaaatcctcaggaacccagtgcatag

SEQ ID NO: 11762 - DNA, 4649 bp, Vitis vinifera
  Intron number 1 from transcript GSVIVT01001111001 (locus G SVIVG01001111001) derived from phytozome v7.0 (chr-ID chr1 ; pos 22697099 to 22701747 reverse strand)
ctgctggagcaattgttgttggatttcctatattggtatgaatttcatcttctaatgacttattccagtttaattttatctgcatggcttgcatgtctacgttaaacctttgcactgcagtctttaatttgaatgacttggcaaggtgcttaattggcaccttgtaaggcttaaaaacctttttttaagtcaaggtgggatctcacaatcaacaaactctcccatccaattgaggatcgattttgatgtcatttgtaacaatttattcctcatgtatagctattgtgcactttaagcataaagtgcacacagccttaaaacacattcacatagttaagagaagtctattatatataaaagtgttaggaacttcccttcctaatccatgtgagatgcatttcatatgtagcggacttgtttttatatgtaatggactcctattagccatttggatacattttgatgttgtgcaaactttgggcccaaagaggagaatatctatatatatgagataactggttttgaccactggcctgaccttgacacccagccccagaatcaatagacctcctttttccttgcatctcataaatttagttctgctgaccactgtttcctaaagttcttattcatatatttccaataactgtggaaaaaaaaaaatattcacttatatttctattctgccattgggagtaattatggggctaatttgtttagttcaggttcaagtaaaagcaaagggatggggagggcttgtgggaggttccaggttcaagtcccaatggggacaaaaatttacctaccaaaaaaaaaaaaagttgttttgttctaaataatgtaagctttgtcttggcaaaccttcctctcacgtttgtagtttttccatattgggttaccctattgggtgattttgcttaatagcatagggtctatttggcagtgagaattaaaaaatgaatttactattttttttatccttttttatttatgaagttttatctttttggaaatcatgaaaaatagtactttagcatttcctataaattacttattctcaggaaatatttttgaaagcatttttctaaaatgtgtcattctttctatttttaaaacagaataatctcatcaatccttttttccctatatctgttgtatcttaccagcttctcttcttcaaaaccctttagcttcaaggctttgaaggcgatgctgcattattttcaggatcagaaggaagaattatttttggtaccatggtgaagagatcctaagttgttaggttctcaatacatcaacatggatgcttctagcaatgacattatgtttttggataggaaaatagtaatcattttaacagcaccaataaaagaagggtgctccaaagtacacaggacatacccaaggggtgtcaaccagtaaaaaaaaaaaggagaaaaaaaaatagaacttctctcccattatctagaaaccaaccagttaactagatctagaatagacattgaatttgcatccctaaaccttttagtgcacaacaatagcgtacaaaaatgacaaactagggaaatttatccaattttgcaatgtagatgtaaatgtgtttgagtggaatggatttgaaaggagaaaggtgttggtttgtggtagactcttaagacctttgatctttccatcaaggtggtaagagggaagttaaagggtctcattgtggaaagaggcaaaggcctttctgcttggattaggtttggggaggtgagtttaggtcgtttgctagaaagggtggaagcctgttgcagagagttgctagaaggggtggaagcctgttgtaaagaggaaggagcattgaggtggaacactgtttgggaggatggtgggaggagatttcgtttggagcggtgtgcgaatggagtgaggagatgtatttttttgttcagtggtagctgaggacacaaagaagtactctatgattttcccagaaaggaggggctttcttagaggatggaccattttgattcctttatccattattcttcttttggaggtttttttaataggcaaagaaagatatgtatttataaatagtaaaagaaaatgtacaccatagtacatggggcatatacatcaggtacccaggggtgagaccttgaaattgaagccacaaaaatcaccctctctctcaacaagaacctaatatacaaaatcaaccaaagtcatcgagccatctcttatacatgctaacccaagctgaatggttacaaatgaacgaatgtttcaacttttgatccatttgttccttgtttttcaaatgctctttcgattttgttcctgccaaatagaccaaaacattcagagaggagcgatcctccacaccctcatcctttttcttcctacaaaggcgtcatgccatcttgacaaaagatcttttaccgtgggtaggggcaagcaaattgtgttgaataaggagaacaacaactaccatgtttggtgtagactctagttgttattcttgcctagcaaaaatatggtcaagatggcagactccactaacatccttgcttggtaccaggagggagaatgtggtcaatagattcctcttcaagtttacaaagaaaacatcgattccccaacggccaccctcttttctagagctgatctggcatcaatactttacaccagctagcctcacatgcaaaaaagctcacgtttggagtcttatctagcgtgtttttaagtctgaatgaattgcattgtactgaagcaactagggaatttttgaactaaaaattgtttgttttgagattttttccttggaatcttagggttccctaggtagtccctcctcttatctctaatttaaaatcttgttcttcttctcttactcctctcgagcctaatccttttactgtatcaataatatctcaccatctttcttgtcaacacaacctttagcctgaaggctttaaaggctgtcttgcatttctcccttgtgttaaaaaattcatgggagagagggtaccatcatttgatcacaatgagatataaacaaactgatttttctgcctaccattctcaaccatctccatcttctaggatcaagggcagaattagggtgaaagcttcagaatccttttatgtatgggtcctttctgcttatctatataaattattagaagggaaaaagcaatacaaagaacttatattttacatgcctttggtccggtgtgattgctaacaccacacccccttcctcttgcccttcctgaaaacaataaataaatccaaccataaacgcctgaggaaagttgtgcatccgtacagtgttttcacggttgacagaaaaccaagttttctttgtgttaaagtgaattagtgtgaaaccacatacactccaaatttcttccatgaccaagaagcgccattatatcaacaaaaaattgtctaaagtggccttaaactgttctgaaaaatggttatgcagtgtctcgtacttaagctgtcttaaacaggcttaccatttatgatttggaccataaaactcaattttctttttcacaatcccagaatgaatctggatggttggttgttacatggtgcaattaaccatgttccttcaagactgaccttaggaattcctatagcctataattagccttcacaagatgattttgaaggccttggcatgttccccttttgcatatttcattaacaaaaacagtttttgcattatattaatttcttcactaggttggcaatcaagaataaaacacacttagtttggtggagactcggtaacaatcaagaactggagtctgttagtaagaacatttgtctcaaattttcaagtaatgtcacagacacttttgaggctgaagtaggccacagtatgtggagttagttttctaggaatgggtgcagtatctgcatcatgcatctcctcagtagaaaagtttgattgaaccaagttcataattgatggacccacctaccacatctcagaaagttcaagaaatgcagcctgatgcccttttagggtcccacctgtgacttaatgaatctcacctctgtttcagagatgaggcccatgaattagcttttgattagaaatagaatggatgtaagagcatgggaactgaagcttgaaacaaaatccccattatcatatagattcatgaatgccctagccatttttttaacgcgctcagcatccgtgtaccaacttttatttctcatttttagggcctcaattttatgccctttctccttactaatgtgattctatgaaaattccagattattttcccaaaaagtgatcgaatctactctcaattctgaaccaaaaaacgtcttgtaggaagatttctttctattgtctaatcaaagccctttctggattaattgaaaagagcaaaggattgttaaatagggtagctactggcatccatttattatggaaaaatatttctaaatattgatctttgattcctatcaaggccatgaaaaatatggttgactaagtattttaattttctactcgagagagataggcataaatattacatttgacattttgagtgtatttctcattgaagttctttttcatatattatgtcgcagttccttccgctacctgcagtttctggtttttactt

SEQ ID NO: 11763 - DNA, 7266 bp, Vitis vinifera
  Intron number 3 from transcript GSVIVT01014994001 (locus G SVIVG01014994001) derived from phytozome v7.0 (chr-ID chr1 1; pos 235258 to 242523 reverse strand)
cctttacaaattccaacttgagcaggatgtaagtggatttgaaatctctatttttttcattaaagtatttacatgaactctgtggatatgttatctaatcaaaattgtaaattaaaaattgcttgcatttgctgtgtcatggcttgcagcaatttatgtttatttgaaacatggccttttccaaaacttcatgctttacatggattttgctttttcttgataagtaatgaaattgtaaattaaagaaccaaaaggggtttaaccctagtatacaagtagtatacacagagcaactcaggcagtctttacattgcatatgcatgtctgttggtagttatttttcctatcttgagcttttttagtgagatttcatgacttaggtagtgacatgatctaattctggttttgatggagctttaatccaacctcacccatcatcaccagattgctttgtttcagtcaccatttgtgatcatctctgttcctaggctttcattagggtgtcttttaacaaaatttctgggccaaggaaattaaatttcaattctggtgaagatagtggggtatgataggcataataagtagggagcatttaggtaatttggtccctttaaagtacatgcaaaagagatccagttttgtacctttgtcctctaaatctaactgaatttcatcttactgaactgtaaattctagaaacattcaatgtccaaggaataaggatcattcaactttgacttatattgattaatcaatgtttgacaataatagaatttgctgataccgccaacgtggcccagttggtcagggtgaacactgggaagtgtggtcccaataagtgacacatggtcttgggttcgaatcctgccactgatgatgccctaaatttacctagtgctggttgttgctatgcggtcaataccccgaggtttggatccccatggagagtcttaagggcttggccatgaaaggttcctcagttatcatacataaaaaaaaaaaaaaaatagtatttgctgattggcttagctcaaagtaaggggagagaacttgttttttgttattctctcctcttcaaggatgctttctttggcggcaaatgtatacatcatgtgttatatatatatatatatatgtacacacacactatttgcctttaaaagaaaataatatatgaaattattctgtatattattcttttatcaaaaggaatatataccaaataggagtttgagacaatttcatattcacatttgatatatgaaatattcgcatttaatgcattcgccaaatgcacttcatgtggaaacttatctaaattacatcccttagaaatttaagtttcaagtaaaggaataagaaataagcatccactgtctacaatcctaggtccatagtgcttgtattggcggatctttaggagttaaagatttgaattagtttagaagtcaaactttgtattttaagagattttcaattcagtttcttgatttctagagattctataggtttcctattttttctgcctttctttaccgaatgtgcacttgtatatatacatttttttttctgggtaataaaaataatacttttctctacaattctttttcatggtatcagagctgttgaactggggcgctttttttcttatctagagacgtttgtacctattttattctcggcatttggttagagaatttttttctgggttcaatgtctgtttgtcaagatcttagtatttgactgagattttttttttctctctctttgctttcatcttctttatcttcgtgttctctcttctctgaaaaatgtcggaaggatctaggacaacatcatttgagatttcttcaaacttgaacatattgaatggaagccttgacaacttgacactttagatcactacagagaaattgaatggaaaaaatttcctggagtggtctcattctgtgaagctatttctttggagtaagaagaagataggctacattttaggaacaattaaggctcccaagaccactgatcctctttttgaatcatgggactctaagaactccgtgatcatgtcttagcttcttaattctatgcaacctgagataggaaagccattcttatttttgtttatagccaaggatatctgagatgccatggtgaagacttattcaaagaaggggaatgctatacaattttttgaaccgaagtgcacaattcacgagaccaaacaaagaaatctaaacaatctcttgtgctttaatatattgtaatttttgtgggaagaattggatgttctccaacattgggagatggaattgccaagacatgcttcaaagctcatagagattcttgaacgagaaagaatctttgatttcttggctggattaagacctgagtatgatgaggtccaaaataggttgctaggcaaggatgtagttccagatttgcatgaggtattctccgtcatacgagatgaagagagtagacgggccatgatgttgagatccaataatgagccagatcagttatcactcaaagcttctcatgaaaataccataggaaacaagaagaatgattgttggtgtgacttttgcaacaaggataatcatactagagaaatgtgctggagaataaacagattactgcctcacatggataagaagaatcagaagggaaaaaccagtccaagacggggaaaggcttccatactgactcaactggtgctcaatcttccaaactcgttgcagctgccaccgaaaacttgcccttcacgaaatatcaattggagcttttctataaactgtcgggaaaaattgaggttccttcgtcaactttgtcaaccttgtcagcctcttgtgcctttgcataatcatgtataaccaaacctattatgtgcatgacatcagttctaaagaatgttccttggattgttgactccaaagcaagtgatcatctgactcaagagtcaaaactcttttaactcatatatcccttgctctggaaaacagaaggttctcgtggaaaatggctcgaatatactagtgcatggaaaagagagtgtagccattaataaagacattactcttgactttgttttacatgttcttgagatgtaagtgaatttgttgtccattagcaagcttacgaagtcttaaaactgttcagtgacgttttcctcgaattggagtgtttttttaggatcttactatggcaaagatgattgacagtgccgaggaaagagaaggcctgtaccacccgatttcgcaagaatgggagagttgagcataccaagtagaaggaggtctaaccagagaacatgagattaggttgtagcatgaaagattaagacatttaagttttgcttctttaagaataatgtacgttggatttgtttaagagtttttatttgtcttttcttgagtgtgaaatttgtgaatttgcaaagagtcatcgtgttccatacccgttgagaaataatagatgtgatttagtgaaggatgtgggactttagagagtaatcctcatttagtgaaatggactactattggtttagacaagggaaagggggatctaggagttagatgccttcactcactaaataaggcctttgtaattggaattggcgatttgctatagaaatggatgtcttttggaaaaagattgtttgtggtaaatatggagggatgttttctggagaaagattattaatggtaaatatggggaaatggaaaggggttggtgctcaaaggaagtgaggagtagctatggtgttgggttatggaaggctataaggagtttgtgggagttagtcttttgttatatatccttcatggtgggcaatgagaggagggttaagttttggaaagacaaatggtgtgctaatgaacctttatgtgttttttccccctccttatttgccctagctagctccaaagaggcttgattggcagacttgtggatgcactctagtgagggggtgtttggattcctaacttctctaggcttctcaatgattgggagattgagattgtggagtgctttttgtcaaggtttcaagataagttggttgttgtggaaagggaggacaaggtgcgttggatggaaacaaagagtagatccctctcttgttaagtccctttactctatctttgaggtaggaagtgtagagttgttcccaacaagtgttgtgtggaatccatgggttccttctaaggtaagcttttttgcttaggaggcaacgtgggagaaagttttgactttagaccaacttgaaaggaggggttggtctttagccaatagatgttttctttgttatttatgaagagtcaattgatcacatccttttacattgtggaaaggcaaggtcattatgggagctcttgttctctttgtttggggtgtatcaggtgattcgttttacaagtagagagactcttttagagtgatacgactcttttgatggaagaaagtggacaaaagtttggagagtagcacctttatgtttttttttcagacaatatggaaagagaaagatagaagacctttcgagaacgtggagctctttgttcaaaagctgaaattctcatttttgtgcaacttgttatcttggaccaatttgcttataggaaaaacatctctatccttagttgattttattgattggttgggttcggattgagggagagagtaattttttgttttccctgtcctttttggcgctttttggtggctattgtatacatcacgtgtactttgatatgctctttttggtgctttaattactattttcatttacctatgaaaaaaaatgttgaggagataaaaatgatcaagttgaagcttgccaaagaattagagatcaaagacttgggcagtttgaggtatttccttggcattgaggtggttaaggtcaaagaaaggtatctatgtgtcacaacaaaaagacatcctcgacctcttaaacgaggttggaatgttgggatgcaaacttgaaactacacccatcaatccttatcataagttgggcgttgacccctcaagaacacctatagacaagggacaatatcaacgattggtgggaaaactgatttatttgtcttatactcaacttgacatagtttatgtcgttggccttgttagtcaattcatgcacactccaatgaactatcaaatggaagtagtgactcacattctcaggtacttgaaatatactctaggcaaaggtcttctatttgagaaacatgaccattatcgtgttgaagcctatatcaatgcaggttggggtggctcactcacagacgtgcgttctacatcagactattgcactctagttgctggaaatttggttacatggagaagtaaaaaacaacagtggtctctcgctctggtgttgaagcagaatttagggctatggctcttaggatttgtgagctaatgtggctcgacattcttctgaaagaactacatgtaaaagtggatgaacctatgagattgtactatgacaacaaggcaacaataagtattgcacataatccagtacaacatgacaggacaaagcacattaagattgactgacacttcatcaaggagaagattgatggagtgatctgcacaccgttcatagcctccaagttacaactagcagatgtgttcactaagggcttaccttctaacacctattctcccttaattgacaagctggacatgttatacatctttgaactagcttgagggggagtattggcaaatctttaagagttgaagatttgaattagtttagaagtcaaactttgtattttaggagattttaatttcagtttcttgatttctagagattctataggtttcctatattttctgcctttctttaccgaatgtacacttgtatatatacactttttttttttttttctgagcaatgaaaataatacttttctctgcaattatttttcagcttgatcttttgaattcttactccatgccacaactctctcatgtgccatggtcccattgtgctccaagtcacggagattaagtccgtttgactttcaggtctgattatgcctattcctaatcctaaatggaatgtaatgacatagggattcaaacactgcttgtttgccttttagtagatctccataaattcaaaccatttagacacttcacaatttctacctttcaaaatctagcaagtgtatagaggaacaacgcttattccaatatacaaactgaactcttatctaccacaacttttctccaatttatccctcacaaatacccgtagccacatattaagcaaagcattattaagaaccataaagtttctgatacgcttattccaatttacaaaatacatgctccatgtatcatgtttcaatgagacaattattgactgtaccttcaaccaaaattctaccctttaccaaaattcattttatctgctgaactatttctctattattctccaatttatccctcacaaatacctgttgccgcatgttaagcaaagcattattaagaaccataaagtttctgatagcctattaaaaaaattattaagaaccattaagttttttacccagcctacctgcttctattgaggtacatacagtcgcccagttcaccagatgtgacatactacctgcttcccctctatcccacagaaaatcccttggtgcttctatagcctgaggtgaattgatgctggtgttacaagggaaggcaaggagtagccaagcaagcttgagaaggtactacaaatgagagggtaccatggaaaagaagatgatggaactggaggagatttatagtgactctggcatgctgttgcagtgcttataagtgtataaaaactatgatatggaccagggattagatacctcctcataatcatcaggcttagatataaggtgttcttcttgatttatattctggctgttggcctgatgtgtggttaatgaattggtgctcaattttagatttttgaagtaagcccccacctaaaaatctaacagttaatgaagcaactaaatttgattaccctaggaatcttgacagttggttttcttgaattggtgtgtagaaggttctcatctgattagctgttcacttgttctataggggccgataatcagatgctcattgcatgcccgtctgttgcctatgattcccaccagatttatgaaaacaatccaacttatgataaattcttctgtatactaccacttggattatacaggttaaggagttacaaaaacagttacaagaagagat

SEQ ID NO: 11764 - DNA, 3298 bp, Vitis vinifera
  Intron number 2 from transcript GSVIVT01014313001 (locus G SVIVG01014313001) derived from phytozome v7.0 (chr-ID chr1 9; pos 2568151 to 2571448 reverse strand)
ccaaaggtgtttttcagtatcccttgaattttgattgtggcatctgttatctgtcaattgctattattttgttcttttgcaaattatgttaatctctgatgtttttatgatatccttgatgttttattgtttattacttgaagatatttttgatgtcatggaactttgattaacagcttatcttgactgccattcttatccaaaaaggaaatagccttgacaaatacatggtatccttaagcacactaagcaacctcatcatttatgacatttgagctttgacatattttctggttaaatatgcttgttttgctagagttatttgaaagcagcaattgaatgacattaccataaatcatgaggtacagtactctccaaactgtaatagaagccatttaaagaatttgtagattttctggaaccacacacttgtaggagagtattaaagttcaaattaggatggggttctttggagggatgcttccaaacttaatgggtttattcctttggtttctttttctcacaactgcaggaaaaaattatagaagttaaattacagttctttgattaagacctatgttgacactgaatatagggatgtgaatacatcaacttgctatgccttctgcaatacatctaatgatgcgagaaatatcaaattcttgtcaagaaagtcatatgctggctgtaattagaagtaaaacagttactatattgtacagatataccaagtggttgctgggaaacacaaattgctccattccctagccccaaatcaggtaggatgcattctatcataagcttctatagatctatcacaacagaaatatatgacatcaaaaaccaataatgaacatagatctagagatagacactcaaacctacgatctagatgttcttagattgaatccaatctgaagaagttgtcaaagagctcgtttacccaacaatcttccactcaatcgctctcttcatggattctgacacaagagaagggtgggcttctctatccccatgagggtggctaaagtttctctctcactctctggaacacagtggaaaattgccaaaaacctaaaccttaaacccctaagggggtttatgtagggttccatgtgggcttaagtgacttaagcccaaattgggtctgggttacttaattcaacccacttgggttataattaattaattagcctaaaccacaaatctagaaagaccgttcagaaggtttagtgcaaccttgtgcccgctagggtagcccaacaagtcatagcgaatgttgggaggtgtggtcccaataagaggcacatagtctagggttcgaatcttgttgttgataataccctgatttacctggtgttggttattgtggacatggatagcaccctgaggtttggatccccatggagggtcttaagggctaggccacggaaggttcctctttaaaaaaaaaaaaaaaaaaaaaatagtgcaacatcgtgtttttaccaaaacacttttttgcacacttatgaactacaaatgcaaatccctcaaataaattgtgtcaccatgaactaggagctcaaacgggtaccattaggacccataggaaaatattagctccctcagaatccaattttgaagttgacttaacattccactaaagagagttaactgtactccagtatcctatgaaattataatgagctaaagctcagatttgtagcctactattcattgcatgaagacttcccatgaattggtgtctgtaatataatagaatagtgttatcaacccatgaagattactttttcaatctctgagttacaaatctttctattatgtgatcaactgacatattttacctcataaagaacatatgtcaaattttacttaaggaattactatggtcatagatttcatgatcacatgttctttagatcacccaatgaggcatattgtctcaatcccatgagatatcgtggtgtctctattaagaatacctattgtcattagccgtagggaatatatgaccactttagggtctcacccataggtcaaaacctcgtcttgatttaagtacaaactcaatatcctctcaaggttgagagtttatgtgatatagtagtttgataaatcatgacaacttaatagccttatgttgtgattcattgtaaattttgtccaatgtaacgatacacactagtgcacttatcatgggaaccctatcccaatggtcaagacacattatccctcaaattcggaggtaatgcactatggtctctattggattgcccaaatccatgaatcaaccatgaattacttataatcttgcaaagaacccatgacttgtatcttttgtgtaactcctaatgtatcaagtcatgtacaatgcaagtgatatgagtctgaatgcttaaatcaatatcaatgcatacaatagatagatacagtggaagctcaagtctaattttgttatatcatgttttgtttttaaagaccctatcctaacaatggtaacctttcacaattctcctacggtaggaaaggttctagatagtgcagttcactatatcaccatggcctttgggctcttcattagccctgttattgtctataggaaattatgatgttgttactagtttgactcatgatttaaattgcataaccaatatgtttgcttttgtacgagccaactggtatctgctattgggatcattagcaaatggtcccaagcaggctcctctcctatcaccaatagaactccttggactttacctaaatgagaggagttttgaagccatgttgagaactgctgaaaaatgaactacatcgacaatgcctgatcctacctagtatttgggatcaaatttgctgctcgcagttcttggtagtgtacaggttggatttctttgaatgacattttattgtctgtgaattatcaaacctttctataaggatcctccttctgttgtactttcaaaatatgggtatcagtcaaagttattgttttgtattactagaatgcagaaatttaatggatattaaaatgtattactagaatgcagcaatttaatggatattaaaaagagcttgatatccttcgttacatagatcaatttataatttgtaaagaattgactagaatgtccttatactgaaaggcatttcaagctgagaatttatatgtaaatcatcgtatataccttactgttcaattttatgctggtgtcatttaaggccaactaggtttaaattagatgcctccttaaaagttaagattgtacttggaactgcaggaattgtcgaacctgta

SEQ ID NO: 11765 - DNA, 3809 bp, Vitis vinifera
  Intron number 1 from transcript GSVIVT01000954001 (locus G SVIVG01000954001) derived from phytozome v7.0 (chr-ID chr1 ; pos 22236354 to 22240162 reverse strand)
gtctactgcggcagctccggcgttaccaccgtaaagtaaactcttcttttatgccttttctttttttttattgagaaattttgtttggattttgatgtattggttggtaattcagttatagtaatgattcggtttgtttttttttttttttcctgtgagtaaaaattggtttccgtgatgttcggttaatttaaattgtgttgatttttttttaagtgatattctgtgaaattgttaaaagaagtgatgaacttgaaatgtggcatgttgaattaataacttttgtggaggttgatttatatgtttttggatgcagggagcgatgggtgtgtattgtgattaaacagcataaatttacttgacttatgctctggtcattaagaatctaatgatgaactgtatcatatgtatctttgatgtgttggttgatgatttcggtttaatgatgatcgatctgttgttgatgtgctcaattttgttttcggcaatattagggttttgtgaattggttgatagattcaaattatggtggtttcggcggtattatattgatagattcaagttatgaggcaggaattaattgaaattctatggaaattttgtgttattctgttaaattggtaaagaactgatggaacttggaagcagtgtgtggtgtagttcttgattggaagttaggagcaataggaaccgtattgttagcaaaaagtgtgaatttacttggatcatgctctggccattaagaatttaatgatcaactgccttaaacttgacaggaattaacaattttaaacttggagattattgtgtgagttcctcatttacattgcaaaaatttctgtaccatttgtcatggatgtgtatgctattttgttttaactctcttctagaattttcagtaagcacagtacattggaattgggaaaaaaatcacgtttgtcaaaaattaatgcatgtgataggatatattcgatacaatactttttttcaagaaaaatgaagcattggaaattgaagcttaagagtagttattgcttctaattaatgttaagagatgttatttgaataaaacatgtgtttttcaaatgatttgaatgttaaccttgtggatgatgatgaataaagagcaaagacttttacttaatatcttatttcattttttaggcaatgatgataaacttggaaagttggaacttcaacatggttcacaattgcataaacatcaataatagtttcctttagatatattggtggagaattactagatgcatataacttttaacatattgttaaggtctagttcaaagttgaaacctaaaacaatagttagaaatttgattggaaattcattatgtagattttatgataaaacattgcattaaaatgatatttctaaagttaatttcattaaaactgttttaatgatatttgtcgagttaatttcagtaaaactgtagtcttcagtgtttacatgcatttgatattgataaatacatatgtttacctctttaaatttactatcttttacagatttggttaataaatgatttatatcttggttatcttttttattttttctccatttccttcatttcttttttgataactgggaatctttcctgagataaaggcatttatcccaactgtcaaccctggttgatatgggcctgctctcactgccctacactacttaaattctagggaggcttgaactcaggacttctagttaactgccaaagaatgctactgttgaaccacaccttgtgggctcctcttgttcttccattttataacaaccaaatgtataataaactcatatcaaatgataactgaaacaaaatgaaataatttcagtctggataggctagggctgttaggcactgttaaggccatgattgtttttaggaatgcaggaatatgaatgggaatgctgtcttattcccatattcccatgtttggttcacacaaatgagcttgtggatgatttaccatgtctttgcataacccacattatgtaggctatgggaacttgggggaggaggtggtatttctattcccatcattcaggtttagacttataataatttgtaattactagtgtatcttaggagttggtttctaaaaataaaatattcaaattatgttccaaaccaatattttaataactccttcccttccttcatatattcttctttcatctcatttttgtcaataatggaattgaaaaattaaatttcttacatctttgaaaaattgttattttatagtaagtttgaactaaatttttagaagtggataaacttaatttttatacttttacaaattttaaatggaattagccacaaaatataacatggtaatatgccaaatattatctcatttagttcttctattttagggatttatttatttatttttaatttaatttaatttaatttaatttatttataaaaaaactatttaatttaacgaagatcaggttatgggaaaatcccgtttctatatacttggtagtaaagggagtatttgaaagaagatattttgattcttgtgcttgtacaaataaacattttttttcttgataggtaaatttttgtccccattgggacttgaacttggaacctcccacaaaccctcccaatccctttaccacttgagccaggcctcaagggctgctggttcaaataaacataagtgtgggtatagaaactatttcccattctaattcttgaggtgtacaaacactggattgggaacaacttattttggttatctactgttgcagataatatcctaaggtgtctctttcttagtgcttgcattttaaaatatcgaaaggatgcagaaaagtaaaatttagttgcaggtgttggatacatctctgctactcttgactttcaagatggagatgttggagagatctcttagttcagcatggcataagcaagcccatatatctgttttctcttcatacaaataacagaaaactgacttgtaatgggaagagccatttactagaagtcttggaggggtttgtgatttaaggttggcagtaaaaaccagccacaatcaatcaatcttgtttactgtttcttttggggagaaacagatatccagttggtgggtcacaaatagcggtcgaggtttctaccacatgaatgtctgatgtcagtctcagttatgcataactattcttcagcatattctggactgttctggttgatttgagaattcttctgcttcatgtaggctccaccatatgttctgtttccctctttttttggttatgatctttgcctttacttttttccacttcagttaggtgactatttcaaacatggaaaaaaaatctttacttaacagcctcaagtaccattgggtgcttattttcaactaggatgagatagaaattattatgctagcttttgggaaatttttagcttgaaactcttttttccccttcaatttacaatttggcatttgtcatattacacctgtaataacccaaagggtagcagatcagcaccattaaaccttagcgtgatggtgagcttaaggcatttttgtaaattgtattcagagaaacaaatacatttggtctctacaaaaaaatttcacttacaaactttccccttgatgttctggattttcttccttccattttaatcttcttctacatttctctctctagcatatgttctattatagttctgcagtgcaggtatacttttctttttctctggtcttaattatgatgttttgtgtacaataaaggtcgaaaccaagcctggcagctgttgtcggttgta

SEQ ID NO: 11766 - DNA, 3067 bp, Vitis vinifera
  Intron number 23 from transcript GSVIVT01033696001 (locus GSVIVG01033696001) derived from phytozome v7.0 (chr-ID chr 8; pos 18550996 to 18554062 reverse strand)
agcattctgcactgcttcaccggtattaatgcattagattcattttgttctcttaccttatcatatgaatttgctaattttgatagaaaatcattatatgtggatttttttcattcttaactgcccatcttttaacattcaaaagtttgattgaaatgatatctttaatagttctggttatttatattttctcatctttacttgttgaaaaaaaaagttctggttgttattattctatgttgtttcatctctaagtctttgttgtatgacagttgcaaatgtgtttcatcatgaattaaggtatcttcttgctatgagactaggattaagagatctttgatctttgataatttgattttagtcaacacttgtatttgattaggtttgatgccaatcatgtatgcaatttacctttgttatttatttttccttgtagtagaacttgtatattggacgcatgatagtaatgaaactctgaccttgcaaattgtaaaaaattaagaaagattagtggggctacttatctgggtggaaggtgagtggtaggaggggagaggggatgcaaatctcacatttgttattcgtggacgatacgttggttttttgcgaggagtcttcagatcagatgacttatctaagttggctcctcatgtggtttgaggcgtgtttgggtttgaggattaatttagagaagagtgagatgatcccggtgggaagggtgcataatatagagggattggccttggagttgggttgcaaagtgggtgggatcccttcttgttatttgggaatgcctttaggggcaactttcaattctttggttgtgtgggatggggttgaagagcgttttcgcagaaggcttgctacgtggaagaggcagtatatatctaaaggggggagactcaccttaattagaagcactctttccagtatgcctatttattttatgtctctcttctatttgccaagaaaagtgaggttgagattgaagaaaattcagagggattttctgtggggtgggggagctcttgcctaaaaacctcaccttgtcagatggaacttggtttgcttggagaaaagaaaaggtgggctaggggtgagaaatttagctttgatgaatagtgcccttttgtgtaagtggaattggaggtatgctaatgagagagagacattgtggaggcgtgtaattagcctcaagtatgacgaagaggaggggggttggcgtattcgggatgtgatggggagaaatggagtagggctttggaaagcaattgggaagaagtgggggctgttagatggcaaggttgtgggtaatgggctaagagtgaaattttgggatgacaagtggtgcggagatgggccactttgtgagtcattcccctctctttactccatgtccatgtcaaagaatgcttgggtttcagaggtttggaaccctgttggagatggggatggttggactcccctttttgcaagggcgtttaatgattgggagattgatttgttggagcggttgttgcagaagatccatgctttcaaggttcaaagggaggaggaagatagagtgatctggatagcttcaaatgatggggctttctcagttaagtctctttattctatgttggagccggggggatcctctatgttccctagtgaaagaatttggagggcaagagtgcctccaaaggtagctttctttgcttgggaggcttcctggggtaaagtattaattcaggagcaacttcaaaggagggggttctctttggcaaataggtgctttctttgtctatctgaagaagaaacggtggatcatctcttatttcattgtgtcaagacgcgagtcccgtggaaccttcttttctccctttttggtgtatattggactctttcgtgtacgatgaaggcaacccttcttggatggaatggagggtttgtggggaaaaggcgcaagagggtttggcaaatgactcctttatgtatattttggtcagtttggaaggagagaaataggctagcgttcgggaatgaggaactctcgcttcaaaggttgaaaaattcttttgtatgtaatctttggtcttgggtcaggggtttcttagtagagagtcattcttctcttgtaagttttgtagattggatagactcttagttagggaaggtggtgtgtatactccctgtatacttcgagggcaccggtttttggtgttttctccttttgattaatatacttcctttttacttatcaaaaaaaaaaaaagaaagaaatgcagttgtctgacaaaaacatatgtgaaaatcaaatttggcgagtcttttcctccccatctccttctcctctctctttccccctcccctctctctcctctctctctcccctcctcctctcctttctctatctctctccctatctctttctctgcctcctaaaagaatatcttgtgaggaacattgtatcctaaacgtatagggtgtgttctacatgtatcaggaatctagtttattttatttttatttttttataataaaaaattattattgtcagaaacgaacaatttgtttcattgaagtgtagaaggatgctaaagaaaggatgagctatcttttacaaaatatgaactggccagtaacgaagtagagaaaattacaagaaaaacagtgcaagagccaaaggtcaacaaaaaacagatagatgttactgattttttcaaaaagttacttttagttgtaggatatgaaccgcattgccctgacaaacattggggaatatccaattagtagctgtttaaccttgtccaactcaagtttctatctcattcaaagaatataactctgcttttagattgtttcttattcctatagttgtgtgttctcatcttttgcactttattagcattgattttggatgttgttgtttcaaagatacctcctacctttcttttgttaaggtacttctattccaaagatggatcttcattcatagggcttgggtatacttttgttgtgtgtatctgtatttgatcttttcttttccattgtaggtgcttgggtatccttcttcagaaagttg

SEQ ID NO: 11767 - DNA, 2981 bp, Vitis vinifera
  Intron number 2 from transcript GSVIVT01006486001 (locus G SVIVG01006486001) derived from phytozome v7.0 (chr-ID chrU n; pos 26443568 to 26446548 reverse strand)
cgcgtttgaatcaaaggtagtgcttgaacctaaatgttttttgcacttctatttcatatgttctccggtttgggaatcaaatctgaactcaatagacggaaaggaattagatcgtattgatattgtttctactttctattgaatctgttgttgagggtttgcgagagaattgattggctgaaaagttgttagttcaattaaggtggacaaatgctgcttgtgaatgtagactttggattgcaaatgttaatttcgcaaagtacaagtacaatcatgtgcagctgatttttggggatcaagggtttttccttccatttatataacttctgttctgctactttttgtgattgttattcttgctaccattttcatatgaaattcaaatacttagaattgatagtgggtaaggtggtgtctagttcccaaaatgcctttttggatggaagagaaattttatatgcaatgcttattgttaatgagacttgatgaaagcaataaccgtggtttgctttgcaagcttcatattgagaaagcctatgttcatattaattgggatttcttgttcttgctttaaaaaaaaaaaaaaaggttttggggagagatgaattaattggattaaatggtgcatttcttctataaggttttcaattcttgttaatggtactctgttgagcttttttcaaagctctaggggtctaagataagggatcatctctcaccctatttgcttatgattgccatagaggctctcaattgttttcttaagaggactaagattaaaggtttcttgccaggttggtgagtgagtggtagaggtggagaaagggtggaaatctctcacctgttgattgcccacaatactctagttttctataagtcgtcctaagatcattggcttatttgagttgattgctcatatggtttgaggccattttagggctaggtattaatttggagaagagtgaattaattttggtagggagagtcaaaaagtttgaggagttggctctaaagtttggatgcaaggtggatgcacttctatcgtcttatttgggtcttcttttaggtgtgtcttttaaatctgtggtgatgtgggatggggtggaggagaggtttcacaaaaagttagcaatgtggaaaagacaatatatctctgaagatgggaagcttggcctgatttggagcaccttatttagtatgcctatctatttcatgtcattgtttttaagttgatgttggagtagattcaaaaggatttactatcgggtggaggggccctagagtggaaacctcatttagtaaagtgggttatcatttgctcatacaaatgtaagggtggcttaggggtaagtaatttttttatgcttaacaaagcctttttgtgtaaatggaattggcgttttgctaaggatagggggttttatggaagcaagtgataagtggttaagtttgggatagagaatggtgggtggcaatctaaggaagtaaaagaaagttatagagtaagattaagaaaatccattagaaagaattaggatcttttggctagtaaagtcgccttctcagataggaataggtggagggctagattttggaaggacaagcggtatggttatcatttaataaaatgggttatcatttgctcatacaaatgtaagggtggcttaggggtaagtaatttttttatgcttaacaaagcctttttgtgtaaatggagttggcggtttgctaaggatagggggttttatggaagcaagtgataagtggtaagtttgggatagagaatggtgggtggcaatctaaggaagtaaaagaaagttatagcataagattatggaaagccattagatagaattaggatcttttggctagtaaagtcgccttctcagataggaataggtggagggttagattttggaaggacaagtggtatggtgatgagctgttatgtaataccttcccttattttttttttgttgctacttttaaggaggcttaagtggtggatgtctggaacttgttggaataaggaggttgttgggcacctcacttttctaggctcctaaacaattaggaggtgaatatagtggagtggttccgtttgagtttgcaaaggaggagagtaagcagcaaagaggatgataaggtgatttggataaggtcaaaaaatgataaattctctgttgagggcctttgttcggttttagaattgggaagtgaagctttgtttttggcaaacttgatttggaactcgtgggtgccaccaaagggggctttttttgcttagaaggctacttggacaaaggttttaactttggatcgtttaaagatgagaggatggtccttggcaaacaaatgtttctgatttcaagtagaggaagagttcattgatcacatccttatcctctgtgttaagacaagagtattgtgacatcttctattttctctttttagtgtaaattgggtgcttcattgtgtggtcaaaaagacacttttatgttgacatgactcttttgtgagtaaaaaacggaaaaaggcgtggtaggtaactcctttatatttattttagacaattttgaaggaacaaaacagtaaatcctttgagaataaggagcattatgttcaaaggctaaaatgctccttcctttgtaattttttggcttggtctaagttgctgttagattttggtcccccgtctgtagtagattccgtggactggttgggcttttatcaaatagggtcttggctttttgttacctctcttttttcgggagacgccttcatgcattcattgtatactgcctgtgtactatgaggtgttctattgagttctcttgtttataatattctattgcttgaagccaaacattgtcaaacttcattgtgattgtatctttggatgtgattgttttgtggttcacggagtcactaagaagctttgatatcatctattttgtgaatatttatgatgtgcagaattc

SEQ ID NO: 11768 - DNA, 4994 bp, Vitis vinifera
  Intron number 2 from transcript GSVIVT01005700001 (locus G SVIVG01005700001) derived from phytozome v7.0 (chr-ID chrU n; pos 21373507 to 21378500 reverse strand)
aacccggtccgactcttttgaacttcacgtaccaggttagtacgtttattttttccctatttcattgaaaagtttcatgcttgatgctattggtttgtatagagctaggattggaaattatatctagtgtcaatgtggattgtggaaagtttgatcaggttttgaatctgggtagggtgcttgaatgaaatgttttacctttggcaatttgatagaatggggggattaggggaaaataggaagaggtgagcataaggaggtcggacttttttttttttttttaggtgataagcaggttggtttctggaagcagctgagtagtgttaagggttttgactcctatcctcccatgttcttttattagtatccaattaacaagtctcgtcttaccatgtctctctcaggagtgtgagtatgctttgtttaatttttctttggtttgcatgtgtttctttttaatattgtaaagaaaaaagaagaatattctcacgtgtgattctcaagatgattgaaagcaaagaactaaattcatcaaagttcaatcaaatttgaaacatttaattttttgtatgggatcccacaaattgtgtgtcctaatcctcttttgatgttatcttttgttatgttgacatggcaatatggaattacttattaggttttaaaggaaattaatatataagctgtgagaagttgtctttaccaattaatgttggctctagctcatggtctttacttgatttcattgattggttgggataggtttttttaaaattatacatcgtgtatacttttaggtgtatttttttggccttcttaacacaattacatttacttataaaaaaaaaaaaacttcatggagttcataccacccatggcgaactttctgttcttgagtgggagggcctgccaattaaaccaccttaggtctaaaacttaataataagaatttcatatccttgcatttttccacatttttatcttcaatttcttgtgctgattgtagagggcatagggtaagaattgaaacttgaaattatatgatagattgggtttggactgattgttgtaggattcacagtttctcttttcttttctcatgacatcttggcaatcaagtgagcttaactattagtggcttaaagagcttgaccatacaaagtgacttagtcattcaagtattatgcatccgtagtgtgttctgtgataaaaagttaggtgattgaatctaaaaaatcctcaagtaactcataaactccaaaatgtactcatctttttacatattctttttatgctaactttgaactctggtggttattagtttgaactcggattttgatgcttaaaccatatttttgtacaagaaattcaaaataaccttatgataaagtaatattgtaaatcgatgaacaacattagtttttaatactttacaatacataattcctggcttgttgtgaatcatgtttgtagatttgaaagttgctccctggtaataagaagcatgatactaaatacgttcattctatagttatttgatgagggatgcactatttccatatcattcatttatcttattgttattttggactctcctttcttctcttgctcaatatggattggttctttggagaagtacattaagtcttagatttacaaggtgaatctcgaaggtggattgaatctggtaaaaaaaccttcttgccttaaatcaacaattttttgggataaatactgctctatacccagtcattcctcttagcaaaagagatgggtgctaaagaagcttgtttggttctaattagtttagtaagtatggggtttgatttttatttcttcccattattataagtttagcatctttaaaattgttatgttttagcaggtttagtcatatatgttcacaatataatgggaaggcttggttttttgaaattttaagagttcatctcttcttttcacctattttgtggtattgaatggtagatctgtctatctattgtttaaggctgatcttaatcgcttgttatagatggcagctctaatgattgagatagattagttacatgctatatcattttggtgttagatctgaaggttggaatatttggggattcaagaagtgtgttttaactggtacagtttcatggtagttgaatttagaatatcatgtataatagttgggaagcttgttatagcacgttgtttgatgataatgtgcttgaaatttgaatttggaagaatcagtcatgaagctggaaaaactgtactagatggtggcagttaacagacctagtgatgatgaaattcttagttcttattggttctgaactacacattactggattccattgacagcttaaatcggggctaggtggttttgtgctgctgttttctctgctatttatttatttctttcgtttgctcctttgatggtgcatcttgagtatcttgtgtacatgaggtgcacccctttttgttagccgctttttattgcatctttgctataaaataaattttctatttcttgttggatctgaaaatacactaaaatgaggttttgggcaccattgtttcaatggagtattgttattttattttttggaaacccatggcttgagatgaagagagatgcagttacaatcttgcagttgcatcagtttgtgcaaagaagatggatggagaaacaattgagaggaagttaacttgaggataaatgctctactttggatcatcttcggatggctattaaaaggagaaagatggagaaaactggaaagtgggagatcctttgttatatgcttttatttgtatcttgttaagaaataatagtttcactagttttgaggaaggttcaaagccaaacagaagaactgttaaaactgagtgggatgggaactctttggcaaatttctctagctatgaagctcctatcttaggcaatcaatcagcaactacctaattttggtttacatctttaagtctataaaacagtttaatcatatgtcgtgaggagttttgactttctttttttcttctcctattttatgttattatttaatgtcgattctaattttttattgattagatctcaattatgagctagggctgttatgcagtacatagtggttgtgagactaaaaaaattcaatgggatttcctactaggaggaggggctgtcaagaaaaagtcccatctagtgaaacggttgacaatttgcaaaaaagaaaaggggtctaggcattaagaagttgtccattctcaataagtcttcattagaaatggtgttaaagattcgctttgaagagagatatgctttggagaaaggttatagtaggaaattttggagaagagccaagtgaatggtgctcttgggtagcgagagaaggctatggtgttagcttgtggaagtcaataagaaagggtgagaaattattaaaactaaaacaagatttgaggtgggcaatgggagaagaataaagttttggcatgatgtatgatgtggtaatgttcccttaaaggactcttttccatttctattctcctttgcaacttccaaggaggcttgggtggatgatgtttgggagatagaagacaagatggtcctatagaacatgtgcttctcaagacattttcaagtttgggggataaataatgttgaggagtttctttggaagctttagatggtttggaaggctagccattcttggtgaaatctttctactccaccttggaattggagggtctagtgtcattcccctcaaagatagtgtcggctcttgagctcctatcaatgtgggttttgtatttttttttgtattttgtatttttttgttgggtaggaagtggtttggggaaggattcttattgaggacggacttaaaataaaaggatggcttttagcgggttattgttgtatgtctaatgatgtagaagaattagtggactatttccttatccattgtgggaaagttagagggctatgacacttcctattctctttgtttagcatttcatgggttctcccaaatttggtgaagggcatgttaatgtgttagaatttgacttgtgggcaagaagacgagaacaacatggagaacaactcctctataccttttctagacaatccggaaggaaagcaatgcattaaccaatatcttaaagactaccttatatctgatctatatatgtggtcttgagggtatcttatagttgatggtcaaactaatccaccatcttcgatagattttattattaacttgttgatatctaagtactagattggggcggtggttgtagcttgcttctttttgtttccttacatgtatacttctagtgtattgtgctcgccccctgtttattggtgttttttatatatgtatttattcttacttgcctatgaaaaaaatgtagtatgttggttattaattcattctttttggaatatgggttgtcaataactgcctctttaagcttctgttatgcattatttattcttatgattatggcacatgcttcctcttgtaggattgctgaactctgttcatgtgactttttccttcaagaaaatgtaacctaagagtatggggactttgcaaagtgtatgcatccagttcaatcgttatcaaggctatgttacaagtcctaattattttcatagggggaggtttgggttacgaccctttacagggaatgagaccttggaagctttcttatgagtgtctttttgtttgtctttgttctattactcaattctgtcaattatttgccacaaaatagtaccttgtgaagtcacctgaattaattctccaattatttttattctcttttacatattatcttattagctagttgttaaacatgggagtattaaaaaggaaaaatgagtggaaaaattctactaaagcccacttgtggaaagcttattgaattgtttctccatttattttattttttccctctttttcaggcggagaaaaagatagctaccattcata

SEQ ID NO: 11769 - DNA, 11527 bp, Vitis vinifera
  Intron number 2 from transcript GSVIVT01021297001 (locus G SVIVG01021297001) derived from phytozome v7.0 (chr-ID chr1 0; pos 3644360 to 3655886)
tttaattttccttagtcttgctgtttggaatttatactggaaatatagtttgtagctaggttttcatgtaacaaattagctaaaaaatgctaatgcaaaatcaagtaaaggaatgatagtttttaccatcaaagttgaaacattagaaactgataaaaacaacacttataagtagttttctataaccaaataaaagtgggctacctagggctctggtttttaaggtaatgagggttatatctgctgtggttctttgaggtattttatgggttaataccaacaggaaaagcttgctgatatttatgaatggaaatggaactcatttcagtgctaagctagtgtcattatttcatggttaggatttatgatcaacaggtatagttttggaatagtattgtcattagggttggggcaggagtttgttgattctataactgcacaggcattaacaaagaaagtgaaattaagaagagtgaagaatagatagataaacctaagaggctcactaaggcttcgtatcaatgcaaaggttactgaataacacttacaaaattagaaacttccaagaaatttcttccaaatgaaaacttcctaaccaagtataaaacttctgtaggcctagtttccaattcctattgaaattttaaaacttctgctagaacaaggtttcacttctgctagaacaagggaacctaaactaaatccaaaaatgggaattgacaaatgccataatcaaataccaatttcgagcaaaaatggacctagtttcccccttttcattttattttgttgaaaataagtttcaaggggttgatccccatcaaaataaatgaataaattaataaatggttatgattactattagaatctttgcattactccatttcaagcccttgatcatttgggtgcatgctactatcatactaggaatctaggcaatggaagttgtttttaagaaaaactttatccatgatttggatgtttccatatcaattttagttggtgaagagagtggtatgaatcttgaataccttgcaatcttttgcttgatgactccctcttggatcctagcatgtgaggatcatggaatcctttctatggggatgaaggttagggtctttctgtaagactaaatgacaacttctttttatgccttaaacccttaaaggcttgcctataggcttaaatgtcttgaacccattttgtgcttgggtcgcttaatctaacccactgggtcttgattaattaattaaccttattagacttcgattaattaattagcccagtaaaaaaaatcatttagaagcttttgtacaaccttgcatattaccaaaatgtccttatgcatacatatgaataaaaaacccaattatcactcaaataatgtgccactaaggaatatgagtttgagtaagaaccactgagacccataggaaactattggctccttaataatcaattttgaagttgaatcaacattccattatagagagtcaactgcacttcaatatcctatgatattagattgagacaagaaacttgagttcatgacctactaacaattgcatgtaagctcctcataaaccagtgttcgtaatctaacaaggtgaatgttatcaatctctcaggagtacctctaccatctttaagtcttagatcttattatgtgatcaattaacatattctagttttctaagagcatctatcaaattccatttaaggtatggtcatagatctcatgattacgtgtccttagaatcaactaagaaaacacactgtttcaaatccatgagatatcacggtgcccattttgaaaatacctattgtcacttgttttaatcaatagtgacttgatccatagacaatgatgaaaattttaagaaatattggagatatttctccaaagttttgggtatcaattgtcaacgataagatatttccaatttgctgatttttgctaacttttcccaatatttcggaatttttcattggtgttttgggatttccccccaatttttcgggttttttcgataaatctcaatttttttgttggtcagctagtggtcaaactccattttttttttaaaacattgttgggactcgagcccctaaacctcatgtttagcaaaaatagcctttaccacttcgactgctatacctttcacaaaaatatttgctaacattatatatataccaaatttttttctctaatgaaaattctaaaactgaatatactttttaatacattcctacaaaataaaaaatattaaaatataattttaattataaattaattttaattatcttaaattcaaggatttcactgattattaaaatataaaaaccattatcgtagtttttttaatgagtctttctttatttcttttatgtcttaattaactataagataaatataaatttgagaataaaatcataattagttttaaaaatcatacatatattactgtttcttttatatatttgaatacattcaaattagatagatatatgttttttgttaaaatttctatcaatatttctcaatgtatcccgatatatccatgatatccaactaccgatatatttataaaaatttatatttttgtccttttccatagagactatatgatcaccttagtgtctcacccgtagatcaaagccattgaagactttaatactaactcaatattcttttaaggttgaaaactcatacgatatagtagttggttaaaatcatgactacttgatagcccatttcataactcaccgtagattttgttcaatgtgtaaccatgcaaactagtgcactcaccatgggaaacccattttgatgactaagacatgtcatccttacaatttggaggtagtgcgttacaacctttgataaattacctaaatatatgagccagtcatgaatgaatcattaacttgcaaggaacccgtgatttaactcttttgtgcaactcataatgcactcaagtcatgtataatgcaagtgatgcgggattgaatgtttaatatatataatgcataaataggatagtgaaaggagaactagaatcataatataaatattaatgaaatccattttttattacgtcatatcatgttttttaaggctccatcctaacaattacatgcaaggaacatagatgaaattatttttagaaatttatttctttgttttaatgttaatttctgagagttgaatatttttcatcttgagagccaaagttattagagccaattaaagttgttatctaatctgggttccgtaaagttcttcttttacttgatttcgttggaagaaagtaactaaatgatatgagagtgtaaaattaagaaagagtacattgtgtcttccagcaataaggttgcaataccatttttaggaagttaaattgctatctgattagtaaaaatcaagttccttcctcaaattttaacccttgatttagacggataaaaaggaaaaccatcaaagacattcaaatgtcaaaccatgctgatgtaagggatatgttgtattagaataccaattttctgtataaatttaagttagcgaatgagccaacaatgcatgtcaaatgaacaatgttccagaaaataaagaatctcaattgtacatgtttagctaccaactctcctaataccttaagcatgcactaaaaaaataaaaaattgttctaaactacctgttaagctatcaactttcctaaaagcttgggaatataactccatagttgttcacatggagagacaaattatcagttattaattgcaaacaaatagatagggaaataaataataaaaaaaactttaactcgagacccttaattaactataactatgatgctatgttatcttactgattttcctaaaagcttgagctgtttgaatatgaatccacaatgtataacaagctaacaatacttgttctcatctttttcctctctcatcatctttttacatcattgccactgtcttcatctttccctgagtctagaccttggtttccataggattgttttgtttgcaatcctttctttccttgtctaagaaggaatctcaagtcatatttatctatcctaagttaattcagaactccaaagtttcacctgaagtcaaaccctttgcatggttgatgggtaatgggaaggttaacacccatgatttgcttcagatcaggaggcttttaaaagccctcagtgtggcgccttgtgttctctctggaggcagagcatatcaccttttccttcattgttgtggtgctttggatcatgacacagcttgtccatgttggccggtatttcctttgctgataatgatgattatttcctttgcgggccttggaaaaaaattttcagggtcagagtgttgtgcaagggtggtatgattgctatcttaatggtgatttggttggaaagaaatgtcaagatatctgaggagaagcataaatcttcagaatgcttatgggaatcagttcgcatccacatttctctgtaggtatcagtcccaaacccatggtagttgggaagtggtgatgcttccagatatatgatgacggcttggctatattcttctttagaccagctggttccaggttatctatagaggcagagatcctagacttgcttgaaagtttggttgagttgaaaatgtttagccggaacaactttgacattgaagtggacttttccttattgtcctcttgggtttctcaagggaagaagggtccttggagattggatgtgtggctccataaaattgtagacttcttgagggatttggttgttccttctcctgaatcctagattggccaaccaagcagcagatcatttggttctgcatgatgcctttttgccacaggattttgtttggagtttggagtttcatgctttcctgagatgtatcttctctaggggttccttgttggggtttgttaggaaattaatctagcaaatcttctatataaagaagatatattctgtatataacagtttcccttttgtattcctagattgtagttagattgattggtgatagcttaattataggagagactaacgtgtaaccaaagtttacttgttgtataaatacatcaattgacatcaattgacatcaatgaaattcaattcagccaattcttcttcttttcatggtattagagcagggactaaaatcctgactctattgtagccgcactctaccttctcgtgcagcaatctctcatcctttggccaccatggttgatgaaaggaatcctacctcttctgaaacatcaaaaccaaactcatcaaagacagaaaaacaagtcgattcctctgtccctccattagatgcatcaaagtctgatatctcaaattcttatttcactcatcactcagatcatccaggtttggttttgatttccaaacctctgaatggagataactactcagcttggcgcagagccatgaccttggctttaaatgccaagaacaaattaggttttgtcaatggcaccatcaaggcgcattcggaagaaactcatcctgatgactatgcaacttggtcacgttgcaatgatatgatgcattcctagatcgtcaacactctcaatcctgaaatttcagactctgtaatctattatgcaaccgcttatgaggtttgggaagatcttcgtgagcgattctctcaaagcaatgcacctggcatatttgagatccagcgagaaattgcctaccatcgacaagagcaactttctatctcggtttactacacaaaactcaagagcttgtggaatgaactggcctcatacaatgatgtgtcaagcggagcacagcaggatcaacaaaggttgatgcaatttctaatggggttgaaggaatcctacaatgcaattcgtgggcaaatacttctccttaatcctcttccctctgtccttcaagcatattcctttgtgtgccaagaagaaaaacagaggtttcttagtgtgacacacacaactgtagagtctaactccagcgctgccatggccgtaaggagcaatcaaatgaagaacaactttgctggaaacgcaaggtcagatcgttcagaaatcttctacagcggttcacaagattcacgacggtttgatcaagacaaatgtcgttcaggatcttccagagggtgaccttagtgcacctattgtggggaaatgggacactttgtcgagaagtgttatcagctgcacggatatcctccagggcacccaaaggtaagaacaggttccaattttaactgccacaagaatacttctatggctaatcaagtttctgatggtgcaaacaaagatgatgggaagttggtgttgactggaatctcagaagcacaacttcaacaactcctgaatgacaaagatggaggtataagttcttaggctaatgcaactatagcaaaaccaggtttgtttaaaatttcttcacaccgctggatcatcgacagcgacgcaacagaccatatctcttcatctccaaagttgttcttgcgtaaagataaaaatatttcattgcctccaatattgttacctagtggagaaaaggctaacattgtcgccaaatggtccttgtcgctaaactctgtttattatctgcgtgatgtattatgtgtaccgacattcaaagtcgatttaatgtcaattagtcatctaacaagaggcttgaattgttcagtaacatttttccctcattggtgtgttttgtaggatttggctatgaggaggatgattggtttgggtaagcagcgtgagggattgtattacctagcggcgttaacgacaaagaaaacccgagaccaattctcattcatcaccaaaccgtcaaccaacctgcaacctcaccacttcatctaccgatctctagcatagtcgtttagggcatgtttcccattctcgtctgagtttcattgctaagaactttttaaaattttcaattcagtctaataatgattgccttatttgtcctttggcaaaacaacatcgtttaccttttggtactagtgaaatttcatccgaaaaaccatttgatcttattcattgcgacatttggggtcgttataaacattcttcactttctggtgcacattatttccttactattgttgatgattacatgcgcttcacttggatttttctaatgaaacacaaagatgaagcacaacctcttataaaacgtttctttagttatgtttccactcaatttgcatcttatatcaaaaattttcgaagtgacaatggtggagaattcctttcactccaatcctttttcaaagataatggtgttcttttccagcactcttgtgtttacatgccccaacaaaatggggtggtggaacgcaaacgccaccacattttacaagttgcacaagccttgaaatttcaagctcaactccctactcaattttggggagaatgtgcactcactgctgtccatatcatcaaccgtttactttcacccgttcttttcttcaaaacaccattcgaacacctttacttgaaaccacctacttactctcacctctgtgtgtttggttgtctcgcttatgctgccaatgtccatgtctcttacaaattcgatcactgtgccattgtctgtatcttcattggttatcccattggacaaaaagcatacaaattgttcaatctctccaccagaaaaatattcaccagcagggaagtacgttttcacgaaaatcactttccttatgcttccttcgagtctgtccttcctatttctaatttgggctactcttcaggctcaattcctgctccaattcatgacccaactccctctcacgtgactaatccttctcgccttatccctcctcccaccacagactctgctccctcttcttctgtcgcacccaatttagacacactccattccgtcgcacccatctcttcatccacaatttctgatctcctctccctccatgatgagcagcccactgcaaatccaacttcaactctcctcaaaatatacactcggcgccccaagaatgctccttcacctctattggaaatcctaatgcctctttctccttccccgtttgtcgagacactcttgccaactacatcatctcttccttcatcaccgtccttgcttctatcttcatccaatccctccgacccatccctagcttccctggcccgccacaaccagccccaactgagacccttcgtcactccgaccgctcccataatccaccggcgaaactacaggattatgtatgctctcacatcatgcacgcttgctccgaccaatctcattccttgcttctaggtccgactaaaggtacacgttatcctttggccaattatgtttcgtatcaccactacaagcctgcacattgctcttttattgcccagatcagtcaagtcatagaacctagaaattattctgaagccgttgtttatcttgaatggcaggaggcgatgtggtccaaattgcaggctctccaggccaatggtacttggactctcacatctcttccggcagggaagacgtcgataggttgtcggtgggtctataagattaaacactgttccgatggatcaattgagagatacaaaacacgattagttgctaagggatttacacaactggagggtgttgattatcaggataccttctctcccactaccaaaatcatcacagttcgttgtctccttgccttggctgctgctcgaaggtggtcacttcaccaattagatgttgataacgccttccttcatagcgatcttcatgaagagatttacatgtcaccgtcgctagggcttcggagataagggaaggaaaacttggtgtgtcgattacataagtcaccgtatggcttgaagcaagcatctcgacagtggttctcaaaattttcggaaaccatttgagctgcagggtatgttcaatctcgagctgactactctttattcaccagaatacaaggcaagtccttcattgccctcttgatatatatgttgatgatattttgattactggaaatgattctgtgagtattgctgcaattaagaaattcctgcatagtcaatttcgtcttaaggatcttggtgatctgaagtatttccttggcattgaagtatcttcttttaagaatgggatttttatttcccaacgtaagtatgctttagaaatcattaaggatgcaggattgttaggtgttgcacctattgatactcctatggagcgaggtttgaaattgtctgataaaagtgatttactcgaggatctgggtcattataggaggttggttggtagattgatatatcttactgtctcaaggtcggatattacatattctgtgcatgtattaagccggtttatgcatcagcctcgtaagcttcatatggaggcaacacttagtgttgtgcgctatctcaagaatgcacttgggcaaggattgttcttctcctcaaacagtgattttaggttgcgagcctattgtgattcagattgggcaggatgtccaatcactagaaggtcaaccataggttattgtgtcttccttggcccctcattagtctcatggagatctaaacgtcagaaaacagtgtccctttcttcaactgaagcagaatatcgtgctatgacaggtgcttgttgtgagttaacttggctgagataccttctcagagatttgggagtattgcatcgagagcctgcattgttatactgtgacaagaaagctgcattgcatattgcagcaaacccagtctttcatgagcggaccagacacattgaaatggattgtcattacattcgagataagattcaagatggatccgttactacaaggttcgtgaactctgcacatcaattggcagatgtcttgactaaagctttgggaaaagaagtctttactcctatgatttgcaagttgggagtacaggatatccactctccaacttgagggggagtgttaggaaattaatctagcaaatcttctatataaagaagatatattttgtatataatagtttcccttttgtattcttagattgtagttagattggttggtgatagcttaattataggagagactatcgtgtaaccaaagtttacttgctgtataaatacatcaattgacatcaatgaaattcaattaagccaattcttcttcttttcagggtttctttagatactgtctctttggcttttagttttctttcttgcatgtttcttgttgggcgctctgaaggataggtcatccttccttgtattggctgattttttgtttgtttattttgataagaaacaacaatttcattccattgaaatattaagtaccaagaaggatgagacttccttccaagaagtacacaatcctttatacaaggataaaagaggctggttagtgtacactagttcaaaagatcatatctaactataatttacatagtataaaatctcctacaaaagaaatcatacatctagctccatgttttgctaagtcattgttggatgtttgcctaactgaggagcctaagagaaagaacatcctaactctgaagaaatgtcaataatttggcgcaaccgcccgtcaaacttccatgggcctctttctttcctagttgcccatgatatgacactagtggcatctccttctactagaaaattgcagaaacccaaagctttggcttgtgccaacccttccaaaagggctagaatttcttcctcaatggccaaaccccgacctgcaggtttagagaatgcctttaacactgctacaatgatctttaatcaacccttccaatcaagcagaatgaggctgaaaggaatacctgcaaaagtttcactactagaagcccttagtgaagaagagaaataaaacaagtcccaaactgcttctagagtcatccacctatcctaaaaaatccttgcattccttttccagcaattgctccaaatcaaagcaaggttggcaatgcgccaaagagtcctgcttgatggaagtcccccaaaacatcttaacaatgtaatcagcatttcctccccttttttgggtggaacccaatcaattcctgccagtcaaagcaatctacaccatattggctgattcatttattaatgaattattttgtttttaacaaaagaaagaaaaaaaaagaagggaatttcatctttcattgccttgtttaagtgggatgtcctctctataagctgtaatacttgtccagatcagtaaggtgacattcataaatcattttgaatttttaacctaatctaatgaatatggatttgtttatttcttcttctgggttaactcacatttacattttcatctgatagctgtggttgtttggtttgtcgttttcaggttcaagatctcattgtggaggtgagaattaggggaactgattcatagtgcatggtttttatttggcattagtattaacttttttgattctttgaccttattttggatatataatgttatccattctcagaacttggaaaggggagcaaaaaagtcacaattgttggagttgccacttctg

SEQ ID NO: 11770 - DNA, 6428 bp, Vitis vinifera
  Intron number 3 from transcript GSVIVT01018462001 (locus G SVIVG01018462001) derived from phytozome v7.0 (chr-ID chr1 6; pos 14731277 to 14737704)
tgattcggccggtggggaaattccaaagagtggtggtataagcagcacgccgagcatgaggggaacgatgtgttatgttgctcctgagtatggtggtggtggagacgtgtcggagaagtgtgatgtgtatagctttggggttctgctgctggttgtcattgctggccgacggccacttcaggtgaccgcctcacccatggcggaatttcaaagggcaaatcttatatcttgggctcggaaccttgcccgtgctgggaagcttattaatctggttgatcagtctattcagtctttggaccgagaacaagctctcttatgcatcatggttgctctcatctgcctccagaaatcacctgcccggcgtccttccatgaaagaagttgtgggcatgctttcaggtgattcagagcctcccaagctaccatttgaattttccccttcacctccctcccgctttcccttcaagtcccaaaagaaagttcggtgagttcctaatgtttggtatagattttcatgaacagtattatactgcagtagagcattattttatcatctttgtggatgatcagtgtaaataaaagaattttttacgtttgatgaatgcgggccttttccctttcttctttgtgttgagattgttgtggcaaaaaaaatccatagttcctgtatagtcataattgaggtacaaagcaaaccacacgacccctcttcatttttcctcttgcactgagtttcagggcttccaggaataattggatataaatatttagctatggcccatgcctttagtggtgaggtccgggaggtcatctaaatcagtgtggatctcatcagtgtcctttgaattaaataagcagcttgctttttataatttgagtatttctgggccatgggtagtcctcccttcttgtctgctactgctgaaaagttggtttgatattattttatgcaggcactttccaacctaggcagcaggggaaaagttttttctgttattcatggtgatacctgtgatacggattttacctgccaaagttcttaagaagtcactgtaaaggggggtttctatgagatattacctatatgcattatccctcaactgtgttttgaaatggaaggaattgttaaaattgtgaattctgctgtttggaacccacataatttgtaatgtaaaagaattggctgaggatttggaggagcagagaagcccttccactttcccatcttgccctcttttttaacataacattgatgggcaaaaggtgtgagcaaaatatttttttttatatctaaaattctaaatgccaaatgagagaataaaatttaatccaatacctttcttctactttctagtcattaagtattccttgctcttaatgatttgacattgtccaatacatagaaaatttttcccaatcccttatcaaccctatatatgattatatatagccacacaagttctattgttcccctctcatttacttgtgggcagaaagaagcaataaaataaaaatatggttttttaatctatttgtatcaacttggtgtttgatgttcattagcccatgaacttggtgaaatagtctatgaacatactgtaacactggagagcaagtggattaaggcattgggcattcagatccttgtgatcttggcctggtatctgtggtcgaggggaatggagaacagtggaatcataacctatggtgaataactggatgatgttagtaggctgattctaaatccccatactcctggataagctctaagtttgttaggtggctttgcttattcaattgagggcttggaccaactattataagtcattgtggcttgcccaaaaagatgaagtattgtgaactggaaatggttaaaagaaaagaaaaaagcatatcatgcatttggttgaaccttgtgaacagaacaaaaagctatttctttgaatgaacattgtggacagaaaaaagatgattctttaaatgaaagagtttggtagaagtataattggaacctgtgatactgaaacctgttaattccttttatgtactttgtttcaaaaagttcattatcagttaggcctttcttcttatctgcagtctgggtttcatgatcacatcagggatcaccttttattgttgttgttgatttagtgtgtatttaatcatatattcataaagatctcagtttattacagaatttcattacagaagagaataatattcaaagctacaagaaggaagtgagatcctttattaataaaagaaccttgcacagggcaaaagaggctcaataagaaaaagaaacattgcaaatgcaggtcaactttattttgccaaggctgtggtggcaatattttgctcaactagtgaaccaagttctctagagaattgggaattgggaagcaagacatgctggtatagttactgtctgtgggatatgtcttcactgtattttgtcacaatatatgcacacagacacacagacacgttacaaaatttgctgtcttttcatgtgctttcttgttgtattttagtggaggtgaatgaagatatctttgcactagtaataacttctagttaagtgagtgatgatttggatgatatgctatcatctgaacattgtgtattttagcttatgttggtccttcaaggtctccaaatttgcagagctcaattgctcattttttctgttgtatcaatttatcaaagcttcaagaactcttaatagttagcttctttgaaccaagtgactatgtagctaaacaaaagggaaattctgtgtgtgtgcatgcactcgcatttgtgtgtttgatagttatacatttgactataaaatttcccaaatttcattttttttttcattgcaatatctgcaaattaactaataattttaaactcacagaatccaaaaaatattcccaaatttccctccaattagctgaacttcagagaaaactgcagatatttgtatttgaattaaccttaatttggcgttgattccctgtttgtaattggattctggccacatggttgtgttagccgtttttgaatttaaagtcatgattcctgcttgaccatttatctaatgaacaaatttcaggcctgttagtgctgtacctatggggatttatataattttgtctcctaaatgttgttgaactgccttacttgctttgtttgattaagaaaataaatgaaacaacaatggaatctttgaatttttacatttctgattgtttggttacagagagaatgaaatatttcacacttgatatgtaaataaataaaatgatggatgtggtcgtggtaggtccaaatggtagaggatgtggtgaaaccataaattgtggttgcataccagttgctttagtataagaggtttgtcactattccatggggtgatggtgcttcttgattcattctcttctattttctgaaggcaaggaatccattgaaagcagaatcatattgaaatgctctactttttttcctcttttatttgtgtgtggacttggttaaatataatgcattcatacaaagatctgtttctgaagttcaatggtgccagtttagggtttgcaaccttaaagaggtagctcacaagactgcagctgtttgtttgaatcaatgtgttcatttgctacatgaagttccctgcctcttgtgaatcattgttgtatgaatgtgtttttgtgctctgtgaagaacatgataagaaactcaaaaatcttagcacatgttttttattgtttgacttgtataatatgccaaaagtggatagatctatgcaatacagtcgcaactccttgatttcttggctgctttatggtgtttcctgtgtcttgactataacaccaaatttgaaagcaacttccaaaaatgaaaattaacatatattaaataattcttttgtccatcttgtattcatcattcattttgcaagtgttttgatattaatgcataacaccagtacgagcatgacagtactactgttatttaccaaagtgtcattttcccttgaaataaatggagcctgcatgctttattttcttatggtttttgttcccttttctttagttcttgctttatattgactggccatatcataacaaaattcagtgggaagaaaatttcttttctaaccctgtttcttttgcttgaagtactggtttagtttatgacttccaggataccttccagagtgtgtgggagagattccatgttatgatctataaatggtacatagtctgctatttttagagtatgtgcaagaaatgaaatcctaccagttttgtgctaagagttaaaacaatgtgcttgctggaccagtaattagaggccattaggattgttgtccagtaattgttctgttatagttaaagccattgatgctgtatctgccttttcctatgagtttagattttgaattacgtttcctcagttgtagatcatgcttatcatataactggaattattcctctgccttgttggctggcttcatagctacaattcttggaattttttggcagtcttcttggtattctcttgatcaatcttgatcattcatccacctcatcacgtgggctcttcaaggtttgcaatttgtcatgtttttgatggttctatatatgcttgttttggaagatctagattttctgggctgagttgttggagggccttattgtggattcagttatgtcatttgtcatttctttctacctttctacttatgttttttcatttttcatttttttcaaaatacatttctatgtaccaatgtttatgctacagtaccataactcccatgatatccatgaaagttttatagcatttatattgatattgtgaaccctattaggaaaggggtaatggaggattatgggagcttatagcactgaaatgcgtttcatgatcttggtttaaggcttgaattaaagaagttttatatttcataaagaaatggtaaaattcacacatttgtgcataaaaattcaaaagaatattaggattatccaaggactaactggtgaaaacttgctgcctataatcaccagtttacaacctggattcccatagaatacatgaagttagggtgggaagacttgagaagaatgtaagtagttgcagtcggaaggacacttccagagacaattaaaattcttaatgcttcagtctggatccataaggcatggtcatgaaattcttgctgcttcagcaaccttgctgtcttaattaaaatgatattgaccaactttgctttgatctttcgctatcttttaaagcagttggtggtggtaatgtggcactcgtatagcatagcatagcatacagaaattagaggtctgtgttcttttgcatcttccccccagtcagcagagttctgtaaatgttcaactgtttataattatacttgcctttcagtgaattcatcctattcatagatgattgcagagacaaagagctgcctttgtgtgggtatgccctagcttcctcagttctctgtatttatttttctgcagttctgtggttttttttagtcttgattttgcatctctgtattgtagattttccaggcttgatcattgtagttctccttttcttatttacctagctttcagtgaaacagtgacaaactcatgatcactagctgaggcaaaataccaacaaaaaccattttgctgagcattctggttgtcttgttcatcacctcccaattgaggatgatgaatataatgcaaacatgaaagttttgtaatggttttttggtaagcaatagatctggatctcctaattctgatatagggaatacagattattagattcagttgttgaactgttctgcaaagatacagacatttattgctaaatggataaaatggttggaactttggaggctgcttgtgtgctatttcatcttaagatccagtggttatcatactgctgatttttcttgtttcagtttagctgaagaaggttgagaaatgttgcttggacaatccagaaacaaagcggttttgaagcaactgaagacccaactatcaaaagcatgaggaagaatctatgcaggtgaacttagttttagatttgcattgacaattgaaattttttttgttctatgaaaattaatcatattttgatttggaaaatttaaacagaaaaaaagagttatctaacagggattttttattttcctgggaataaattgtattatgatttggaaaattgtatcagaaatctagagctatggaatggtgctacaatattctgggttttgttcataaacttttccttcaaatatgattgtgggtgagattttctaactatgctgtgtgccaaaaatctagctagtttggatagataaaaaagtaagcagattgtctttgctactggattggcaggaggctagcaccatcaactcaaccgaccctg

SEQ ID NO: 11771 - DNA, 9790 bp, Vitis vinifera
  Intron number 5 from transcript GSVIVT01019145001 (locus G SVIVG01019145001) derived from phytozome v7.0 (chr-ID chr4 ; pos 16208045 to 16217834)
ttcaggtatttgagttatcctcttctctccctccctctctttggcatttgataatcaatttattgatcttacttattatattacaagcacagaaaaaaggttcattttgagtacatacaaactacacaagaaacacctgaaagggaacaaaggaaaggaataaaactcttcattccagtgacaatccaacctgataaggatattcaaagaagacctgctcctttaatttctaaacaatacccttttttcctaccctagtaattcatcccctttattgtcttagatatgccagatgtctcagtgtgtaagacattggatagatttctatactcaaatgagtaggagcaaaattttccttataatcttcaagaaactcttcctagattgacatctaatcattgcccgattatcttagacaccaattcactcaagtggggaccaactcctttagatttgagaacttgtggttgctccatccagctttcacagatggttttactagttggtggagagtttttcggagcgacggttgggatgggcagttcatgagaaaactacattttgttaaatccaaattgaaagaatggaataaggagtcttttggagagttaaagaagagtatccttaatcatattactagctttgatgcaattgagcaagggaatttttctctttagctcttagagcagagggccatgcgaaaaggggagttggaggagttactgttcaaggaagaggtgcaattagaggcaaaaatctatggtgatgtgggtaaaagaaggggattgtaattccaattttttttcatggggtggctaatggtaggtgtaaatgtaataggaagtatatcaaggtttacattttggataacattgatggtattttagcggagattttgcatttttttgaaaagctatatgcgagatctttggagaagctcctaggcttgatggttttgccattattgtgttccaagagtgttggaatgtgagtaaggaggatttagtgagggtttttctagaatttcacagaagcggggttgttaattagagtacaaatgccaccttctttgctttagtgcccaaaaagtgtaaaccaaaaggattttttattttaaacccatcagcttgactacttgtttgtataaggtcacagccaaagagtcaagtatgtccctatgtcggatagtgccatcacaagtaccttacaagctacttgcaaagagacttcagcctttggagatcaacctatggacactaatctcttttatctagatggttttgacataaagggcctactcctagcaatggataatgtgaagtcatctttggctaccatgggtattagcctcactaattgtagtaagtgttcttaacttcctattgaaactcacaattagtctaggcataaacttaaggtttgttttgggaaattcaatcaagctaatccatgggtgtaaggcggtcaagatttaaggagtcttgtttattgtcggtggggtattcttgttttatgaagataaattagttggaatgttcattgattgggatctaggaagaaaatgaaggtaatcaaagtttttttttatttatttatttaaaggaagctccagatgtaatgcttcaagagaaaaagaaaaatcaatataggctcttagtgagcagcctatgaatggctagaaatggaaatagagagtggaaggagttctcggcttgtaaggcctctagaggtgtaatgctattttgggatattagggtcttcaattgctatgaggtcttggtggtaggaactttctttatttcagtctattttcctacaaagttgtgaaatttgagtgtgagatggagagaaagggaggtggtaggtgctggttcgctgtggatttgaagtctttcgagattttgatcaacaatgttgggggggaagctacgtggtatcatcttggagagaagtagaggcttcttcaggatcaggtttggcgattccagtttgaggtgcttgttggagggggtggaagtttgttgcagggaggaaagacatgtgaaagttgtaaaaagttgggaaggggagggaaggaaatttagattggaaaggcatgctaacgaggcggggaggtacattctttgttttgtccgtgatctagaagagaagagattctgtttggtatttccggagggtagagggattctagggaggtgggttttgttggctgacaagctacgttctcttggtattgttacccctacccctattgaagacaaggtgggctttggcactgcatgtgtcaaagaagaaaggagagatgaagtccaggctgaggaaaaggagaagaaacagtcttttgtttttttttttttgataggaaaccacgcgtgaatatattgatagaaaaagaagtacaaaaagaggatgaggaatcctcccgccaaaagtaaaactaaacaacatgaaaaaataacaatacactaggtcgtcccattgaaactattggatctacacactgctagtcaatcaagttgtaatacattaagggggatgcccttaaaacccgctaaacaaaaagcccaaaaggacgtaaggaaatgaatggaatcccaaagattccctgaatttctagctttgtcctcaaatatcctagcatttctttcccgccacacaacccagattaacgctatactcgcgttttgccatagaattacccctctcttggacttgccaaatcctttgtaattaatgaacatcagtcttttgttgaggttgcgaaggcaaaggctagaagaataggcgacgtagtgtggcttcaacttgggggcagagtcttgaggagtagggatgagcaattggggcgttgtcttgtggaacggtggggagaagtgatggttcaatttccagatttggcttggttaaggagataaggggtctttggaatttgaagaggggagtgagctttttgaatttgggagctagcctctttattgtagaatttgaggttgcagaggaaacataaagagtgttgagaagtggggccaagtggtgaaggcagagctaggtaggtgggagttgcttctgatttgtacgtcttgggtatggctaggggtgctgaggcaggtgcaggaaaagatgggagggggaagggagtagttgaggatactggtgttggtttagatgatggagaggggttaagtggggaaggaagtgggcctaaagctttttgggccaaatttgacaaagtgagaagcaatgagcatttaggagcctaggattcctatctgcgggatcttgttaggtttggcttgtggcccaagagggccttagattgggccattatatgggggttttaggggccggtgggcctatggtcttgagccagcccaactttccaattgttagttaagagggcctagcccagatggctgttgttggaggcttaaatggggctagggctcctaaagttgagtctttgtgtttggaaaggaggcttgttgaagtgattctcggtgctgcactgttggctgaagtgagtgggaagtctagagcagatgagtccctgttggaggaatcttctaggtattccctcttcaagcctcgctcttttcttagctttgggggttggggttcttcttctttttctttctttgggagggaaaagacgatggtggttgctaatcgggactttgtggcacttgagaggccgtcctttgtgaatggagaggggtcggttgtcctgttgagagtaatctgggtagatggaagtgagaggggagttttgattgatttggaaaagggggccaaggtgaatggtgggagagcagttctcgcaaaagatgttgaaagaggtttggaggaggaagaagggagtgttttgggttcgtggatgaacggtagcttcatgaatctgtatcgttgtctgggaatgcctactaaggggtttgagggggagattttgctgcttttgaaaataatggaagagagagaaaaaaaatcaagggcaatttggctagaaaaagaaggaaaatccaaaaggtttctagatcagagagggaattgaaaaaactcaagtgctcggtgaattacagtggtgctgggaagaatacgggagtacttcaacttgctaactgaagctgtcttgttggtgctgagaggtgtgtgggggtttttttttctgtttgcttaatgaagctgagaatcttatcgtggaacgtaagaggggctaatgataatgataaaagaaaggtgatcaatgcgttgattaaggctcaaaaggtggatttgatttgcttgcaggagaccaagatgcaggagatgtcgaagaggatagtcaagagccttggtgtgggaagatgtttagattagggggctatcaactctaggggagcctctagtggagttttggtgtttttcggataatagggtgttacatttattggaggcggaagtgaggactttctcagtgttttgtcggtgtaaaaactgcaaggatgatttttgctggaacttcactaaggtctatggtcctacactgaagaaagagagggaagacttctggggtgagctaggtgctgtcggagggttgtggggtggcctttggtgcgtggcaggtgattttaatgtggtcaggttccttgtggagagtagtaggggagatagactaacctatttaatgaggagattctcggagattattgaggatttagagttaagggaccacctgcccttgtagggaggttcttttacttggaagggtggactgaataatgaatctcattctaggctgatctgtttttggtctcgaatgagtgggaaggtcactttacaggggttgtccaatgtgtccttcctaagccaatttcgaatcattttccaatcctgctagatgggagaggagtgaggagaggcctaatgccttttagattcgaaaatatgtggttgaaggaggaaggcttcaaggataagatgtaggcttggtgggaaggtctcaattttagtgggtttgctagctttgtgttggtagtgaagttgaaagccttgaagccattattgagagactggaataggaatgattttggtaaagttgaagttaataaggctttggctttgaatcaggtggacttttgggacaaagtagagttaacccgacctcttactgttcatgaattggaagcaaggagaggagcaaaggaggactttaaaaggtgggttctcttagaagaaatttcatggagacagaaatcaagggaagtttggttgagggagggggataggaacactagtttcttccataaaatggctaatgctcataggaagaggaacttgatgtcctgggttaaaataaatggttcttggttaacagaggagaatgagattagagatggagtggtgaatgagtttaagttgttgttgtctactgcaggagggtggagacccaacataactgggctgtcttttgaaaggttggaggatgtggaagcagctagacttgaggagccttttttagagcaggaggtgttggaagctcttaagggctttgtggggacaaagcgcctgggcctgatggtttttctatggttttttggcagttttcttagggttttgtgaaggagggggtcatggggttttttagggagtttcatgactattgtccatttgttaaaagtttgaatgcaactttccttgttttggtcccaaaaaaaaggggagcagaagacttaagggacttcgggcctattagtttggtgcgagggttgtataagtggctggctaaagtgatagccaataagctaaagctggtggtgggtaaggtggtctctaaggctcaaaatgcctttgtggaaggaagacaaatcctggatgttgtcctagttgctaatgaagtcgtagattcgatattgaaaagcaatgaaggggcggtgatgtgtaagctggatataaaaaaggtgtgtgatcatgtggactggtcctttttgttttcagttatgggtatgatgggtttcgggtagaaatggctttggaggatgcagtggtgtatttccacagctagcttttttgttttggttaatgggtctccttcaggtttcttccaaagttctagcagggtggccccctctctccgtacctatttgtgattgctatggaggctcttagttgcctcttaaggagtgtcataaatggggttttttgttagcctgcaaggcgagggtacaagtggtgagggggttcaggtgtctcacttactattcgctgatgatactttggttttctatgggtttcaaagatcagatgatgtatttaagttgggttctaatgtggtttgaggccatttcgaggttgggaattaatttggacaaaagtgagctaatcccgatggatagtgtggaaaacacgggggctttggctgcagaacttgggtgtaaggttggaagtcttccatccacttacttgggattgccattaggtgcgcctcatagatccgtggttgtttgggatggagtggaggagagattgtggaagaaattggctaggtggaagagctaatacatctccaaagaagggagggttaccttgattcggagcactttggcgagtatgcccatttatctcatgtctgtgttttctttgcccagaagggtcaaattgagaataaagcatattcaaagggattttttgtggggaggcgagacccttgagcggaaacctcatcttgttcggtggggtttggtttgcttagataaaagctaaaaggggttgggggtaaaatgcctttctgccctcaataaggctcttttgtgtaaatggagttggagatttgctaatgagagagaggttttttggaatcaagtgattaggggaaagtttggggaggagcaagggggttggtgttccaaggaagtgagggatgggtatggtgtggggttgtggaaaacaattaggagggagtggattgttgtaagtagtaggctctcttttgtggtggggaatggacaaagggtgaagttttggaaagatagatggtgtggggattcacctctttgtgtttcttttcccactttatttgctttagctatcttcaaggatgcttgggtcaaagatgtgtgatgttccattgagggaggggggagttggagtccgcacttctttagactgtttaatgattgggagatggatgaggtgcacaagtttttttcaagccttaatgggaagagagttcagtaagaagtggaaaatagggtgctttggagagagactcaatgtggaaagttttctattaagtctctctacaaagcattagttttaggccctccagtttctttcccttcaacggtcatttggaaagtttgcgtgcagcctagagtgagtttttatgggtgggaaactttgtggggaaaagctcttactttggaccaacttaaaaagaaaggatggcctctagcgaacagatgctacctttgccaaaggcacaaggaatcaatagatcacattcttctccattgtgccaaggttaggactctttggacattgtttttctctctttttagggtgcagtgggtgctgccagccacagttaaggcgacgcttttgggctggaacgggtttttttgtgggaaaaaagagaaatgaagtttggagagcaagcccattatgtcttttttggacagtttggaaggcaaggaacaaaattgtgtttgaggaagaagtgttgtcaatccaaagacttaagagttcttttgtatatttcccttagttggagacgaaattgttcataaaagatggtccttcgaccttagttgattttattgattgggtaggaaccccttgagggtggggttcgggttgcacctccgttcttggtaaccagttggggagcgggggatgtttcttctttgtattctttaagccactgttttggtggcttttttaatacagtttttctcctttacttatcaaaaaaaaaaaaaaaaaactttctttatttcagtcaaactttcttctaatgttataggaaatttttggttctcttcaagttcaatctatggcccagttgattctactcttaggaaggagttttgggaatagttattttatctttttggattaacttatcataggtggtatataaggggagatttcaatatcatcataagggtgtcaaaaaaggtggagggtcttgactcacccttagtatgaaggattttgatggttttattacaaaatgtaaattaattaggtcccctcttaaaaatgcctctttcaattggccaaatttgcaagaatcccctattcccaaaaggttagataggtttctattctcaaatgagtggaaagtcatttttcctcatagccttaaagagaccttatgatccttgcctcaatctatcatttataattcccaattgttctagacaccaatccttttaaccggggttggttccttttagatttgagaatatgtggttgttccatattgattttaaggatagtgttagctcatggtggagagatgtgatagtcgaaggatggaatggtcataacttcatgcaaaatttgcaacacatcaaagaaaaattgaaaatttggaataaagccagttttaaggatattaaagagaggagagatgttatctttagtgacattgccaaggtagattctagtgagtggggggtgctttaatagtcgaattagcaatgttaagggatgaagtggaagaacttttattgaaggaagaggtgcattggaaacagagagctagtgtaaaataggctaaggaaggaaggggattacaattccaagtattttcacaagtggcaaatggagaagaaaaaaaaattaagtcggtggtgtttgaagagggtgttgttggatgatcaaatgtggtagacctagagaggattttgagcctttttgggagattttgcaacgaatcttgtgaggatccttggaggataacaggattagatttgtccccaatttctgaggagagtgctaggtgaccatgtaagggattagtttggaggtggattgttgtgagccaatgcagtaggttggatcacccatttttgtgcatgctaagatccataatattcttttaactgccttgtgtacaatttttttttattttttttttcatttttgcctttatgtttctttttggttgcccttattatcattcagttagtgctaggtgaccatgtaagggattagtttggaggtggattgttgtgagccaatgcagtaggttggatcattttattttttatttttcatttttgcctttatgtttctttttggttgcccttattatcattcacttagtgctaggtgaccatgtaaggaattagtttggaggtggattgttgtgagccaatgcagtaggttggatcacccatttttgtgcatgctaagatccataatattcttttaactgccatgtgtacaattttatttattttttattcatttttgcctttatgtttctttttgattgcccctattatcattcagttagttcttcccaaaggcaactaataggcttaataagcacattagagcatagtaataaattttttgagtaacaaatttttctgttccagttatctgattaatgaggatattcttgttgaggtactcgatgtctcttaacatgtagagactgattccagatttgctagatttctgacactgcaatgaacagaatatgttgatgacttgatcttgtatttatgaaataatttatgctgactcttgttctacctctctgtcagatttcttttagcacctcttcagttggacaagtacc

SEQ ID NO: 11772 - DNA, 1471 bp, Vitis vinifera
  Intron number 8 from transcript GSVIVT01014327001 (locus G SVIVG01014327001) derived from phytozome v7.0 (chr-ID chr1 9; pos 2686770 to 2688240 reverse strand)
aagctttcacgatccaaactagttgatttgatcaggtatagctattccacctggactgaatctgcttcatgtattcttgtcaaattttcatctcctcaatttccttcacaagttggcatttgtatgattgtcttccactaaatttcaataatgttagtttcattgctagattgaactgttattgttcgttcaacaaattggtctttgtttcacttgaccaaaccaccgtatcttcacttcctaacatcctgttctcatttggtgctacctctagaccagcatctttgtggtaataagttctattgaattataactgatcatgtcattacttcaacattcttactgtgctattttggattttggaacgatctactattacctttgcattaaacaagtcgatgatgtaaatatacggcagcaacaacatttgatggtatcaaaatttatgcaagttttaagtggcacttaccaacagattgaggatggagcatgctttgtattaggggtgtttagttaatttttttagcagatatgctcttagggaacttttgcccaaaaaagtttgaaatgacaacactaaactacactttaagtttcaggtttttggttatgattttgtttcattgtggtcttgaggaaaaggaaaactgattctgtgggttttttgaattctaaaattattttgaagacttgcttagtaattttctcttatctttagtgcaatctacaacttggttttaattgtgatattggatctttgattgtcttgtattggatcctgaactatttagaaactttggagagttaggcttttcatgttcctttaccatcgtgagatacttatttaggatagtagtgaatagcgtgagtgtttagctagactgacaatttcggactaaaacttttaagcgtctcctagctcgggtttttttaatccttcctcagcacccattcaaaaccaaccctccttccccttctctaagtgtagtccatcattgagatttatcctcaaatagtattatatttaaaaacgtgtatgatatatatatgtagttttttgataacatattttaattgttttatgaggtttgtttaaaaaataattgtataattatggagaacgattacaaataaagcattataaataaaagttatttttaataagtatttaaaactatagaaaataggtcgagaatattctaagtttccaaacggatttttgttctagaaaacattataaagctgttttttgaatacatttccaaacagttcctattgtttcagcattttgattttaccccattgtttagatgatagttcatctttctctcggatacaataaatctctgtattttaattgagtgaccagttttgttctttatagaactgttttatatagctgggaaaacatttgcatagcctcacttgaaaatggaggtacaacaatttgaaattccttctccttttagta

SEQ ID NO: 11773 - DNA, 4535 bp, Vitis vinifera
  Intron number 12 from transcript GSVIVT01022379001 (locus GSVIVG01022379001) derived from phytozome v7.0 (chr-ID chr 7; pos 19361080 to 19365614)
cctggtgcaggtttcttcaatcccttaaccataaggtttggtggaacttgcattcctttgtattttatatgttcttttgttccataaactatggttggttggctggatagaatatatatatcttggaatataattttcaataggatataatatccttggattctatgtccaatggataatgatatctaggatattataaccaacaagatatgtgatatcatgatagtgtttggtttgtcaaaaggaacaaaaatttgaataaaaaagatgccattttaatattaagttatttttcaaataaaaaatatattgcttccaaatgtttgggtttttggaaaaaagtatgaaacctctctcatatttaacattatttgaagatctctctatagtttatttttcaataggtaaattttattttattattaattaaaaatgtttaaaaatttgtaaataaacaatattacattttcgaaccaaaaatttaatttttttttaattaaaatttcttgtctcataaagtgactaaaatgaacagaaaaaaaaaaagaagcaaaatagaacatatagatgaaagaaagaatttgttttccatgggatgtgcatatcccatctcttttaatgggattattaaatcttatgtataaaggatatgagacaacgggtgatatattatcctatatcttattccattctcaactaaatgtgggatagaatagaaagtgagataacatatcctatcccattgtcgattaaacatgggatagaatgtgttatctcatttcttatccaatcccatgttatttttaacataccaaacataggcatagtggtttggttttgttttgacattttttgtcttttttttttttaattttttttacacaatgtgtttttttgcatattgctttagagtaaatcatagtttgttgagtgattcatcctatgattttgcatggtagttgatggatgctttgtaaaagaggacataatcctgtgccatctctaatttctttagttaaatttccgtgcttatagcatggttaaaattgtaagtccttcagaaggatttgtgtggtgccttacgtttgaaaggtacaaggtatatccatagttaaaattgcagaacttcaatcaacttctaccaacttaattcaaaaggtttcctttcagatgaattttggaaagaaactgttagttcctcaaatggtttcaagaaaaatcataaaatatatgctttcattgatgcattaagatgatgatccctatagatcgcctttaggttagattttaaattgtttaggttttcttaattgatgggaaagaacccatttgtgactttaaatgtattagagtttgaaaaaatgaattattgtcataatctactattactatttatttaggatacacattatgcactagtagacacatatatctctttgacacctaaggacatgaatgacacttgttgatagaaaacttttaatagggcttaaactcatctactgttcaagttgagtcattgatgggaaagaacccattagtgactttaaatgtattggatatgtctacgttagagggtaaaaggtgttttttttttgtttggtattgaatgagcatggttctcttaaatgtagagcttagttatggagtttctctcacctgtgaagtttggtagaataatttccaactaatgtgaaatatgtgagacatttcatacttttttcaatcacaaatattaggatgcaatatatatttttttgaataaatattgaacattgaaatgtaatatgttttgcatttattttttattctttttataaatcaaatataataccttaacaggccatttccattggatataatatccaaggatattatatcatattagaaatgatatcctaggttagacatatcatattcaatgggatatacttatccaatgctatacatatcctataaaaacaatttggttgttgttttcatgggatataaaaacaaaatttttataacatttccattggatataaaaacaatttttttttaaaaaaatttataccgctatttggttcaaatcaagtgagactttgtattgaatttattaataagttttaataattttaaaaaaataatttaaaactcaaaatatatatatatatatatatatatatatatatatatatatatataatgactataaaaaataatagacaattaatttttaaaattctttaataaatcttgtaatttttaagaaaaatttgaaataaaaaaaactaattaattaattataggttgaataaaataattaattgagtaataaatgtatgcatataataaaaaattagtgcatttatactttaaaaaattaaattttatttgtttttatattcatttaaaatagaatagtattaaaattagtaatttttaataattattcattattttgaacaaaataaattaattattcttttataagatgttaatatccatattttataatatttataaaatcatataaaaagtattggaaattaaatattttgaattattattattatttatttttaactaaataaatcaattaatgttaatatctatatttttataatatttataataatataaatatttgtatcaatattcatagtttattaaaactatttattttttaatttatttgtaattaaaaaattgtttttatttttaataaggcatgaattaaatttagtttacattatataaattgaatttataatttgtgtttttttacaaaatcaaaataaaaaattatttttaaaaacaacttatctaaaaaagtttttagttttttaatttttaaaaataacttacactagggaatcaaaatacctcttagttggagacctacttattttttttttgataagtaagcggagaatatattatcaagaggcaaaatagccgcaaagcatacagggagtatacgaggcgactaaggcctcccaaccaaaaaagaacaaaacaccccaacccctaagtggaggctaaccactccaagaagcctataagggagatcggctccacaccaatatacaatttagcccaaccccagacattacacacaaacagattttttaacttctgaattgctaacacccccccaccccctaaaagctagtctattcatcttcttccaaattgtccaaaaaatgtatagcgggatggacttccacagttttttcctttttttttcccacaaaagagcccttccagctgaataagacctcctttacagattctggaaaggcccactgaacactaaacaacccaagaatgatatcccttttagttggagacctacttataagtaggatttcatttccattggaatcacttttgatgccattcccatcatgatttaagttatccaaacatggaaatggaagagaaaatgaatgagatattcattcccactcctcattccaacataccaaacacgccctaaagatttcaagggcacaacacaaagaaccattaccacataaaagtaatatctaaaactgtcttatgtaaagcatataatactaattgctcaacaatgtcttcattttgattggtgatagattgaacatattagttgggaaagctctaacgggtctttggacctgaggttctcattggcattaatatttttatgacccactggtcaggtgaagaactttacttttaaatcaacttggttgtaccaaaagtgttaagatatttttcttttttagaaaggacttgaaagagtgatgtcaaagtggaaaagcatagctatccaattccaagagctttcatccatatgcgaatcattctgtagaatcagcatcaaagaatataggagtaaacaaagattataagtcttatgattgtttgaaattttgaagaaatgaaagttctaatagatagggccattgctgtggttatcagctgactaaagctgatatagggttttgtccttgcaaaaggagataaggatagtgttattagctgaccaaagctgtggtaccttcatgctctctttccacatagtcatagtccttgaaattcactgtcaacacttaaactttcttattatatccataacaatcttccacaatttcattgaccagcaagaatacatcaaagtgccttgaacctggatgatcgtgtcacgaactatcttgtgaagcctcctagtgagaaccctagcaatattcatgtacaaactagtgaccaagctaatgcgtctaatctttagcgaaagttgagaacacaaatacatgctttgttaaggtttctctttttatgtatcttgattacatctggacatatctgttagattttggattttttatttatatctggctttcccatttcttttattttttcgattgataacaatgtgattacacttttgatggtacctggcattaatttatagctctagccttttttataacagcaatagtgatgttgctagtgattcattctccaacatcaatctgactcttgctctgatataggtcaaagac

SEQ ID NO: 11774 - DNA, 7668 bp, Vitis vinifera
  Intron number 8 from transcript GSVIVT01015580001 (locus G SVIVG01015580001) derived from phytozome v7.0 (chr-ID chr1 1; pos 5191450 to 5199117)
cggcactcacacagacaatttgtggcaatctgaaggtgtgtaatgctcaattactgtacacacacagacattaagcttttgtcatagtcatgctattctgtttatactccagtttggccttgctcattactatcaatttaagattgttctgtccatggcttccttgtgattcaaatcaagtttgttgattcttggaccagtagcaactgatgagatgactacatacatctgataaatagactttttttttttttcctagcatctcatcactgcttactgtgcaaggaaatacaattattaggttatcacaattttcaacgaggtttgcttcataaggtgtttgataaccaaaatatatacctccatcattaagtgatgtatcactaaaaatgtttaattcaaaactgaccaaggaaaatgctgagaggattttaaaaattataccctctttttaaaaaccaagttcctttggtttacaatccttctataatgaacttcagtcccaatagatatgtcaattctaatctctttctaccttgccatgttgattataaaaatatcttatttattgtcaaaatgtgttttcttgtttataaggccaaagacataaatgtgttaggtaagattgtgtttttttatttttccattttttgtcacgagcctttgaaatctacaactaacaaaaatgttgtcatgttaacattaatttaacagacaaattgttaaaaacttatgatacaacaatttttaagtaaaacaatacggaggccaccggtatgtatcttaacaatatcttataatacataaatgatacacaatatgatacaaaatacaacatataggcacctttaacttttttttaatagttttgaagaaaaatcaaattcgagaaatgaaaattctttaataaactatcttatgaattgttgaaaatatatttgaaggtagaaattgatgatgaaagggcaagaaaacagtaaagtaatcgtacatgagaaagctacacacatgttatcaaaaacataggtaaagtcttaagacttaagtttgttctagtaatgaatattaagaaatgttattggaatgattcgaatattgatctcaaaaatggtgatgattgagaattttggttgtgcattttcaatgatttcattaattttacctaatacacggtgggaaatggtagaaaactctgttttttgggaggatattggttgggtaattgacctctcaagctttagtttccaaattcttcagggttgcaaagattacaaatttgcttgtttccgttgttctatttccatcctctacctatccatttttgtattttaattttcattgaaaccttttcgatctaggaattgaggagctaactgcccttctttctttcgtgttacatgtgtatctattaccttcctttgtagatgaaaggatttagtcattaacacctttggaacttttttcagtgagttcatgctttaaagatagtgtgaggaattgttgtcaaggaaagaggtgcattggagacaaaaagccaaggtgaggtgggtaaaagaaagggattgtaattcgaagtttttccatagggtgactaatggtaggcataataggaagtaaatcaaggtattggagaatgaagaaggaccacttttggataacattgaaagtattttagatgggatattgcattttttttaaagttatatatgagtccccttagagagtcctagagattagaaggcttagcttggtcacccatttcagtagacaatactatttggttggatcgccccctttaccaaagaagagatcctcaaagccatattttagttagataataacaaggcacttagtcttctggtttcaccattgctaatgttttaagagtgttagaatgtgattaaggaggatttattaaggttgttcttggaattccataatagtggggtaatattgaagccaccttcattgctctagtgccaaaaaagagttagaccaaaaagatactggattttagatctattagcttgactgatctattcttcatgaaactattcatgttttacaaggaacttttgttcaagaaagacaaatctggaatacagtgttgatggccaatgagatggtggatgcgaaatgacgctttgaatagaaaggagtagttttcaatattgattctaaaaagacttatgactatgtgaatggtggttttctagaccatgtacttgaaagaaagaggtttagttctaggtggaggacttgaatgagagattgtttatttatgaccaattttgcaatcttagtaaacaaaaatgctaaaggttgggttaaaggaattagaggtctaagacaaggagatccaccataccctttcctcttcactattgtagtcgatgtgttatgtagaatgttgttgagagtagtggagagtaggttattggaagacttccttatgagttagagtgtcccatttgtaatttgcagatgacaccatatttttttctagagtttgtttagaggatttgcaaaatcttaagctaattttgttagttttcgaacacatatttgggcttgagatcaatcttgtcaagtactctctctgacatcaacacaggtcaagattagaacactaggttagtcttgttgcttaactgaaaggtctaattagtctctcacctatttgggtcttccattaggggaaacccaaaagcaagtgttttttaggatctagtaattgagaaaatttcatgaagattagatggatggataaaaacctttttgtggaaggataactcttatatagtcgtgtttgtctcatatccttagccttagctattttctctccctttttaagatgccttcttcaatggcattaatgtttgctatgtcaaagggacatcttcaactctaatgtgtactatgctattaggaatgggaagagagtgaagttttggagggatggcaatggtgtagtcaagagttccctaatttgtatgctttatccaaggcaaaagaggcgtgtgtggctgatttgtgggagcaaagggagagagagagagaggggggggggggggattttgctaagaatcttaatgattgggagttggattctatggagatgttccttttgaagttgcaagggcacttggtgaatagggagcaaaatgataaagtggtttggaatggtgatagcaaaggaagtttttctataagatctttctacacgttgtcagaaccagattgtgctacccattttttggtagagattatttggaatccttaggttccctctaaagtgaggctctttacttgggatgcttgttggggaaaagtgttcactttggactagcttcaaagaagaggttggtcgctagtcgacaggtgtgtgctttgcaaagaggagtcgaaaacaattgaccacatccttcttcattgtgttaaggcaagggtcttatggcaattggtgttctctttatttggggtccaatgggttatttctagctcagtttgcgacaccttcctagagtggataggttctcttgtgggaagaaggtgtagttgaagagtgacccctttatgcatattttggattatttggaaggaaagaaaccgaatagtatttgaaaatgtagagatgttagatcaaagtcttaaaagctctttcctttacaaaaatgattcattgagtaaactaataataaaataagaactaacttcattcaaaaatgaaactttcgttgcatcactatgaaaagtgatttttcaaaagaaattctccccataagagtacccatagatgagggtatggagccaccgtcaatatagtttagcttggcgagtgcaagttgttttttttgtggccgaggtcctctcggttgttccatagaagagggttcaccactcccttatcacgacacatgtcggcatttcaggattctccccaagcgtaatagacaggttttcacgtgtaagcctgccccaggatatttatttatccctcgtgattcaccattgctcctaaaacaaccaacactttcttgtctccaatcccttcttcggaggcaaattggattgctagaaaatgcagtccacccaatgctccatccgggaaaaagattcgtaggtcattttatgataaagttattccaggtaatctctaagtaccttctatcaaggagagagtgactcttacatataaggggcatgaacggataggagttctcttctagagtagctgttgctagggagtccaagggaactcccctggcagagctgctgaagtccgggttggaaattcggtaatagtggaggactggcattagggccccccaaaaaatatacctctagaaagatcagaagtaatcagaactgtaattgtatgtacctataaagaactcaaatgggacaacggtatgataatacgatatggtgacaatgctgcagttattattgatcaagaaggaaacccaaaaagaactcgaatttttggtgcgattgtccgagaattgagacaattaaattttactaaaatagtttccttagtccctgaggtattataagatgagaccatgatatagttatagtaagcaaatgaaatagattaattagtagattgtgtttcacgcatatacctttaatttaatatttaatagaattcataaataaaaaaagaaaaaagagcatgttggttatatcaaaattaacaagcaccaataattttagttcatcatgggcagggccactattgctgattgtggattcgggtgtacattaatgggaaatctttgttcttagttgattatgtagattggttaggtccttcttgagggtgggagctatttttgttttctctcttggtcttttgtttttgtttttgtttcgatatactctcgtgcattttttggtctttaatacaatctcttacttatcaaaataaataaataaataaatggtattaaagatcaataaaaagcgaagagattttctttggttaggagttggggagtgcaagatagaccatgtcattaattgggacctagtgtgcaagtctaaggtggaagtgggtttggggtttggaaaatttctttaaaaaatcgtgctcttttaaggtgatgactatagaggtttcctagggaaagttatactcttgggcatcaagttatgatgagcttctatgggacacactctaatgggtggttacattgttgtccctagaaggttattgcacaagtcttttaggatttttctagacacactcgtttatggtgggtgatagggtgagaatccatgggaagatttgtggtgggggaatcaatatttgtgttcacaattcctaagtctatatagaattgtcatagctaaacttttagaagtttattcagctattaagatggagatatttgcattattgaaggtttcctgcatgctcaagctttgtgtttatcaatctaacaatagagggaggagggagaagtgggttcaaaaattgaggtggagatattagcattattggagggcttgttgcatgctcaagctatgtgcctatccaatctaaccatagagggagattctactattgtaatatcttgggtgtctaatagagagagaggctccttctcttgttgttaatcaagctgcaaactacttagccaagcaaggagcaaagcacttggtctccttggagattttcttcccccttgagtttatatagtttttctagtgtgtacattgccttttataaattgaagtcagtttatttataaaaattttgttttcatatttctttttttgtttaggagacaagtatagtgtatatataaaaaataaatttgcccaagtggttgaaggccatcttttccatggggaagagcttaggtttgagcccacacccccttttctttcattttttgctgctcaacatgccacatgtgcagcacaatagaagaaagtcactgattccctcatcgaaacttggttggatctactttttctcctataaattgtattggtcattacagacacacattgttgatgatcatagacattttaggccttggttagaactttgaagggggtatataaacatatacatatcaataatacatccaaggatttatgactagttggaacttgtaactaaaaattataattaaaaccttaaaaggcttattttgtgtctttatggatcaacctatgcattaaatgtcatattttgtgaagtttaattagtcaaaactctagtattcaatttttattcatataaatgatattgatgaatgcctatgttatgcctctttttatctttctttcatgaaattaataatgtattgccctaaacatcattttctaatattatggagttaatatatgtaggcatatttcttttttgtctattttatattgtttagaaaaaaaaagtgggatacgctctatggtataatacgcgatatggaaaagtagagaaaggatacacgattcacgatacacaatacacgatacacgatacaatttacgagttaactatgcattagaccatagaaactttgtatccttgcctttgtagttttgattaaaaataaaatgatgggatatgaaaatttatcagtttctttgaatttgattcatttgcatatttagaactcaaaattttctgcaatttaggaaaacaaataaggtcttttttaaccctatttttctattagcccaaaagaagcagatgtttctagatactgcattgcataacagccagtcatggtgctttgccttccactgcatgtagttaaccatacagtttagcaatgccatgttgaaatatttgttaacttgcacagttttcagaccttaactattatatttatggaaaaatttaactcaattcggtatttaaaatttgatgatagcaataaattttttatttctacgaattcagcatttctttcagtagttataattcaatactcaggtttctcaattttattgaacaccccctaaagatggctgttctcattccctcaatcaggaaaaatgtttatagtggcatatcaccatatcagtctgtcaattgtgctaggtgatttggagtaatccaactcatatagcaaatagtaggttgtaagtttcatacatcttggcactgtttggaaggccaatcaaaagattggcctgctgtttctagacccaatacataaatggttttatggtttccataagcacattgtggtgactgtttgattgtttctcaaaatgcccaggaattgctggctgttatttctgattcattttcattgaaggagcaagaaggatgttacatgatttcttcttcatatagatatgtaggatctgtggggcaattacttagaagtacattttatgcaacaacccttcctatgtgatagaaaaggatcccatgattttgaaccgattttaactgggatcataattggattagtacctatagttgatttcttctaatgctaatcagtgcccttgaatcaaatatctgtctcacgtacaaacattttcctagcatgcataagctcaaaagctgcacctcaaatgttcatcatttccgtgcccttggcatttaaaactaatccctatgcctgttttctgattaataattttgatgttacaggatctttttacgattgggcttggctggctgatatt

SEQ ID NO: 11775 - DNA, 2971 bp, Vitis vinifera
  Intron number 3 from transcript GSVIVT01018352001 (locus G SVIVG01018352001) derived from phytozome v7.0 (chr-ID chr1 5; pos 10657104 to 10660074 reverse strand)
atagagtcctgattcgtttgcaggacctacctgaggtatggttgctgctgcttctgtttttactataaaatttggagtttttcaattgaagtgttaagtgtatgtcgggattgttgacttatcatcggagacgttagggttttaggataattgatagtttaatatgatattagagccttggttcatggcgctttggtgttcgaggtcaagaagagacccgcacatgagatgggtttcaagtgttactggtttgatgtacgttattagcccaatttatgcttttaggtttactggtagtttaatatgagatacccttaataagaagtggccactggcaaggcaatgtgttaagcataacaagcttgttatacattattaggatattagcaaattaccaaatggcttaagctttagggttgaaggatagcctaatagaagtctaacattatcggggttgagctagagtcatctgggcctctgttaatatcttgatttgattagcttgcttttgagggttttttttctctctctttctgtactattcttttcagaagcttgaagttgaaaaagtatttaagccatcaattagtctgtgtatgatgttgagttttaaggtttaagattgtgcctactttatgtaactaaagcatgggtacaaatttgaatgctttgaatcaaaagatgagtggaatgtagtgtttgtctgatcatcataagttcataacacgtgcatttttcctgaaaagatttgtaatagttcctgtatatattgtgatgtcttttttaagttacccatttgaaccatgacttgaaatacttgtaaatatcaaattgccaaatattagtttgtagtaagttgcaaatctgtatgtttatttgaaatgggaaagatctggggagatgcctgatagtctttcaggttacaagctagggtgtaatgaccatgtatcagtttcctttgcattatattttgataacttggctgagcccatagcttaattccttttgtagtttaactggaatttgtaatatcaaatagaaatgtatttttctatttttggtggagtttgagatttgtattgaacattttttttttttttttttatgagcatcacttggaattgtaggcccctgtggctgtatgtatcactagagtgtattttgagtcctgtcatctagattaaaagtttttaatgccaaggttgaggcaaatttaaaatcttaatatattgtttattttggtgtttgttttgtttttctttgtcatttatcatatctttctctcttatttatataaaatgattccttcttcctttgcttgttgaattcctctacacacacatgtatttgtgtttgttcttatttttgtctaacatttacaattcttctctaggttgtttctgtttaacaatatataatttactgagctagatttgtattttgcaatcattatttgatggttgctttacttttgaaagaattatagatgtttgccagttggaacttaaaacttttaagatggcatatttattatgttgttaatactctgaccctttttttgaaatttctttagttttcatttgatcgttatccttttggaaaattatggtacatgggtagaaaaaagtgtgtttagacacaaccacaaaacccatagtgccccatctatggttctgttggccatttatcaagttatttatatgaatctggttcaagatgttgacgtcctttactgttgtttccattagggttcttgaaatctcttagataaacttgtcaaaggacaactttgttgttcacacttctttccttattttagcccacacttctttcctcattttagcccacaattgtttccttatttctccatttattattctgtacagttagcatatattatttgacagattatagtttacatgtatagggttagaatcatgcggggatttatttgcttttatttgctttccatgtatagcatccttgtaaagtctatatataatatacaaaactcaaggccaaggtattcggccattcacacaatattttgacgaaactttgtagagctgcaacctctgggatgaaataagggttagatgtcaggtttatatgggcaaacccttacaaattctagccatcaagagctctaattttatgtcccatacattatgtcaaacataagcattagaaagagagtgtagaattgtatattagctttcttaatactaatacttatataattacttgatggctatttagtgatatccctaaatgatgctgctgagtatagatactttgaataggatccctgaaacctcttagacagaatttgtgtggttgtaaatggtgtcccagagttgggaaagatgtgaggttagagcttctggctcatcaagagctctaacaaatcactcacattaaaatcaagcatttgtgtttccttgattgtagtcacttcctattatgatcccttggtgtcactttgatgctatccatccttcttcaaaacttacataggtttctcaccagttcattttcccccccaaagcagaattctcaatgatggtttggccacaatgatctttcaggcaacacctgatcttagataatgcaagattgctctatatggggaaatgacatcagaaaagtcacagaatcattattcttgaatattttgaatttcctgcatgtttacattggccaggataaatatctcagaggatgcatgttgcttgtttagtatttgttgcattgttctgcaggagaacatcctttctctctacctgagttgcttatatctgtgtccaattcattggcattgggtggaggtctattactatgccttagacaagtctaacttgttctaactgtatatgccaagaacacacaccctgtttataagctgttacgctgatgtgaaatgctttgtgctgcagaaatcatctggtggagttttgctgcccaaatctgc

SEQ ID NO: 11776 - DNA, 1304 bp, Vitis vinifera
  Intron number 1 from transcript GSVIVT01026014001 (locus G SVIVG01026014001) derived from phytozome v7.0 (chr-ID chr1 8; pos 25847709 to 25849012)
ctaagctgttcgcggctgaggaaatttctgcacaggtataatactgcttgtttcttgggaaaaactaaattttactgtgatgtgaggtttttggggaagtctacaagtgtgttgaattagcttagaaaattgaattctttagaactgaaattaaatgaactatttgtgtttggctctctggaaaatatttgtcagggaaattttgtcgtggaaattaggattacagagtgtctgcaattggattagaagagacaactgtttccaattgaaattggtagggaaataagaagtacttaccttttggaaaacaggaaaaataataatcaggctgtaacatgttataagaactgttttttaaaatatttctctgtacagaaaactgtttgtttccccggaaaatatttgttggaagaactttatgcggaaattcaataagctttgaaggtagatctattgcctctctcactttgaaagtcagttatggtatctgagatttttccttaaaaccaaccgaaatttaactgctagcaaaatacattgagctaatcagctaaatatgagaagaaacattttattaatcttaagaatgttcagcgacatctggaaaacacgtccttttagtaagaagttatcattattatattctttggaaaagctccttgtaacgaaggagaagaatgaagttcttattgtcgtatagctttacaaatcaaggttgagtggattttattttattctattttgattcagtaggcatatgtgctttgctttggttttatattctctcttgcagttcggttttacattgttttgtggcagtgtggtttgcttcagtgggcttgaatagacttcattatagtatttttaaagctattcaatctaaatggattctttctcatttataacatgtttaaagagaaatgacaaaattttgtctcatttatatgcaattcgatgttattcctcacttattgccagtctctagaatcttttgataatgctgtttaatttgaggacgggcaagggaaggaaagaaaaggaaaatttcaaaattattcactatagttttgtttaagggctattctctgcattttgctttcactaaactcaaacttgtatttttattttcctttcctttcttggtctgcaattttttccttcttagtttccaagattcaaatggatcctaaagtgttttaaaatctgatggaagagaatattgatctctgtgctgggcagaactattcatttcattttacccaatgtattgttattttggtttcaggttttgagaaagcttgctg

SEQ ID NO: 11777 - DNA, 14856 bp, Vitis vinifera
  Intron number 4 from transcript GSVIVT01035312001 (locus G SVIVG01035312001) derived from phytozome v7.0 (chr-ID chr4 ; pos 333258 to 348113)
aacccaatagggggaaggggcagcatttaaaccttgttcaatgggcatggcaacaccttggagaaggaaagtcatatgtgaaagcaccggatgaggagatcatggcacaatgctacttcaaaaaaatgagtactacgttcccaataatcaaactttatcatgaaaatgttgatgatagtgaggattctcttatttacaagtatagagacaaataggcaaaaggtaaataaattattaatagagcttaaaataataaattgagcaaataaacatatggtaagatcgaaactcattatcctcctactaaataaaattctaataccatattggataactaaattttttaagaacttaaacttaagatttggatccttatgattgtatatcacactttctaataatatatcaaatacttttctagattttgtgttgacttgtgattacttctctaaatcaatttttcagcatcttgtatatatgtatttgttaggatgaatcaattatcaatgaatgcaaaaatgcaactcctcatagagtctcttgcttatttcctctacaacttaattagataaacttaaaagaactccagagtgatttcacaaagaaataggataattattttattttcaaacctgcaaaaaagatatggaaaccgtatcattgaaataattagaacagaaaataattggaatcaaagtgctattgccttattttaaaaacaaaaaataaataaaataaatcttaggcgcctttatgcaaaactaaatattagttgcctaaagctccttatttggaatactagatgggcgtcaagcatcatttcaactcggcacctccttcggtaaataccaaaaataatatttgttttgggaacaagactagagttttgagcggatataatatattttaaaaaaatgcacaaaatagattttcaagtaaaataattctcaagtttcagctacatgggcatccatatggtcggagattattatttttttaatgttgttctatgtcataaaactttaattagtaactacgattttattttttaaaacataaaatgatagttagctattatagttttaaatttatttttaaaatcatagtcatcaattacgattataagcttaaatttaaaaccttagttggtaactaatgttttaaccgttttacaacaaaatcaaaattatagttcacaactatgatcatgtgatatagatacaagtgtcaataaaacactccaatttgaaaattattttgagaggggatctactttgtagatttttatttgttaaaataaattatttttcctcaagccttagaaaactaacttgtttagaactaaattcaattatacactctcctaatttttctttttataagatcaaatccacgttatcagttttccactagaatcctcatgattactcgtaggattctggagatgaaatggaagtgtggtatgagatgcatgcttgtttaaacttcagtttcaatcttggtcaataatgtccattcccttagatatgcaggatgtggaaccactgctggatcctttgtgagacttgaccatcagtatccttctctccatttgtggggtactgcccacttgatcactgctgtggaaatttgaccaacacacccaaattcccaacaacccaaaaccacagatttcttcatccttccatccatctttcttgaagtaaaatagacatccatgtggtctttgtttttcattggtttcactttctcccaagaatactaatcttgtctttattgactgattagtttaattagagatcatccaagaaaaagaatatcacattttatattaaaaaaaaaaagtattgaatatattagcaagatatcatcctcgaaaagttggaaatgtaatcttgtacaaggaaaggaaacaagggggagtcttaaataaattgtttccaaaagagaccaaatgacccatgtctttaggggtgtatccttcatgtatataaataagcattgaaagcgagggaatatggaagtttagagacaagactttgttttctatgaataaattaaatgtggtttcatggcttccagcccttttcaaagtattcagtggagattggcccgattccaatggattgatcactttttccataatgcatagtttgattaggtcaccaaccattcgctaagccgtcataccttttttctacaccaactcaaaaaccccacttgtccaatatgtttttattttttaaaacagccattaacacaacatttttaaacacatccattctcatgtctctctacctaacgttaatatcccatttttaagtgattgatgtaaccattttcaaacacttccattttcatatctctcacatatctccatctgaattttgaagtgattctactttgaaaaaaaatacttttaaagaaaatatttcaattaaaaacacattaaacaaaaaatactattaaacacacttttaatttatattattttttatcagtaacacttttactataaaaaaatacttttagtggtaatcacttaatatttgaatatacaaataaaatttaccttttatataatgtattagaaaaaaaaaggtttttaaaagaaacatccatcaatatattatataacaaattattgtctttaaaacctaatttttattataaaaaaaatgcttctaaaaaggtattatatctcactcaaaattactaccaaatcaattctaataatagtttgaaaatgggttgaacttttatatttatcaagaaaaaattgtagaagtaaccactatgtttgaaaattatatgtcaaaaatatttttattaaagagaaagataattataacaaagcttattgtcattatttctcgataacacaatgaaatcgtatggagcttataatcaaaagttcttttcaaatgactaacaaagggttttattcttgagttgttttaatttactactatttttatcatttacctatgttattaatggtgattaaatgataaaaatatatatatttaatgcatattaatttcttttcacatccaattttcaagtggatatgctataaaaatgttgtaaaataatttttttaaaataacattttcatgtgattttttattcataattagttatagaaaaaaattaaaatgcttagttatgattaaaacgattccatttcatatttgacatcaacacatgttattttatcatctaatattgttacattaaaaaacactcaatttaacatgaatattattaaatatatatatatatttaaaattattttaatctttctatttaaaaaaaaaaattgatgcattatcgatatttccatgaaatccacacgtgtcccatgattatagactaattcgtttgtagtgtggacgcaatgacaagtcagaagtctcccatttcttttctagtcaatgggcatgttccacatttatttatgatatttcggattacacgaagacttccaaaagcaatcgatggcccatttttcttctgataagcttcatggaatcttttagacgaaggaggatgctacttccacattctttaaccgagcgtgtcaaccaagctctctcgaatttttctatattcttaatttctaaaaaaaattcaatatgggatatctattttaaaattatctttttgatagatattttataaattttaaaatgttttttcaattattatacatctcaaattatttctataccatttttttatttggtcttatctagtttaaacaatgataagataatttcatatatgattttttaagtattattgtttgtaacctaaatccatttgtgtgtattattttaccttaatttcgtttgtttgcatgttcaacctatgacctaaatttcattacatatattcaaccatttagaatttttgtttgatatgtaatgttttaccttaatatgttctcaaattacatatattatggggatatatatagatagattatggtttgttccatttccgtcacttcatgagtttcccctaatccacttactccactcccaatagtgataaactatatcttgaaagtgaagttggcttcacttatccctgaataaaagacctatcctcaagagtcaagatactccaatttgaatttgaactcaaacctaaggatagatcttcgaccaccaccatctattgtctcctaataggggagatattattagcctttttttttctttttctttttttcttttaccccactttaaccaaaagataagataagcttattacaagattatagaaagaacgtacttgtctttatttatgatattttttttaaaataattcaactttattaaatctaagttagatataaattccaattattctacttttgaccaaatcatagcggtgaccaacactaactatttaaaaaattaaaataagtaaaaaaaaacactttttttaactttaaggtggtagagcttcaaaacaatgaactaaaaagataaaactaagtgcaagttaaaatagagaataaggaactcaaacattttataagatatacttgacataagtgaaaataatttaaaagaaaaaatagttcttgctttgtgtgaaacaaagtactattatttttatgtttatttcatgttatccataaaacaatacaaatgatttcaatagtttgagtgttctccaatttttaaaattcattctcactatttcaagctatatttactaaagttatatgttggatttctaaaaatgagggaatatataagttaatggatgaaggtttgattttaacaataaggattgtgttatggtgctcatacaattcgaaccaaaatacacgcaacaactctagaagtaatgatgtaatgttacttatgttggattttatgaaaatatcaataaaaatacttatattcgtgtaaagtttatgtggtaccaatcatatgatatcatataaacattttatgttttattactggtttcattcatctatatttatcttatctatttatgttttaaccctatatatttatattttcattcaatataaattttatcatatagtttcaataacaaaaacaaatgtacatttaataccgaaactgcttctaacattaaagtaaatatgatttcacgaatttcatattttctatcatctttaccaaaattgaatagggttgattacttttttcccattccatgatttgatcgcgtgaagatgattccaccaccaatcatttactaaaatgtgacacccattttctacaccaactcaagcactccacttttgttaatagcttttagccgatataaaaaagtgaacaaaaccgctttcatattttacctaccagggctaagaaatataaatagagatagaaataattactatttgttaaatatatattttatgttttaaatatatatatatatatatatatatatatatatatatatatatatatatatatatatatatatatatatatatattctttttaaaaataaaaataatcatgatattaatttgttaaaatttactctaacatcatctaatacaaataaatcatgtacgaaaatgcaagaattatgatcaagagtttcatccaaccaattataaaaattatgttttacctttaaaattggtttttaacacaaagctcttctaattcagaactttattcttttactcttatttttatcatttaaatatatgattaatcatgattagatattaaaaaaacaactttcatatttaatatattcccttatcatcgattaagtttgatttttttttttttttgttgtgtgtatatctttatactttttcttcttacaaattttttttcacattttaatatttttatcatttaccaaagcttcatttaaaattttcgtgtttttgataattttttatttgtataaaaatttacatgaatataaatatttttattgatattttgataaaatccaacagcagggacatttcatcattgcttcttgaggtggtgcgtgtatagtgcatatagcatgggaataaggataagtctccttttttactattcaattcaatgccctttcacattcatttattaattgtttggacttgtgaaagcaaccttcccccgttttcttgacgcaacctgctacttccacgtgagcatgccaaacacgcttagggcctgtttgttgatgttttcaaatacatttttggaaacagtttttagtgttttcagaaataaaattatgtttgtttattctcaaaaataaaaagaattaaaaaaaaacatatttatttcaattaataaaaataatttttaataacaaataaaacaaaaaaacttgtttggaaaatattattgttggttttgttttttaaagttgagtattttatttaactaattgatattgtaaatatataaataatttttcttcataaaaataaaaatgtttcattttgaacattttttgcattggttttaattttttaaaacaaattattactttgtaaacatgtctaaatatgtttgattttaataattgataaacaccatcttatcaaaatatcataaatcggtaaatatcaataattggattttatgaaataaaatttatgatatcaaataataatgcattatacttggaaactgatgatctatcttttttactaataatatatttatgataatttttatttaaaaatatttataattatattttatatttaagaattatataaaagataaaaaaaattaaagtaaatcaaactaatttatttatgaaaatttattaatttttactattttacatattatatatatatataagacaagaatccttgttctcttttctctcttctcctcatggtttctcttccaagacccaaacttttattcacggttgaactatttttctcctcaaagaacaactcatgaaagtcaaaatctagatctatgattgttgtaaagattattggttaggattttgcctcttgtgttattgtttatgtttttgtttggtttttgggaaatcctagaatttatggaagtttaggctttgaaatgcattaaaaaaatcatattaggataaaatcccaaaatatccaaaaaatattgaaatggaaataaaaaaaataaaaataaaaaaattgaatttttgttaaaccgaattttcaattttctaatttttcccattttccttggcagtgtaaaaaaaaaaatgataagaacacccaagaatactaattgaaaacacagacatttttttttttttttacttcttagaatagtggcaacaacacaaaaaaaaaatcattttaaaaccagattttagaaaacacataaaacacttgagaacaaaaaaacactctcttatcaaacatgatttttgtgtttttgttctaaaaatggaaaacagtttttggaaacaccaaccaaacaagtccttaatgactcatttttcttttcttttttttgcttatttgtgtattctgttttctatttttatttttaaagaaaataaaaatcaagtttaaaaacatgtttagatattattcttaatttttatttttgaaaaattgagttcaaaaaaggtcaaaaatgaaaataataatttggtgcttttaaaaaaattttatggcgatgtttttcaatctaacataaaaatagaaaaattatctttagaattaattataaaattataataaaaaattttgtatattattttaaaataaaaatataatcaaatacaaaataataaaataaaacaaggaacaaatatgatataatatcatatagtagcatataatatataatatataatatcaataaataacaactaataaaattattatatatgttatattttatgcttgctaaatcaatttaatgttttaaagtgacttcataacttgatttaaattattaaataaattaaaattttgataaaataacttaatatcataatttaaaattaaaataattttaagtgttaagtcaaaataattaatttatttttaatgtcaaatcatttttattagatatttactttgttcagtaaaattgagttaatcttttgaaattatcaaatttacatttttatttttcttaatttaaagcaataaatttatttgttacacgatttgtattaatcgtattccaaatatataaaataattacaataattactaaatatttagctcaaagaaaatgtgtcgtgaatataaaatcatgcatattatataaattactattacatgtgtgagtaaataagatagaaatgatttaacattcaaaataaatttattattttaatttaatatttaagaattagttttaatattaaatatatttaatttatttaataactcaaattaagttattattaattatttaatatataagaataaaaagatataaaataaaagcaaggaaatataaaatatttcaaaattattaattattttttcatgagtggatataaaaataactaggggagtatgattttaattttatattcttatactgctgctggaataatatgtttgcattatttttcgaaggtgaaaatataaaattacaaacattcaaataacatatagagattgttttgttaccattttaataggaataactataaatgcataagagcaattctcattggatatagtttctatatacttcattaaaacacggaaaataatttaaatttattctaaaaaagtagttcaattttgaaaaacaagccctcaaaaccttgtttccagcacaaaacttgccaatgagtcacgtggtataaacttcctttgattgaacttttgaagaaaaaaatcacgcagtgttttgtttttgaaaagtgtaaagaaaaatatatttgtttttatatctacatattaacaaaaaggaaactttcaatccatgttataaataataaaatatgaattaaacatttttgctcttctttctttcctcatgagcacaccatagtagtctatctggttcttagaaaatattaagaatagaaaaaaaaaatattaagaaataatttttttttatattttattaacatgaaaaatattaaaatcaaatcaatgtaattaaaaatagtttaaattttatgcattttaaattattttatctttatataagagaaaaataaataaatgggtttaaagaaacatataaatataatttattaataatattaattttttttttcattttccttcatctaaaaaactgaagatttttttaaaaaataaaaaaattactacctaaattgacttgccttttaagtaataattattaggaatataaaatagtattaataggataaaataaagcgtcatgtaagctaatattttgtattttataattacatagagtaatcataaagtcacatatgacaaaaccaaataaataaataaatgagagcttgcatcaccaactgggttattaaagtaattaagccaagaaaattcttatgcagagtctgatgattcaacaagctaccttccagacaatggtgatgactttgaaggaatccttcctccaataagaagatctaagtaatcatcagccttttgtcttccatcaagaatattttacaagctttgcagtttctgttccaaaagcagcaagcatgtgtctacacagcagcctgccagaagtcttctcagccaaaagagggtttttcgggggatttcggtataaaagtgaatcttactattcactattcactattcaagcacgggtctactattcatggttactattcaagtttccttttttgcctatttaaggaggctcgagcctcatttgtaagcacgttcaatttaggctcccatgctctccattctctcttctttctctctcatcatgtaaactcttcaagctttcaagctttcttcaagctttcctacccctgtctattgtaagatatttctccttgtgtataatataagtatgttttgattacctcctatatggatggtttttaattatgttttgtttttcattttattttatgttcttgtactgcctatatggtcggttttaattaagctttgtttttaagtttatgtcttttattttgtaccgcctacatggtcggttttaagcttattatgaactaacaagtttttggttccttctctttaaatttctttattggatatcttttgtattttctaaccctcttctttgttttgaatcatggcataattccgattttctggaaatcttgaggggtcttagctgctgcaagcatggcttgtaactgttgctttttaaggagaaactgagacatatcatcactggctgagacttgtgtgggattttggaggaaatactgcttaactgtatcaatagatgcgtcattttttaaggcatcccaccatttagttttaaaggtccttccaagagatggaaaggctgctgattcatctgtaatgataatatagtcccactggactatccaagcaaggccaaatttgctgaagaagaatagtaaagggggaaaagctgaaagttctctagggatatcattatctgaatcagtccttgattcagagtctgagtttaacattaccttacaaagcatattttttaggtcatctgagacacttaagttgttaatcttttgcttaactctacaattttttttataatggccaactttgccacatttaaaacagataattggcttgatgtctaaaggagtttcttactttttctgggtatctctgttgacccttctttggacgtgccttgactgcttagtatcattcatcctatagttgtcataggtacctctcttactgtggtaaaacttatctttgctaggcttcctgcttggcttttgcttagagggaggcatagtttctttttggctgaaaccaaactggctatagaatgatccaaattcattcttgtagattttttgttcattcttcatttgttgcttaagcttgaagtcattgcacaacttaatccctttagctgtgacaatgcttataatctcaccataggttagcttatcataagggatttgaccattatactgttcccttatcttgatcctaattctctcagagaaaagcttgggtaatcctgagatgaacttttctttccaaaaagactggttacaatctgatcttagcatgactttggttaggaagacttccttataccacctaaaatcatgaagcttgggacacttaaggttggttaagagatctgcagttttatccttaatttttgcaggatctccaatgaagtgcttggatattgagtagattagagtagccactgcatcctcaatatcttggccatcttcgtctttaaccacttcattactctcattaatcctataggctttaaggatactatttctatcatcaaaagtgagataattatcccaccaacccttaagctgtcctataaacccagcaacaatggtctgagctacagcatgatctggcagtctattgtttaatttataggttgtactaaccatggtcatttcttgaagcttagtgagtatgttatactcggtcataccgtctatgttccattcatagatagtaccactggtgtatgaggcttgagtatactgatttctttcctcaaactgcatgtcaggaaaagtaggcctaggatagtaattcctagtcttaaaggtttccaagttgttaataatttgattatggggttcctcaaacatcttaattagttcatcagcttcttcttctgaactaatatcacctttaaccatattgattctcttatcaggctgaacagtcaaaggggcaacaagattatccttaatcttttgattaatcctatcaacaaaagcctggttgatttggggattttcttggaattccttagaaaattcaaaggactcagtgctcttcgtattattaacacgcttataaggataatctggatattcctcttgtttgaagagttcaaaccaaatccaaaacttaatatttttcttttcttgtcttaagtaggcatagaattcttcttggtaaatggttctaatgaccttagggaccgtgctaaagaaccaatcatttctttgcttattgacttcagaatagaagtcttttcttaagagatccttgttgatctcaaagtcctcatcacttaggcttattgtgttaatcatctgggaataggtaggagacataacaggggactcatcctgttgggattcttgagtagactcattttcctcagagtaaaatggtctagccacgttggtgtaacttctgacacctgttagcttaatgttcttaggatttcctgagctggatccttcttcttccctagtggttctaactgggatggaagagcttgaagctctagagggttcataaacagaaactctagggctgttagaatgtttgaaagatttggagaaaacgagttctcctcctccatctggatattgaacaatttgttcaatactttcagaacgttgtgcaatggctggaacatcattagcaaaatgtcaattttcaggaaaatcaacatctttccacaagatcttcttggggatgatgaaatctgacttatctaacatatctgagtgaaagtaagtggtctcacctttaggactggtgcaaagagccccagatccaacgcttgtgttcatgctcttataggcaaacctggttatgattgaaacaggactgtttcctggtttgatcttaaagccatgggtcttaatatgcaggacaacggaatctaagatgtttgcatctcttattctaactgtgaagttaggatagcactggaaataaactgggtcatcattcagtccagcttggactgcgcctataatagaatctcgatattcgagatgcctattatcccttaaacacatgacaatagaggtgtttaaacctaatcttgtcaaaggcttagctgctacttgaatcataccaaagtgtatgaaattatagtcatctttcttatgcttttcaacggatctgttatctagaagtcttatgacttggtcgtcttgttctaaactgactgacatttcagaggtcttgatggtataactataaatgcataagagcaattggatatagtttctatatacttcattaaaacactgaaaataatttaaaatttattctaaaaaagtagttcaattttgaaaaacaagccctcaaaaccttgtttccagcacaaaatttgtcaatgagtcacgtggtataaacttgctttgattgaacttttgaagaaaaaaatcacgcagtgttttgtttttgaaaagtgtaaagaaaaatatatttgtttttatatctacatattaacaaaaaggaaactttcaatccatgttataaataataaaatatgaattaaacatttttgctcttctttctttcctcatgagcacaccatagtagtctatctagttcctagaaaatattaagaatagaaaaaaaatattaaaaaaataatttttttgatattttatttaacatgaaaaatattaaaatcaaaccaatataattaaaaatagtttaaattttatgtattttaaattattttatctttatataatagaaaaataaataaatgggtttaaagaaacatataaatataatttattaataatattaattttttttccttcatctaaaaaaaatgaagatttttttttaaaaagaaaagaaattattatctaaattgacttgcattttaagtaataattattaggaatataaaatagtattgataggataaaatagagtgtcatgtaagctaataattttgtattttataattacataaagtcacatatgacaaaaccaaataaataaataaatgagagcttgcatcaccaaccgggttattaaagtaattaagccatttgacatcatatatgaacccatatgagatttttttttttttttgaaaaaaaagaaaggaaaaagaaattcctcttgaaagggggtgttttttaaaaaaaaaatttaaaaataagctttttaaaacaagactatttggcaagaagttttaaaaaagaaaacaaaaagtttgtttggatgaaagaatttatattgtttttatgttttacttttattttataaaaaatttacaaattcaatttataataatatgaaatcaaatttaagtcttattaaaaaaaaattaaatctacaattatgtataacttagataaacattttttaagttgttttgttgaataagttaatatatgaatgatataatttatcatatttaataataatattaaatgcatccataacaaatatgaattttataagtatgcattcattattaaaatatatcaaatatatatcatagtccaatatatttataaataggccagcttgcttaagtggtgtgcaaggtttattacaaatccgtgtgagtagcggtagcacaaaacaccgagttcattggtcatggactcggggctccttcgtaattaattccaacaagcaagtcagtttgtaaaattcagtagaataaattctgtcagcgccccagattttgaaattgaaccgttggtttccaccacattcccagcattcttcctcccaactctttcccgaccatcttcctacctcctcacagagaagccggtgacgaactcaacgtcacaaaatgccgaaactaccctttttatttgccacaattccatttccaggccatcttcctccctcctcacagagaagccggtaacgaactcaacgtcacaaaatgctgaaactacccttattatttgccacaactccattccccaccctgttcttcctcctcgtcctctccatatttcaggtaatttcccaaaatttggacg

SEQ ID NO: 11778 - DNA, 1483 bp, Vitis vinifera
  Intron number 5 from transcript GSVIVT01018095001 (locus G SVIVG01018095001) derived from phytozome v7.0 (chr-ID chr5 ; pos 6459821 to 6461303)
gttgtcattggtggtcttctcttattcaagttcaggtaacctacaaactgttctttcacagaataattctgatgtagctatagttgtaatattttgtaaatgatggatctgcttactgtcttgtattgttttattatatgccaaattccttaaatgaaacctgtcaaactaaatcctgcctattctgttttgttttattttaaccccacaatttggagaatcgagatacaaacaattgattcaggcccttgctactggtggattgataaaatactgaacttaaccatcagcaacagctaatttaaagaggaaccatacatttatgtctaccccttaattgaaagtaaagaatacatctttttggtagaccatgaaaacaagtttctcttgataaatttgctggcataacttctttgtttgagaacttttgccaggagaagttcttgaaggattgtaaatccctgtcttttgttcctcctctttggtttttatcaggaataaaagaaaatgctttgaaatatgttacacacgcaaggaccttaataatctagttgttgaactacatatgtcaattccacgatctcaagatatttgttgttttattattctaagtcaagaaccaacaattttttgttgattgccttagtatttagaataaacatttttctttcatcattatattgcaaagatatcatcatatatatgagttgatgaggattttgagactttaagatataggtacaaaggagtagaccagccttgtcaatgtcattggtgcccttgttattcatatgactgattctgtttatattaatttctctttgatagttggtagcttctcttcgtttcctgcattttatatatttggaatatatgtgagaaaactaattccttgtgatgggtgtttgcctcatgtttttctttccttggtcaggtcataaatgtcaaaattgagttctcttcaactcaaacacgtttctcttatctttacctatgaaagggaaaaatataaaattgatgagaatttgattttttcagttggttctcttcagatcttcttgcaattctgctgcctcaattagctgtaaaataagaaaataatttcactgaagaaaatgggcatgttttaattgactctcagcaagatgtttaatgactaaagataccctaatctaggctaaccatgctccattacggtgtatagaccaccataatatgtgattttccattctatataatgaattaatccctcttatcatgttttcaaacagaatgattattaagaatatttccttctcacttttgcttcagatcaattggcagttgagctaataatttcttagagtagtggccaatcagcactcttgttcttttccttattgagtcttactccatgtgtttctcatgcttgtgtcctgtattgtacatatcttacattggaaatacagggataacacacaatctctggaggactgcttctggg

SEQ ID NO: 11779 - DNA, 4754 bp, Vitis vinifera
  Intron number 4 from transcript GSVIVT01020522001 (locus G SVIVG01020522001) derived from phytozome v7.0 (chr-ID chr1 2; pos 4864564 to 4869317)
agtctactggtgcacgaccagccggaaattcaaaggtcccaccaaaaccgcctaaatcacctaatacggacgagtacaaggacagggtaaacactctcttgttggtttcgacccttgttgccaccgtgacatttgctgctggttttaccatgccaggaggctacaacagctctgatccaagtgccggcatggctatctttctgatgagaaatatgttccatatgttcgtcatctgcaataccatttctatgtatacctccatcctcgcggcaatcatcctcatctgggcacagttaggtgacctcaatttgatggatactgccttcagatgggcattgccattgttggggctggccctttatgcaatgtccttaggcttcatggcaggtgtttccttggtggtcagtaatcttcattggcttgcaattgtcgtcttcattattggaatcatctgccttttcagtctctcagtaccctttcttttactcttcctcccaagtaagtctactaatcatatccttaggtacatctcctattatccgttccttttactggtatgggcatctaaaagccccgaaatcaaacaagaagattagcttgccctgttgatgatgtatggtagctccatcttctcctatgtttgttgcttctttcagcattatctcaatgacttggtagactaagcatgttatgaataaatgcttagtgtgatcagaacttcaatatattggtggtgttgtacatgatcatttgtcatataaatctgtagtttctggagctgtaacatgtgaaatactctatatatatttcaataaatactccattcatccatactgatcaatgcatatttgtctttgctttatattttttagaaaagaaaaaaagaaaaataaaccccactacatcattttctttgaagtaccctgttgcggtagggaaaatagaaaagttgtccaagtcataatgtatgaagttctttccagaggaatttgatgagagaaaaggttatcaaatggcatagcataaaatttaaattagagttttctcatcaaaatgtgcagaattaaaacctttactaaaacaattgatgtttaggaaccaagttttggtgaaaaaaaaatcacaattcatctataaattaactaattattgacaataaacttttacatttcctgcaaactatttaatgatgataccttagtgacaaacttctaaactcatttataaaatgtaacattatactttgtttgattttgaagagtttgaaaggaaatgcaaaagaaagaaaaaaagaggaggaaaataaaaggaaagaaaaaataaatttaaagtgaataaattatttttatatattatttcaaatttttttcacttatttaactttctatataaagataaaataatttaaaaactcaagattactaaaaaaatcatcttggtatagcaaaaagtttatgatcttgtttctacgaggaacaatgataattgaggtcgacctattcaatacctctaattagttatgattatattatttaatttatgatttatgtatttcatagataagttgacaattttattccatacattttaaacaaaaactatatatactttcttgtaaccaactggagtctagggatggcaatagggtggattttttcaagtacctggcccgccatgcccctaatgagatggatttgaattttaactaaatgaatttgagacggatttgataatttttttaaaacccatgataggtttggatactatcttgtcctacctcgattatatataaaattaaattaatttaatttttattttactatttttaatatatagataataatgaaaattttttttttaataaaataagttataaaaaaatataataatttaattatttataacatatatttattttaatgtaatttaaaattttaaaagtaatttttaaaaaataaaaattttcaaaaaaaattttaacaggatggggtaaccgacaaatatgagaatttctcatacccgtccctccccatttaattttttgaatgggatgcagatgagaattattttaaataaatagggtaaggttgggatgaggtgacccgtcccaaacccatcccattgtcatctttgctggagtttggactcataaaaactcaaaattcatctatgaatagccaaagttaatgatcttgtttctatgaaaactaagtgatgattgaggaccatctacctattctgtctaattagttatgtgatgtaaggttaaaaaccttattttatttcataacatgattatattttatagaccggaaaatcaactctttggtaactcatattgtagtaaaccttaataacctaaattccccacatgtttgacatagattggaaattttgaacctaatcttaagttgagtttgatgatagttggacgtattgatgatagatttgacggagaatacgttcaaacccgctcaaagactcaaacccaagtaactttgaattggttaaaataattttataaagtgaaaatattaaacttcttactttttgggattggcgtttgtgcttcccaatgagtttggagaagagaatgttaggatttcctataattatgcagaataattataacctaatcttagaactttgtgatttttataaagtaaataaataatataaaaattgtcattaaattctaacttttaaataatgtctaaaaaaaaaatttaaaccaaaagtcctaataatgtcaaaatctcattctaactatcattcatcacctgaacaaaaggtacctgaaaaattgttaataaaggaaaatgagtttaaaactcaataaaaaatattaatgcagttttacggataaaacatttttaataaaaattaaaaatagaagatataatatataatttttttcataaaaactttttagttcaaacatgttaatatattcaaacttttcaacaaaacatttttatattaatgtcaaaacaattttatattaaatttaaataaaatatattcaaaatatttgtactctcattatcaaatattaaatggtactcaattaggtgagactttataaataagtgactaacctcaaatttattccttttaagatagatgaaaccaaacactactaatactaagtaatctctaaccaaacctcttaaggttgagattcaaattaattatatttttcatcataaaatgtaaatatcaactattatatcttgttgataggagctaaaaagccaactattatatctagttgataaaggctaaaaaagtcgactattatattccgttacctatgatcaaacaaatcaaagttaaacactttattttattcattcaaacttataaaaacataacattttcgcatgtttctattataaacaaaaaaaaaaaaggttttaatataattttttatgcaaaatatatttgatttatgtataaaaacaaaaataacattgtacacgtttcaaaataacatgtcaaaagtaaataattttcttttacaaaatttacattaatttcccttacttcgaaaaacactttaaatccttgaagaatttaattctatataaactacttttcatctaataacataagaaaaacaattattacaattaactatttgtctaaaattataagtttgataatcctaaaaaattatatattaatattaatatttataagtatcaatgataattttattaatttatttcttatttaattaaaattaataaatttctaatttatataaaacttttttctcaaatttaattctaaaaaataaaaatatattactaatttaattaaactacaatttttatttcattaattaaattttatttatttattaacttaacatctatcctcatttgcactattataccatcaactaaccttgtagttcacccgactctcaacacctaattaacattacatatgttttcttttatgttgtcacatgcgtaccatcccaaatccataaatccattttttctttttctcaatatatatatatatatatatatatatatatattaaagatttaagatatattatttatttattattgttttagatctactaaaaaaaatattcagaatttcctatctctatcaataaatcaacatttattcataaattttcactcttttttatttagaatttaaataaacaaattatattttagattgagattttttaaagaatatttaagtgtttaaaattaattaaaaaatctaaaatattaatttaaggattaaaattctacttgaaaaactagtttttaaatcctaaaccttcaaattttcaatcctatattattttatgtttgatctttttctaatctcattgtaagggctttctgtatagagaagtcaaaaaaatctaatttatatttaaggtttttaatacaaaaagatctttctaactatagaccccctttggagggtaagggccccgaggaagtgatttttcaggacttctcagagggggtaggggacccccaactgttgacttatggatcccttctctaggcatggacgtgcggctgcaggtgggcgtttggaagcccatgcttgctgatgcatgaacagagaggttggtgatggcttgccaaagaagattgagaggaagaagccaggcagaagaaaggatgggcttgccaaggaagagagagggcaggcaacggttgaaaaaaaaaaggaaggggggggggggggggggtggcggcttcggag

SEQ ID NO: 11780 - DNA, 4619 bp, Vitis vinifera
  Intron number 18 from transcript GSVIVT01020836001 (locus GSVIVG01020836001) derived from phytozome v7.0 (chr-ID chr 12; pos 1274267 to 1278885 reverse strand)
ctatttatcaaatcctagtttctcaggtacttgatattttctgatggtattgataagatgttttttaagtgcaagtgaactttctttctcttcttttggtattagttttgttattacaatgttaacaaattttatttttggtgcattaggttttgatttcagttcttagggtaggtctatttactactgatattgatttttgtgcaattaagcttatttttgcttgactttatcagactttctttcagttgcttaattaattaggattccacaacatctggaattttagtaaaatatcactagtgaatgctaagtaggggtggcagggcagagagccacacaacaaaagtgaagccgccccgtacctttatctataaagctctattggttaagcttgaaagtgattatgagctaatatttttttttttttttgatagttaaacaagatatgcattaaaaagaggctaaaagccacaaagcatacagagagtatataaggcagctagagccacaaaaaggagcaacaagaccagaaaagaatcatctcccgttaagtcgatgctacccactccaaaaagcctataagggagagagactcctcgcctaaatacaatttaacccagctccataagttacaaacaaaaaaattctttaatttctggatattcaacaccccccccccctaaaagctagcctattcctcttcttccaaatcgtccaaaaaatacacaacggtatggatttccaaacctttttccttttcctccccacaaatgggcccctccagatagttaagacctcttttacagtttctgggaagacccatttaacatctactaacccaagaataatatcccacaatgctctagccactatacagtgtatgagaatatgatttacattttcttcttcacaaccacacaaaaaacaacaattaggaagttgcacctctcttatttggagcctgtccagagtgatcaccttcccccacgtcgcctcccaagcgaaaaaagcaactttagttggcaccctatccacccagatgcaccttgaaggaaaaactgtgtcattaggattgaccaacaacctataagcttccttgaccttgaagtgaccatttcttcctcgcctccacataactgaatcttcctccaaagaaggcctatgacccctcaaaatataaagcaaatctccaaccatatccaactcccaattattaaaatctctcaaaaagtttagattccagccttcttgactagaattttggtcccacatctcctcaatcgttgcatccctatgcgcaaccataacaaagaggtgagtgaagcaatgggacagcggtgtatcagtgcaccaaatatctttccaaaatctgattttggtgcccttcctagctagaaacaccagattatcctagcaccaatcagattctttcaaaatctccttccaaacccctactccaaccgccccattagccttctttgacctccaaccatgatcctcttgcccatacttcgttgtgatcacttgcttccaaagattatctttttcacaagcaaacctccaaatccacttaccaagcaaggctttgttcagtgtggctattttccttaagcctagcccacccttgttcttttttgtgcaaaccacatcccatttaactagatgaattttcccctccaagtttcctcccctcccatagaaagtctctttgaactttctctattcttttagcaacagtcttgggcattgggaaaatagacatttggtatattggcatgctagccaaggtgctttttataagagtgatcctcccccctttggaaatgtactgccttttccaaagcgcaagtctcctcctaactctctcttccactccatcccacatagaagtagccctattaggagcccctagagggagtcccaaatattgaaagggcaaggatcccaccctgcaccctaactcaactgccagctcttgaatctcctccacttctccaactgagatgatttcgcttttggctagattaatccttagccctgaagccgcttcaaaccaaaggagaatccagcttaagtgagttaattgctccttgcttgcctcacaaaacactattgtgtcatcagcaaaaaataagtgggaaatgttcaaagtgggtttactaccaccccgaatgatgcatcctgataagtatcccccctccacagtgtgattatgagctaatataggttatagaagtttagcaaggtcacatccagaggtgtatatctctcatgcaagggtggccatttggggtttgagtgtgctgagggtttgtatatcaatatataaatattgtattttgatacatatagaagaagattaagagatttggtctttgccaataaactcataccccttaccatttctttatgacttgagccaagcctcatattttgtatagaattattaatgtgggatataaacacattgactaggtccggcccagagcttgcaaatagtgcttagattggacttgattgtatgactgaagcccctaggttgcacctcataagttggcttactttttagaggggcatgcagcatggttacccatagtctgatggacaactcaatcaaatagctgcactgatgaactttgtatctcttattaggatagctacttgttagtatccagtccttacatctggtgcaaaaatggatgggagtttaacttctcttttgcaatatgtctaccaccttcaatgtgttttcctactcatgttaaattgtgctaggagtaggagattattatcaaagtagtctctccctttcattttgagaagtgacacccatctccctgttcagaattcttaaccaaaggaatttgcacacctattttctagtgctttgaactcaacttcagcactggacctaacagaaaccaaatgttgtgactcttcattgccactaggttccctccaacaagagtaaaattctccaaggtagatctagtttgcaattaaaaatgattcaatgattattcatctatgcttaattaacatgggagtttttcctccagatgactgtaaacaatctctaagtgctttgtccttggacagtgcatgaattgactcactatactgacaggattacctatctggatgaatagtaacttgacccatatgtctaacaacatcaattgaaaagggctttcattatcttaaaccaatgagttattggagtaccagaggttcacatcccaaaatttgtctttatacgttttttcctctgatgtaaatacatcttgcctctacctagtaattttattctgtttaagggaatgttttaggtcctcaatgtgtttgatcccaatctctggctaagtaattcttcagtgccttcatttattatgcacccttgcctagtataatgaaatcattttgataaatatgaaaactttagtatgtccttgttaagcatctgatggggtatgttgaattgtctttgtagccttgtgttccttcagccaaccattggctaaataaatcacatggaactcttaaactttgttttaaatcatatagactttttctttatacctttagcaggggaaaatttaagccataacgacaatctatatagaccttttccttgtgcaaccatgtagaaaaacatttttggcaattggcaagggtctttaaggaatactggaaatagaaagtctctgataggataaaactatggaaatcatgttgcaactatagttctgcatgaatcaaggattaaatccccaaaattagatatctatacaagatatgataaaacaatctttacaatatttcctaaagcaataactatcaacagagatttcctaaagcaatgaaaggttgtggtaagatccagcaagattcagtacttcattttcaccctataatatgatactctgtttttgctactctaacaaaacaataatgcaaacacacaatggacagcttgaagtgataaacgtgcacaatgttagagatgggatatttggaacataatcaaacttcatcgatgacaactgttggtggagcaaattcatgaagttcagataattcacttgttatggtttggtagccatccatctttaagtcgttggctttagctcattatttgcctactgctataagcgattttgttcacacacacctgtgaattcacagtttcacattggacttgatgattcatgggagttgagtgtcacttaggttggtggcccttggaatggcttttgccattgtgtctcagaaacaccattgaacctggctggttttggtgtatcatttgcaattttacaaagtatatgaaactaaagtcttgtgcactttttattttttaatttcaacctaaagctaaagctatgacttgaatagttttttgtttcatgaaattgttgttcgaatagcacaggatacatggacatcttaaaataggatttcggtttcatattcaaataagtgataatgacaatcagctaaccagtgctgtgattctgtatttttctcctttattgaagcttctaatctattgtctctctgcctgttgaatattgatgccagtttttgaaaattctgaggttgtgctggatccttta

SEQ ID NO: 11781 - DNA, 14163 bp, Vitis vinifera
  Intron number 1 from transcript GSVIVT01018599001 (locus G SVIVG01018599001) derived from phytozome v7.0 (chr-ID chr1 6; pos 12503460 to 12517622)
attgttttttggttctttttttttttttttttttggtttatcagatgtggacgctgacatggctgaatgggaagagcaatttgggtatgaaatcacacctcaacccggagtgctcaaaatccaaattatttttgggaccattgtatttaacttgaaaataataaactcagtttctgaaatcctagttatttgcatatcaaagacccataacatacttttcccttttttttttaattaaataattattgtgaggttgtttttagcatgagttgacatggaaaatgatggttgagcgaaagcttatgattgtcgaatttttaggagcaaatgtgcgtaagttagtcaaatccttatctagattaaaacaagcaattaagcaatgacatagtaaattcgaccatacgtagctatctaatgggtattccattaatgatgttggataaatatatttattgcaaacttgggaagaacacgtgagccattatatacttatatgtcgatgatatactaatttttgagactaacctagaagttgtttgtgagattaagagattatcaaaatccaactttaatatgaaaggcctaagatagataaaggttgttctaagaatcaaaataactagaacacctaatgagtttaaattgccacaagaacattatgttgagaaaatcttaaggaagtttaaatagtataattgtaaactagtatcaacttcttatgatcttaactcccaaataaaaagaaataaagaatatagtgtaacccaacttgagtatgcttagatgattagtaatgtatttaattaataatctgtttgacgttgtttgttaaaaatatttttaacctacaaagtgttttgaagaaaaataagatgttccataaaaattttaaaacatttttaaaaagttgatcaaaaatcacttttagtatttctttgaaaaataattgataggtgattctcccaaaaacatttatagagaaaacacttctacaaaaaacacttctaagagaaataccattaaacaaactctaattataccaaacctaacactgcttatgtaggaaattgagtaagtatattcatagttctaaccatgatcattataatgctttttttgcatagtatttaagtatatgagaagcacaatttagtacctatagtatatttcctaatgcacttgaagggtgccacgataccaattaaatctcgaatttggatgagataaaatccattaatgggtatctctttaattatccttggaagatgtatagttttttaaacatctactaagcaaactaacattatttgatctactatgaaagttgagtttattaccttagaaggcaagtttaaggttgggtaacttagaaacctcttcatggacaagactaataaaacatccatgtgtaatcatagtgataattaggttgcaataaccaaggctaaaagtaagatacatataatggaaaaaaacagacatatatgccaacacaatattgtgcaatagttgttggagacaaggatcatatccttagattttgtaaggttagagttgaatttaaccaatcttcttacgaaatgactaaatagaaaattagtggaagaaacatcaagggggatgagacttttacctaaagtcatgagtgatagtaacctaatctacatgaatggagatttggaaagtaggttcatatgggtaacaataaatcacttgatgacaatattgtgcatcattagttatttatacatgtgggttcatgtctatgatacatatatagtgtatatttgataataattgggaatgagcacatactcttaatgaatattattccttatggatgatgcgttcagttatagaacacacgtgactgattcatttatataagattggaagtggggtacctttttatagaactcaagcagtttctatatatcttttacaaatatttagataagatgcacgacttaggtggtgtttgttttttggctaaatagaaaaaacaaaaatatttgactttttctattaagctaaaagtattttattgatatgaactaacataattaaagtgaaatagttatcaataaatttagtttaattatattaattaatatcaataagttacttttagctgaataaaaaaaataaaatattttagttttttctattcagtcaaaaaacaaacaccatcttacttgtgctaattcacttacattaatacgagtaatgaaaatagtgtggatggtggttctcttatatagatgagaatatttggtttgtagaaaatttgttttgaccaaaattctgtagttcacaattactcatcctaagttcaatcatcgtactaggtttgatgttgaaattaaagttcttttgttcatgtggaggttaatgttgaaattagagttctcttgttcatgtagctctttaataaacaagagtgtttcttaccgggcacgttttgatcgttttctcaactccaatcggcaagttttttacaagctttcttatatagttagattataggaagtgctagtgggaaaaagaaaaagaagaaggaatataagaagggggttgtttccaaattgttattaaaaaaaagttgtgttttttaaaatgttataaaaaaatgtttgataaatttaggattgaaaatatttttttattcttcaaagtagaaacaataagtgtaatattttgaaaagaaattcaatgttttttaaggatatctttttttttatgtgttccgagtaatgattgaaaatatgaaaataaataatgaatttttatattgaatgtattggaaaactgttttcatatttaaattttaattcttaaataaaattttatccttaaaataacaataataaaaagtttttaaggattatttttaaaaacatttatatggtctatttgagaattgttttttaaaatagttttatgttctttatagcaaaaaacatgtttgataaaaaaaaaaaattgtttcttgtttatttgttatttattgttttcacttattttctgaatattattttaaaaaataattatataaatatgtaggataattaaaaataaaatactagatataaaaattatttttaaaatcgttaaaaacatgttatagttgtttttgaaaacaattatcaacctttaataactcttttgtaaaatatttttaaaagattcttaaaagtctaatttttattctcccctttttcataagatgttagaaattaagtttaaaaatatatttgaatgttatttttatttttatgtgctcttcttttaatctcaaaacaataataagattgttaattaagattcaatgacttgaaatagaaacatcaaaatcaactcaattcaatgatccctaacttagaatttcaaaaaataataatggttgtttattatttaatatattaggaacatgccttagtatttacaaatgcatgtcttcattaattccaccttccatccaaaggttccatcttttttctttttttaatttaaatcattattgtgaggttgttttcgtcatttcattttaatgggggaggagtttgaattaccgatgtaaccctccagttcagcgggatccacgtggcaaatgatggttgggtgaaaacttataattgtagaccttttgtggggagggattgcagggggactggaacggtgcttggtaaccacgtcaatccccatgattaccgcctttgcgagtggaggattcaacggttgatcatgtgtcaaatgtcagcgcgatcatcgaggtaattgacttttggtagacgaatgtcaaatgtgacacgtggcttcttctgatagcacatggcctatcgtggactctacctgtcatctttcttgcagagttagttaaggaaaaaccacaactgcttcacgcgccctgtagtaaactttcatggtcaaaatgtcttttctttgaacattcatagattaatttcagaatttattttattttattttttcacatttcaaataccaccgcctaatacttttatgaggtggcaagtaatagtagagaaaataaatttaatattgaaataattattttctaattcaagaaatatttgtcaaacttttaatggtaaatatttctttgagaatttattttataaatttttttttttgaaataaatttacaagattttcaactatgatttgtaaaatattccaagtaataattgaaaacaaaagaagtattttaaaaaaaaattatattataaaaatatacatttttttttgtgaagaataagttaagaaaattattctttatatttaaatttctaaaaagaaattggtttcttttaagagttattttgaaaaactgttctttaaaaaatgttttaaaaaattaggacttatttagtaactatgttttagaattgttttctattatcagaaaccaaaaaaaaaaaaaaaaaccttatttagtaacaaaaaattgttttctattttttctttttaacaatattttttattttatattgttttcacttatttttttaagactatcgaatgaaataattatacaaatatgtagaatgttaaaaaataaaagactcaatataaaaattatttttaaaaatattaaaaacaaattaaaaatatttcatgtttgcaaattgaagtttattatacaaaacagaagataatagttttcaaaactattttttagaattgctttaaaaaatatttaataaacaaaacattaggtcttgtttgataactatttttgaaaactattctaaaaaaatagtttttaagaacaattttttaaaacttttctctgatatattgtaaaataaaagcctgttcgaaacctaaaattatttttaacccatttttaatatgttttaaaaatattttttatgtccataattttatttttaattattatatatgtttgtataattattctttaaaacaactctaaaaaaacaactaaaaataattaaagatattatttaaaaataccatattttttattttttgagaaaaacaaacttaaagaaaatagaaaataattttttattatcaaatatgttttctaatttttttttttgttctaaaaaatagaaaaccgtttttcaaaatggttgccaaacaggatattaatctttcaaaagtttttcaaaactttcacgatttgactttgtgaaaggaaatagcagaacaaatattttctgtgttttgtagcccaaagataccgtttccatgtgaaaatgcaattggttgattaaatagcttaaatcttcatttattttataataaagaatattccatatccatgccaaaacgcagcatccacgcgcagtgtgtgaatggaattgcccaaaacttgaaacaagtggcagttcctgctgctcatgcatgatcgtacacttcctgctgagttgggccacctcttggcgatcatgatgcccctacaatcaaaccccaattattcaaatcctcatcattatttgtcttgacaaattcaaattcaattcacattactataacacaacccatgtgagtaattccaccccctataaaaagggatcctgattcctgatccccagtactacatatccatgcaatagagatagaattgaagatagagaaagagatcagatcagacatggaggcttgtattctcagaaacccatctgcattccatgttctctcatcccttttcttcactcttcttcttttcaactccatcaccctaacctcatccgcaaacaccagcactatttctctcacaatcagcaaacagttcatcaaaacttcatgcaattcaaccacatatcctggtgtttgctacaaatcactctcctcctatgcctccaaggtccaaaccagccccctgaagctcgccaatgtggctctcacagtaagcctaaaagctgcccgcaacgcgtcttccaccatcacactgctgctggaacgaaaagggatgacccgcatggaaacatcaatcgttaaggactgtgtcgagaattttggggactgcatcgatgaactgcagcagtccttgcaggagttcaagagcctaggaggtgggaaaaatgtggctttccaaatggctaatataaagacatgggtgagtgctgcattaacagatgagtacacctgctctgatggatttgaaggccagaaggtgagctcttccttgcagcagcaaatcaagaattatatttcgaatgttgccaagatcaccagcaatgctttggctctcatcaacaatctttctgttactgatattaaatcctagtacatcatggtcttttccttttggttggggactgagttcaggggttttacacttttattgggtcggttttctaagcagctgcttctctgatttggtcttttaaattgatttaacaatatctagtgttttaattctatgaaaaaatttgtcactttttaaattaaaagaagcaaattgaagaagcattttggaatatgttttttttttttttttttcagtctatgtggagtggtttgtatttatagtggttggttttgttgtacattcttgtgctcatcttgaagttgaaaatcaatgaaggaaagcatgcttcaaagtgagttgaatttcagtgcccatttatttgtttgttaactaatttgttttgatggaaagctatctcaatatttagtatatggccaaatggtaaagaatgaaacctatgaagatgtgatatctcattttggataggaaaaaaaattgacactaaataagtatgggcccttcttaacccataaacacatttttaagccataaggcccctctgggctcagaactgatgataatatttacatgattaaatatagattgttataaagtatatgctagcacatcttttatgttataatatatatataaacaaaagcaaaaaaataatagagcatgcctggaccaccattgttaatgtattttctccattgtaagtagaagtgacagattttcttaaatgtttttgagcagaggatgaagacgatgcatgtgggacttttaagagatgggaaattatgaaggaaagaaattttgagatagagatagcgagagagagagagagagggggggggaagggtggtggggtaatgaaaggcatgggatttgattggtgagtaaagggaaggggttttggattttaaaataaattggaagtcaaaaacaaaagtagaggggaagagtaaagtggagatcgaagactttttgaggtttttcttcacatgcatagagttctaaaggaagctaggggacagacagagagactttttttcttcacattttgactctttggaagaggaaagataaaggagagcgggaaaagttgggggttgattagaataaagaaaatgggaaagtttgaaattgaaagaaggaaagaagagaagtataaaaagaaaagagaagacttttggcagttaggttttttttttccttttttcctttttggaatgttttgggttgttggaaaaaaaacacaaagtcctccctctttctatcattttatcaaaggttggtagtctatcattgtatcaaaggttggtagaaagagggtagcacatgggagaaagaaatggggaaggaaggaggccaatgaaaagatcgggggagaattatgttttggggatagatgggctcccaaattaacaaaaggtccatgtaactcttcaaattgagcccaagacctaatgcaagtatgaaaattgagttgaaggatattatccttcagtatttccaaaaatgccctttgttgattttgagaaaaaaattaatatttttgaaaaatatttttatttaatttaatatttttaaaaaatacttttatgtaatttaatatttttaaaaatacttttatttaatttaatattttttaaaataaatttatttaatttaataattttttaaaataaatttatttaatttaatattttttaaaaataattttatttaatttaatattttaaaaaaatatttaatttaatatttttttaaatactttaatttaatttaatatttttgaaaaaaaattatttaatttaatatttttgaaaactactttttttttaatttagtatttttgaaaaaaaaattattgaaaaaaaattatttaacttaattttataaaatattttatatgtgttcttaaagggtatatttgtccgttactatttcatatccttcaattcaatttgaagagttatatggaccttttgttaatttgggggctcatctacccccaaaagataattctcccaagatccggcttaacaaagagaaagagtctacccattagtagtaattctcttctcattccatatatgaagaggttggttaccaaccatggagaatttattcacattcctcttgtttggttatcaaaaagtagagagagaaattggggggaaaaattataggcaatgtgaattcaaaattcaattaaaatgagtaataagctcttaaatattcgatctccaaatatcttatttatactactaaagcgccttgtggcataattctaactttgcttcctcatctaaagctagaatcctagacatcaacaaatcttacaacaaaaaatcaaacttcaggtaaaaagttaccatttaaaatgtggagtagaattgtagaacaaaatttaatacaagcaagtgaaaatcgataccatttcgatacaaaaatatgcctttgttcctctgcattagaatttcaatatataacatcatctagtattgaaatttcaatacaagtttcttaagccagtaccttatttagataaaaataagtctggtatccaaattaccaattcccatacaagctctagcatcatttttgtatctattttgtatttgttttgaccacccagtaagatacaagcttcaaggttggctgccgcattgttggtttccaaacacctctgcgatcatacgatatgctgatcatttttagagctgtgcgcacttccattcaaatctaagtagaggaacttgcattttcttgcaatttggaacacccatgtgagttggtcgaatgagtatttgaagaggactggaatgctttcgttttactactgaaatggatgctttcacacagccatgcaaattgagaaagaaaccatgcgaaaatggtagcttaaagggaaaattttggaaacaattttgcacaatagatcacttttcaaatgaggattcagattgatgcagaatgcatgtgttttaaatgaagcttgggctggatcttctcatagaaggagccatttcgaatggggatttccataggaccagatctcaccagtttaaatgatctcctgaatgccattttatgtggaatcatcaattttggattgtggagagctgagtttgcatagccatacaaactaccttataaaaagaaagttccaagcagactttagatcaggaggctttcccagtctttctttgctgttactaagctgctatgtacaactgtctctcttcttgccatagcccttcagttatgtttggttccggaaatgctaagaaaagaattaaaagaaatgcaaaaaaaattatttttttatatttgattatattattaaaattacaaagaaaatcaaatataattaaaataagttagaaacttatatgttttcaagttatttaatctttatatcttaaatttgttttctatttttttattttatttttttctttacattttcctatttataagaaccatggaacaattctttctccacattattcagatttgaaaggatgacacaacctatgagcatgcggctgctacaagaatcgagaaaaggtagggtctgcatccaaaattcatgtactgaaaaaggaaggtggacgagagagcatgatgagaaaagggttctaggcaaggagtgttgcatccaaaactgaaagttttgagaggaaccagaatttttcggttgcaaaaagagtagaatcagaatttattttattttattttgacagctaatcagagaatcagaatttttttgtggcagccaaggagaaaaaaaagacataaattaaaaagagagatgagaagtaggtcttgaaaggagatcaaaagtggaattaaaaggagcggctgccacacgagatccagctcttccaaggcgccaaaacgaaaagagcaaagagaggaggggagtattgcatacatgaaaggattgatgtggggaagttaaagggatagatatagaatattcacccgccaaggttaaaagattccactacaatattaataaccactcaatgataataaccatctctcaataataatatcaacctaacaagaatcaaggatgataatctaagaacattcaaccaaaaatgggacaccaaatataatttggaaaaaccttccaaattgaagtaaaacaccatggagaaaatttctttcacttcaataaatggggatacaataattaagtcctcaggttttctcaccttgaaaacttatataaatatctcaatacttgaggtggaaatccatcacatcaggaaatatgaacaaaaagaaatcaaagagaaaatatatcacatagacttccccaaaaggttgatgaaagaacttgtaaattcacctaagcctaaaacagtgcataaaaaacaaccttaattttcttttcttttctcaatcaaatccctttctctcataataccaaagacctaatgctatttatatatttatatttgagcttagggaatatccaaatataaaatagcctaacacatgggctcatgggctggacaaatttagcccaacaatctccccctttagcacataagggaggaatgtcaatttataaatccattgcatggagttcaaacatgttgtcccaatgcacaattgaagcttctacttgggaacaacctttgtcaacatgtttgagtcattcttgtttatgtgaatgttctttaacttagttgcattttcttcaaccatatcctttaaacacttgaacacccatttgtttttcaatgattttcttcctttgggaagttgtaccaactcatagttttaatttttctacaaaggatccatctcatcttatatggcttcttgaaaactctatggctccccctcatcaattattaacatgtactcagaagagggatatcgagtaaagggatgatgctctctagtagacctcttagcctggatatcaaatcctcctaatgaagtaattgctttccctgctcctcatgcttaattggctcatgtgcaggtatgccactagcactatcatctcttggtagcccatcaatttcccccccttcatttctaggttgctctaatgatagaggaataggtcatcacttgtacatttggattgattagctttgtcaaaatctcccaaggtttgattctcttggaagaccacatctttacttctcgccagtttcttcttggaaaatatttttaaaaaagaaaaaaagaaaaaaagaaaaaaaggaaaaaaacaaaaaagaaaaaagggttagcatgatctcaatgtgtgcacaattcccactagattagaagaaaaaaaaaaaaaaaaaagacgtgtgtgccctagaggaaggctttttttttaaaatatatatatatataatatgcaagcttgggtgtaagttaataaataacatagaatttaattagtgaaataaattgtaatttaattaaattatgttgtgtcccaagaaataaattgaaaataaaatttaaattttatatgaattagaaatttattaattttttctaaaataagaatagattaaattatctttcataattaaaaatattaatttgaatacctaaaattttaggattgttaaacctataattttagataaatagtaatggttatttctcttatactttgttagatgaagagtagatttttcagaattatttttctccaaagtttttgaggacttcttttgaggtaaaggaaattaatacagattttgcaaaagaaaatagattttttatatatgttgtttgaaatgtgtagttgttatttttcttttaagtatggatcaaatatatttttgtatggaaaaatgtgttgtaacatttattttgtttagatcgaaacacttggaaattttttggtttagtaaattgagaaaaataaaataaagaatttgactttgatttgtttggtccttatcaacgagatataatgattgacattttggcccttatcaatgggatataatagttgacctttacatttttgtggtggaaaatgtaattgatttggaccccagcctcaaggggtttggttagaggttgcaagtactagtagtgttttgtttcgtccaccttaaaatgaacatttaaggctagccacctatttgtaaagtctcacttaaatgggctctatttattatttgatagccaaagagaaaataattgaaatgtatttgatttgaaattgatatgaaatgatttttatatatatgaaaatgtttagttgaacagtttaaatgtattagcatgtctaacttaaaagttttataaatagagtatatgttacatctcttgtttgtaagtataattgaaaatatttgatctatgaaactatgttaatattccttattgggttttgagctcatcttcctttgttgataatttttcaggtactctcagtttagatgagaagtgacgattaggaggggaaattgacttgttataacatttgtcaaaactctctttattttaagtattgtttagatgttaaaatttattttccattagaattatttgagtttgaagttttttgaacaataacacttggtttgatgtgttagttttaaaaattgttatttggaggatttagaatttttgttctactcttttaacaaaaaattgataattcataaatttttaattataatatgattgtttgtattatttctactctgagcctttgggcttgaaatatgaaatcatctattagttttggggcgtgacatttaatccaaaggagtgtctcaaaagcaagacacttgattaattaaggacaattgaggactcaaaatgcatgctagacatctcccaaacattggtaggagctaggaataaaagcctttcatgtctaggaacaccaaagtcaagtgatatgacatacatcaatgcttccaacaaaataaggggcgcattaattatggtggcaaacataatatatgattccatgtgggcgacctttatttgagtctctcccttgctttgaatgtgctagatatgatgaacacatgctcactctcgcctagataaggacatatctggttagaggccatggtggggtacacttgccggtgcatgcccagtgcctgccaactagtcaaacaaatccatgtgaccctctagaccacaaacctaactcacgtggtcacagctgcctagtggtcctctttgtctgctctaaagatcaggtttaggttttcacaaccaaaaagtccatccgcatgttcttctctcgccgcctaattttttagattttggtcacagaactcccttaaaatcttcccccatatcatgcatgtccctttcaatatgatctttcaaataaacaatctcattaacaatttgttcaattattgtgtttctcatccaccctcttcaattaaatcacttaacatggtctccaatctcgaatcaagaacttggttaggcgatagttggtggaaaccataactgaggacctagtgaatccaaattaaatggcttgaagatgtttagctaattcacctactgattccagatgacttaaattaatatcagattgatacttaaaaagcatctctatgccccttttgtttgcagaaaaaattttggagggcccagtcttggagtatgtgtggttttaacttccaatgcattccaaaaaacaggccactgtcaacgaattcaattgtgaaattgcttcctacttcaattcatattgtaatcgcaaggtcgtgcacttcactcatagctagccatatcatctgaaaaagatagatttggtatgtatgctttatacttgagaatctcctaaaccgtgacaattaattaggtttagttccaaaaatttatattacctatgctccatttggtccttcaagctgtagaaagaaagcaaacatttagacccatctgga

SEQ ID NO: 11782 - DNA, 5595 bp, Vitis vinifera
  Intron number 5 from transcript GSVIVT01000816001 (locus G SVIVG01000816001) derived from phytozome v7.0 (chr-ID chr1 2; pos 510063 to 515657 reverse strand)
ctgatcacaaacgtaacatcttggtgcattctacacccatgttctaattttaagaagttagctactgtttttatttcacgttttctttttaattaatccggcatttactatctcaacttgtttctttgcaatctcaattgaatttaaaagatggatgacccttgtgatggctaaacttgagatcttgaaatttgaaatgcatgcttaagtttttgctatgaatttttgtttagtattgcaagttaaaagcttaaaaccttttagtcttcgcttcaaaatttttggtgtcatgagctatcttcaattcttattttcttggtattgtttagatcaatttgagacttctatacccatcataggcataatatggcctcctatgggctatatttctacacatgaaacatttcttcatttatgagaaggtggaacaaactttttaaaaaaaaccatggaggaacttctaggagagattagggggtttgccccctaatggggggtggggatggggaccctattcctcgccccgaactttaactcctccccacttcgattatattatgttatatgatataatattatattatatatatgtgatttatagttataaaatttaaaaattaaatatttattaaatatattagtttatatataatttcatatttaaaaattttaaaaatataaatgtgaattttatcatttcacattgaaaaccttttaaatgaagcccacattagattcaatgattgaaacattaatgattcgttaggtgtacatttagatatacttcctatcttttgttattaaagtaaaaaaatagtagtaatttttatataagatgcaagaactcttagacccttcttgcattgaaaaagtaatggttttaaaaacagtttataaaaattgtggtatcaaaaattttttactatctcaaaatttgaaatttcagaaagtgatttttaaatttatatgataaatctatattttttatactagatgctttacttttatatggaagttttaaattttaaatcattcttgttttaaaaaaaaaatgggggtcatttttgttgaatagggtcatactttgatcctttcaataaaatatccctttaattaattattctcctcgtcttaatatgtttcttaaatatatcaattttttaatattaaatagtcttattaatattaattgttggccaattaaaatattagatggaaaaaatatttttgaaatacatatcttatatttatatatatatattagtttttttctttcataaataagttcttatctattgaaaaggataagttagcaaaaataaaagctaaattaatagtatgttatatcaataattttcttaatctttattcttgaatgtctttctcaaattttttttttaaatattaattgttaaaatattacataaataaaaattaaatatttttcaaaatacatgtatcatatagttgccttttcataaacaagttcttgcctgttgaatacgaaaatatggtgaaaataaacgctcaattaataacagattaagctaattattcttttgatcttggatatttttcttaaatatattaattttgctaacattagagtctcataaaaactaattattaatctaattaaaatattaaataaataaaaaaactcaatattttgtaggcttacccctcaaacattggagtataaaaggtgcaccgaaagtgtgcctcaagcgtgcatcaactcctaaggtttacgccttttgggagtcttgcttttctcccaacacctcagtgcagtttttggatgcgtcatgccttgaagtgtgcctcaaagatgccttcgaaacttagctttgtaaagatggggaaaatttactattcgaaagcctctcttgagcaaatttgcaaagaaaagggaattccaatgtgaaaataattcagaaaaggccaattcccctcgctgaaatcctttcaaggatgaatgtggaaaccatttccaataatgggtctagaaagtgagaaaatgttcaagcctcgagagatgaactcctgcagcattgatgactcaccctaaaacaacttctgtgcttgatccttctaacataagtccaaaatatgtttacaataaaagtttttatttgaaaagtaaatagaacttaaaatgagtggatggggaagagtggtgttgaactaggatgaccaagcctcacaaaaaattaggaatatgtagtgctaattttccacttgaaatttttattgtaaaaaactccaatttttcttgaaaagaatgataagcactgtgaatagagttttgcgaaaaaccccacatatcagatgttgactcaccctatgttgtgcgagtataacacaacctattcatggtgcaccatctactaaatattcatgtttaatcttgaactaggagtattcaacaaagatatcatacccacacctatgttgtgtcaatgcaggcatgttgggtgaagttggaaagtttgagtattgtagtcaccaacatattaaccgtagattgaggaacccaagcaattgagcaagtttgaaatgtttgtgttataattcctgcactactgggcaatgaaggaaaatatgatcaatgtgagatctaggtattcctttttggtgggtactgggtggagggtgctttttggaagaataggtagtgtggggataatctattgtgtgtgttgtttccttatttgctttacctctttttaacaatgcatgggtggagaatgtttggaatttttctgctgaaaggggggggagggggttggaatccttgtttctctagatctttttatcattggaaggtggattgtgcgaggagatttctgacttgtttgcaggggtagagagtttgtagagatgtggaagatacattgttttggtcaatgacaaagagtgataattttacagttaatttcctatacaatgttttggaaccaggcttgggtgggtcttttccaacgagtggcatttggatttcttgggtccagcccaaagttagttttttttgcatgggagacagtatgggatcaagttctaactttggatcaagtttagagatgaggttggtatttagcaaatcggtgtttcttgtgccttggacatgaagaatccatagatcatttgcttctccattgtgaaatgacaaaggttttatgagagttgctttttgtacttttggggtgtcttgggtttgttggttagagatactttgctgggatgacatggtttttttgtgggcaaaaaaatgcaagaaggtttggcaagcaagccctttgtgcttgttttggacggtttggaaggtaagaaacaacattgcattcaataacaaggttttttctatccaaaagctgaaaagggattttgtttgcttgccctggtttgagatgaagttgtttatagataattgttcactgactttagtaagtttttttgaatggttgggccatagttttgaaatgcgcaaggagcacttaagacgcaaaagtctcctatagcttaagcgcaacacaatgtgtgtgcctgaatgaagtgaaatgtgacctaggatacacatcaattttgtaaatatgattcaaaatctaatctgatcaataaagaatctaagattcaaaacatttaaaagaagcatttaatgaaaaagtaatgaaattatataaatttcagcatataattaaaaatttcaaaaataaaagtgtttaaaaaggaagagtaaagctgacaaggcacgccttttcaatgaggtgcgtatcttggcaaccaaggcgctataactagggagtggtggcgccttgagcttaggcatgcttgaagcgcgccttttaaaattatgggttgggcacttgttgaggttcttattttgttttcttttggtcgagccttggtggtgaaggaaggtgtgttttcttgtataccttgagttgcttttttggtgactctttattttaattttagtctttatttataaaaaagaaaaagaaaaatactgtcatcaatacctggaaatttaatactcaacttagggttcaagctctataagtcctcagacccaagactcagaacatggcattatggtgaccttcttttgtttgttgctcaatactcctattggagatggatctgcaatccaacatgattataccaaggcatttgaaaactcttgaagtgactgacaccgaaggggattgagaaagtaagcagagtctcatatgacccaactggattccatttactttaaagattctgacattctccctagtcaaatcatcaaaagaaaaatcagcatggcttcttttcaaaaaaccttgttcttgatataccctccaaaactttgggatgcaatcataggcatactaactacagatttagaaggaacccaaacagcctagcttatagaggtttgtcttataatcccagcactacttggcaatgaaggaaaggatgattgacaatgtcaccactgctgcacacatggtacactagttaggttcaaagctctataagtcctcacttgcaaatgtgattggtgtaacctttttgtttgccactagatatcaagaccttgactttaggtgaagctttggcttttcaaatgacactgactacgagaaagggaactagagtaactcaactagacatggcaagaaataaaaggagcaggtggaaaataacctggaaggagaaagtgaaatgttcattcataagctagaacaaaaatagtaacaaatcataaatttcatggtctaataggttacatcaaaaattaaaattccaggattttggatggaggggagtgatctgaaatgtgataaatgccacagaatctctcaactcagagggcagatagatagtaagggggttgaacttgcagggctaatctcttcacctagtatctttctagaaaatgatattagtcttgtcaccagcagaaaagtgaggaaaacaagaaaattcaggggaagaaaaaaaagatctgtttgataggcttctggtgacaatggtgcaaccatttgaaccagcttttggcattctatgttccaactattataataggacccataaatacgcctgatgaccctatgccatagatttgctcttcttgtgaatctccatatgccataaatagtcgatttttctttgaaacttccatgccaatgtatgtaaaaagacattctcaaggcaaagacacgagcacctagtcttcgttcaccttgtagtttggaaacctgattccaacctatcagatggttccacctattctcccctaaccagactacaagaaatctctttgatctctctctgttggcatgaattgactaggatcttgaacaccaataaaagttagtaggaatatgaggcaaaaaatactgcatcaaggtaatccaccaccctaaggataaattagttcttctccactgatccagtagtctaatcaaggaaaagttaggtttgttatgtttcttgcgcttttcatatgttgaaggtcctttgataatttgttctgacatttttattacttaaagggattaatctttgttggaaagctttaaccagatcacaataaagatcatc

SEQ ID NO: 11783 - DNA, 5790 bp, Vitis vinifera
  Intron number 4 from transcript GSVIVT01035130001 (locus G SVIVG01035130001) derived from phytozome v7.0 (chr-ID chr5 ; pos 1700074 to 1705863 reverse strand)
aaatctctgctgcaaaagggaagagcttggcacaggtacttacaaatctacacatacacctctttctaaaaccatgaaccggtactggaggcaatactttgattgctttttcgttttctgtggaagtagcttcgttaaaaactttttcagtatatacaagtacatagtaccttaatttcctaagaattttcatctccttttttgtacaaataaaaatcttaaaaattaaaaaatgattttcaacctttaaaatagcataactacaatttcttttagtaaaggaccaaaggtctatatcaaacttgactgaagatagatgtatcacttccatccaacaatggaaccttttgtgatatccacatattctgtttccttatcccaagtgatccgaatgacgtccacggagcaaaaacatgctactagagaattccatggctttttgtgatgtccacatgttgtgtgtgagtttccttatcccaagtgatagtgaattcaaatgttaaaaagtagttttttaaaaagtattatatatttaattacatacattccaaaacctaaaacttttaattatttttcatagcaatcatccatgatgccttaaatttattatttaaaataacctattttcggatttgttgacacaatctgttgaagaagaaccagccttgaactagggactgttagagcagaaactaaaaggaaaaacaaccagtttgcaagaacttctcttaggactaaaatcaaacagctggtacgcaatcaaccaagatcaagaacacaagagacttattgtggttcgatcaacttgatctacatccacctctgatttcctgaagcttttattcaagtgtgccaaccaaagattacacaagaatcaaaacaaagaaattacaagcttttcccaagaaccctcctcacctctgtttctttctatctcaagataacctaaacagatctatggttatggatttgcaaagctctctctttctgtttcttgctttctgttctatacaactgaatgccccctttttggttttctcgagactgcgcccttttatatcaatcacaagcctctaactgactaacaaatgctctcatctgttattttctcagccagctttattatttgctagttgagcttagtcaacaaccttgccacttatcacttgatagttggcaatctctacaaaactccaccttgacaacctattaagttgacaagtgtctgaactaccttcaggtctcagtaccttccctaatgggaagtcttcagcaatctcccatgttgatcaaattcaaacagtgtttgaacttagtcacatttagagacttagtcaacatgtcgaatggattgtctttagtaggaacttttccaactccaatctctcctgcagcaatgatatctctcacaaagtgcaatcttacatcaatgtgtttggacctttcgtggaaggattgattcttggctaaatggattgcactttggttatcacaatatacaacaactttacctctgttcatagccaattcttctgtaatatccttcagccaaattgcctccttcacagcctctgtcattgccatgtattcagcttcagtggttgagagagctaccattgattgaaggttggccttccaactcacagctcctccaaacactatgaatacatatccagtaagagactttctggtgtcaatgtttccaacataatcagcatctacaaacccttgtaactgagttcccaactaactattaccttcataaaccaggcccaagcttctagtaccagctaagtattgaaaaagtcactttactgcttgccaatgtggctttctagggcagctcatgtatctacttatcatgctaaccacatatgcaagatcaggccgagaacacaccatagtgtacatcacactacccaccatgctagcataaggtatcctttccataaaccttttctcttcatgagtctcaggtgcttgtgttatggaaagtctaaaatgttgtcctagaggagtacttactgtctttacattattcatctcaaatctgcttagtacctttgagatgtatgaattttgagaaggcctaagtaccttcttgctcctgtctctttctatctccattcccaaaatcctcttggctgaaccaagatctttcatttcaaattcagccttaagcatctctttgacttgctccaagtgtcttttctccttacatgccaccagcagtcatctacatatagtaaaagatataccatgctatcttcagttagcttaaaatatacacatccatcatggctgctccgattgaatccaatatccagcatttacttatcaaatctcttataccattgcctaggtgattgctttaggtaataaagagatttcttaagtaaacatacctgaccatccttgattccttccccaaagccttcaggtggttgcatataaatcagctcatcaagttctccatgcaagaatgttgttttcacatctagttgatccagctccaagtcttcatgagctacaaaagccaacagcaatcggattgagttgtgtttgactacaggagagaatatctcattgtagtcaactccctccttttgtgaaaaccccttggccaccagccttgccttgtaccttggagcctcattccctaatgtcccttgctttcttttgaaaacccacttggagcctactacctttcggtccttgggtttagtgaccaattcccaagtctcatttttccttaaggaatccatctcctcttgtatagcttttacccactgatcaacctcattgctattgatggcttcttggtatgtttttggttccatatccactatttcttcagctacactcaatgcaaatgttgtcatttcagcttggtcatatctcttgggaggtttgacttgtcttttctgcctgtctcttaccagattataggatttcagcccttgagttagttcattttgtctttcatgtacaatttcttcttgagctgtctttgatgaagtctctttagacttttcaggttgcaaagtctcatgctccacctcaaattgtaactgatctgacccttccacatctttggctggagtttgttttgacatatcttgctcattaaaagttacatctctgctaattatacacttccctttgccttgtgtttctatccacaacttgtaacctttaactcctttcggataccccaagaaaatatactttatagcccgtggttctaacttatctgttttggtgtgtacataagttgtgcatccaaaaactttgagatgttgataatttgcagctttcccagtccacttttcttgaggggttttgaattgtaatgctaatgatgggctcctgttgatcaaatggacagctgtgtctgcagcctcttcccaaaaaacctttgacaaccctgaacttgacagcatgcatctcatcctctccaaaatggtcctattcatgcgctcagctaggccattttgttgaggtgtatatctaacagttctatgtgtagctatgccttccttttgacaaaatgaattaaaatcatttgataggaattcaagcccattatctgttctcaacttcttcacttttctacttgtctaagtttcaaccagaattttccactctttgaactctaggaaggtctcacttttatttttaagaaaataaatccacactttcctagagtaatcatcaataagagttaagaagtaccttgctccacctattgatggtacccgtgatggtccccacaagtcagagtgtatgtagtccagctggttttgtgtttcatgtattgctttggcaaacttcatccttgtagccttgccaaacacacaatgttcacaaaagggcaaatctgtcagcttgtagtttcccaacactccttgcttttccagctcttgtagtcccttgtggctgatgtgaccaagcctctgatgccatagcttggttgcccccacatcctccttcagcacagtagaagctttgtctgtcacagtttggcctataagagtgtacaacccattttttattgtccgtttcatgacagtaagtgaacctctagccactctcaaagagttaggttctgacttgaatgtatatcctgacttgtccaacattccaagtgagataaggttcctttttaacttgggtatatacctaacatcttcaagaactctttcaatgccatcatagtgcttgatcctgacagtaccagtacctagaatcttgcaatgtttattgttgcctagcagaacataacctccatcaacttctttaaagtcttcaaaccaagctttgataggacacatgtgaaaagaacaccctgaatcaagtatccactccttacccgagtccacctctgccacattcagcacctcagcactgtcatatccatccaaaatcacagcaacatcaccttcattcacggttttcttgactgtgttttgtctcctatccgagcaatccttcttgaagtgcccttccttgtgacagataaaacacttgaacttcttggtcttggattttgatctggactttgaattcttgcccttcttttctcgtttttcagatctgcccctgatgtttaaaccctcacccgattcctccttggattcttcttgtctctgtaattctctagcatgcaaaatggactgcacctcatcaaaggtcaggttgtctttcccatacattatggcatttttcatgttagtgtataatgcatctaaagaagtcagtaatagaattgttttatcttcatctgatattgtgatatcaatattttccaaatccaggattatcttattgaagtgatcaagatgctcttcaattgacatacctggggtcatcttgaaagtatataacttgatcttcttatgtaatcggtttgctaatgacttggtcatgtataggctctcaagcttgagccacacctcagctgtagactttgctttggccacctctctcagcacagtatcacctaaagaaagaatgatagcactgtgagctttctccaatagctttattttctgtttttcttgcatggtactgggtaggtttttctctccaagtagggcatcatggagcccttgttgaaccagcaatgccctcatctttagtctccataacccgaaatcatttttgcccgtaaacttttctacatcaaactttgcagtccccattataacccaaaggctctgataccaattgttgaagaagaaccagccttgaactagggactgttagagcagaaactaaaaggaaaaacaaccaatttgcaagaacttctcttaggactaaaatcaaacagctggtacgtaatcaaccaagatcaagaacacaagagacttattgtggttcgatcaacttgatctacatccacctctgatttcctgaagcttttattcaagtgtgccaaccagagattacacaagaatcaaaacaaagaaattacaagcttttcccaagaaccctcctcacctctgtttctttctatctcaagataacctaaacagacctatggttatggatttgcaaagctctctctttctgtttcttgctctctgttctatacaactgaataccccctttttggtttttccaagactgcacccttttatatcaatcacaagcctctaactaactaacaaatgctcctatctgttattttctcagccagctttattgtttgctagttgagcttagtcaacagccttgccacttgtcacttgatagttggcaatctctacacaaacaaatgttggagaa

SEQ ID NO: 11784 - DNA, 1720 bp, Vitis vinifera
  Intron number 3 from transcript GSVIVT01003563001 (locus G SVIVG01003563001) derived from phytozome v7.0 (chr-ID chr7 ; pos 14678586 to 14680305 reverse strand)
ctgggttttcttcatcatttcttcgtatttacagtgtgcttttttttttttttaaatttcaaacaaattttaataaacactaataataattaaagacaaagaattgaattattaagttgtctgtttgaatacttcttattttttatttaaaaaaatataaaatgataatagcttcatataaaaggggagaatttttttagactatactctaaaaatttttaacacttacaatattctatagatgttacaattatttttatttttttttacttttataactaaaaatggattttttattattttaaaaatgaaaaataatagtactttctatataaaacagaggaatttttagtaacataaaagattaaaaaattcaagctattgaattttttattatattaaattttaaggcttggaaaggtaatttttaaaggtatatgataagttttgtataaaaaaaatccttgtttttattttaaaaattattttaaaaacaaaaatagaaaatgaaaagtaagattctatttgaaatgtgtttttaaatgttttatgattttttttaaacaaaagtcaatttaagaatttgaaatatttttaatttattttttatgtttttaaatatattataaagataatttttatatgttgaattccgtacattttctttggactaaaagtctagaaaagttatgaattagaataaatatagataattttttattttttagaaatggtgttggtggcatcattcaataaaataaataattattaatattaattataaaaggaaagaagaatttataacatatcaaattaattaacaaaaatatttgaaatgttgaaaagagagtttttgattttattaaaaagtttatcagaaaattcaaataatatttgtaatttttttttaaaaatagtaaaaaaatcttgttaaaacatttttaataattttaaaaaatgttttttgtagagaaaattttaaaataatttataatttcactaataaatttattagattttttttttaaataactaaggcttgatagtgataaaattttaatttaaaagttgcaaatgaatataaagttattgttaaaacttaagataaaaaatatatttgataaaatatcaaatatttaaataaaattaaaatttatcaataattaaataatatatattgaataatgtgtaattatttgcaaattagcaaatatttgattaaacataaaagtcaaaacatttaaaaaatatcaaaatcaaacaaaaccaacaaaaacatattattaaataaaaaattataaaaaatttatttttatttaaatttattttataataaatttaattttataaatattaaataaaaatttaaaaaatattttataaaatctatttgatattcatacttatctattttttttttacacacaaaattaatttcttagaggggcaaatttgcatttttacttttttttcaatattataaaatttctaaataaatataagaaaagttttattttttgaaaatttgagggagtaatgtgtcattgtgtcccccactaagattatggcgtgcgcccctcttaagttgtacggataatgcatactagaagtctagaatattgatttaaggaagagcatgagtgaagcagtaggtaaagggtttgccttctcatttctcaagtctacataaagtccaccacagtggattcccaaaatttcc

SEQ ID NO: 11785 - DNA, 1169 bp, Vitis vinifera
  Intron number 5 from transcript GSVIVT01031210001 (locus G SVIVG01031210001) derived from phytozome v7.0 (chr-ID chr1 4; pos 1160950 to 1162118)
tgaagcttttgtggtgaaagatcatcgtggggagcgtgagtttttaaaacttaactttatccttaggacttttaacaatagatttgtgacgattagattctaaccttgccattttccctagatttataattctgtttttttttttttaactggtatgcatgagaaatatctctgtgaatttttttagtgctttggtttaactatcagaacatctttctgaatcaggtttatgcttttaatatgcttgtgtaagtatcatgcttgaggatatcagcttatggtttgttgttcaaacaaaaccttgaaaatgacatactcataatctggatctagtaaagaaataggtggtgggcacttgcaatccacatacagaaaccaagggtttgtttggtaactgtttttaaaaacaattttgaaaatagttttttagaatagtttttgaaaattgttctttgatttttataaaacaaaagtctgtttgaaaacctaaaatgtttttaacctgtctttaatatttttaaaaataatttttatatctaatgttttatttttaatcattctacatgtttttatgattatttcttaaaacaactctcagaaaacaagtgaaaaagatagaaaaacaattaaaagatgttctctaaaaatactctattttctatttttaagaatagaaaacagaaaacagttttggttgccaaacatggcttttgtgttttttgttctggaggacaaaaaactattttaaaaaacaattcccaaaaaagccctaaggtaatcacttaggtcataactgaggatacttaatggttaatactgttacatgttttgaaacatatgctgcgcattagttatcttgtaaaaaatcacattcttttagtgttgttgtcactgttgacaaaccacgaaatctctgtagtgaaacataataagtagattattagtatgccactttctttgtctgctctgcatctacctgtttcatgcctaatgtctttgatgtattccttttggtgtgcttgaatcttgaaatatctgtccataggcgtttgaatttaatgtggcctatattcagtatattttgcttatggatagccatagccatgattctaggattgactggtaattttttcatttagtgtataagaagcaccaccccccatcattgg

SEQ ID NO: 11786 - DNA, 20884 bp, Vitis vinifera
  Intron number 3 from transcript GSVIVT01034738001 (locus G SVIVG01034738001) derived from phytozome v7.0 (chr-ID chr1 3; pos 8708399 to 8729282)
atattggtattttcccattttttttttcaattattgatttctacgagctttaacttttggtcagcttgaccttgttaactggccttgtaaatctaattcttcataatattcttaactgtctgaaatatgctttctaggaatttaatttcctgtttcatttttaagtgctaatttttctattggaggggagttctattttcgtctctctttttccctttttgtatagttacaagttaggattttggaaatttctgtactatgatttgtggtttcctctttctggttgcgtctatttgatggattgctgagtgtttgaatgaattttcaatgaaattatagtgtaattgtttttaatacaatttttatattgctttcgataatcaatttattgtgatttgaattgaaaaaaggaaacaaaaaagtgttttctgtgtttccatttcttatcatgttgatatgaatactaataatttgcggatttaaattttcttcattttgtgttggatgagtgtttcttagttttttttttttaatttattttatttatttatttattttggatttacctataccaactcatattcaatactcctgatattagaagtatagcaatctctctgtgtgcactccatttgcacttcccagttattgcctatatctcaccttgcctaggaagttcatatcacctataagaaccttgatgatctgtgtagctcgtcactaattttggccttgtttgttggatgcaagatggcatatgtagaacaattgtacttggtaatcatctagttttgtaactttatgatcaattagtattcttgctctgaagctggaatcttgctttgaagctgaaagtgcaacctggttgattgatctgtgtagtgtaaacaaaatattctacaagatatgcatataaagtcttatgctaatgaccctttctttggttcaaattggaatgatcgtactaatgggcagtcaagagagtatttgttgaatgatggcgtcctattaaaaggaaatcaactttgtgttccagactgctccttgagggaaaagatcatctaagacatgcatggtgaaggcttaggtagacattttgggtaaggtgaggcatatgctatgattgaacagaagtccttttagccaaaaatgaggagggatgtgtaaaaatttgttaaaaggtgtcacacatgccaagaataaaaaagaaaagttcagaatataggtttgtatactccactgctagttcttgtaactccttgggaaggtgaaagcatggactttgtggtgggttgcctagaagtcaatagggaatggtttccatctttgtggtggttgacaaattttcaaaagtggctcatcaaatatagcaaatctctacttttgagagattttgcgattgcatggagttccaaatcaagactccaagtttctctctcaattttttggagaactttatggaagaagcttggatttaggcttcaatatagtacttcctatcaccctcaaatgaatggacaaattgagtttgtcaataaaagtttgggagattcattgagttgtttagttggagaaaatcctaagcaatgggaagctatggttgtacaagcagaatttgcctataactattctaggaattgaagtatagataaaagtccttttgaagtcgtttatgggaggcaaccattgcatctctatgatttagctcttttactagaaatgagaagaaatagcttaaagggtgaaagcatggttgacttaaagaaggatcacatgaaaaatgtagattaaagattgaggagttgaatgcaaagcataagaaatatgcagattagaagaggtgcaatcaaagcttccaagaaggcgacatggtgatggtgtacctagtcaaggaaagatttccaactagctcttatttcaagctaagctaaagaaggatatggcctatagaatcaacaagaagattggggaagctgcttatgtggttgatctgccaaaacatatgggaatagattcactgttcaacatgttggatttatattcatacactggtgagaaagtaaaagaagtcttcaagaacacaaaactcgaggatgagctcttctgaggagagaatgatgcaatcattaatagaaaattgatagcaagtttgaatggtcaaaaggtttgcatgggaaaagtttgttattaaattagaagtcgaaatgtcaatctttatttttgttttattaaaactatagtaaatgaatatataaaggttactaattgtatcttggaaaccatcaaaaagtagttgagggctagcattataaaagacaaaaaacctacttattgtgaggacttctattatttttccaaaagaaatatactaagtgattatccaaaactttttggtttcagtttaagcaaagggtttttcctagatttctccttcaagaaatcttgactcggatggtgtttgaagtaacttggttgtagttttcttggatagtagctatattattttttcagttttcatcaccaatgggtatttggtttatatataaatggtgatgtatatgtagatttatttgaaataaatagaaatgaggggaatgtgcaggtcatttataaatgaaaatggatattattttagttcaaataaaagtaaaatgaactagtctttattgtttgtagttgacttaatttcaatatatttgaaaggaaaaatagtttttttttttaaagattgcatcagtttagaatggttgcattttttaaattagaaaaatatgttttaaaaattctaaaatacttattttcaaatgaactatctgacaattttgttttaattatttttacctttcattttttgaaaaaaataatttttatttagcatgctgcaatttcaaatatcaaaaaattgtattagatacaaaaataggcatgataatgttgtaattggaaatgggtattagtattcagcaattggtcatggttagataatgctatgggattttgaggcattttgcccaaatgaggtatggtgtaagcctcgaggcagaacgaggcatagtaagccacaacttaaacaaataaataataaaaaatattaaaaaaacagaaaatatatatgaagtcataagaaaattgaataatgaaaaagatgtaaacttcataacaattaaattaattatttgtcattattaatagtttctaattttgtttctttttctttcttctcaactttagctcttgcttatattttcatcaaataattttcaacattgttttcattatcactagtaggatcctccaagaaatctaatcatatccaattgatatattatcctccatatcaatgttaatattcacccattcttcttcttcttcttcttctttgtccaccaattgcagtgatgtttttttttatctatcaatgataagataatgattatatatgatatcaaccacttggatagtcaacaattctcttcttctttcttctcattctttttttcccttccatttaaaagattaattgaaagtcaactaagcccttatttcataaaaggttttaccaagtcaagacctaatacaaaactcatgaaatttatgtaaaaaactcacaaaaacatagatgatagatgctattataactcatagaatattaaggctcaacccttctataaaatatatgctaaaagctcataaaggcctaaaaccctttgaatatgaaaatacatggaaaaaggaaccttaaattttttaaatcagtattatcttcttctatttaaaaataatttgaaatacattcactttttagtgagttatctaattattctctaaaatgcccttttcattaacataactagactcctttacataaatatttcccttccttttagatttattattattatgtttgagatttttttttcactatttctaatgtccacactcttcaaactacctcccttttgagatgtttgttcataaagaaaaaaataagtctccactttttctaagaggtgtttttttctagaggaaaaaaaaaatctcaaataataataataataataataataataataataataataataataataaatctaaaaagaaacgtggaagggcttagttgtcaattgatgttgatgacatgacaagtaaaagggcattttagggaataattagatgacttattaaaaagtgcatgtatttcaaattatttttaaatagatgaaaataatactaatttaaaaaatttggagttctttttttcatatattttcatattagtgagtcaaaacctacttttccctaaaagtggtagttggaatcctaagtttattagacaactgaatgattgggagctggaggaggtagacatcttatttgagaggctatatgatcattctatttctatggataccgaggatttagaggagtgggttgacacaaagagtggtattttttctgttaggtccttctactcatccttggctagtaggggagtgaatcgttttcctcacagtatgatctggaactcctgggtccctgttagagtcaacttctttgcttgggaggcaacttgtgtcaagatattgactctagatcaactcaaaaagagggggtggaagatgcctaatagatgctacatgtgcaaagaggaagaagaaacaagtgtccatattcttcttcattgcccgaaagctcatatattgtggcagctttttttttgctttattcggtgttcaatgggtgatgcacactttgatgagaggtttactcttgagttggggaggctttcttattggtagaaaaaggaaaaaggcttggaaggttgctctgttatgccttttttggtctatttggagggaaagaaataggagagcctttgagaattgtgaatgttcagatcattctttaaaaagttcttttttgtatctattttgggattgggtaagattgtatatcaaaaaaaaaaaaaaagacccccacttttccttaaaagaaatttcaatattaaagattgatccaaatgcatgcttttatgaccttttttttttttttgattagaaacaaacatatgtattaattaagaataaataaaatatgttaaggatgagaaatcctcctcgtgaaatacaaacctaataaacaaggggctatacaaaatgtacaaaaagcctatacaagtgtaacaactcctggtcctgtagaccctaccctaaggtgtgcaaatcgaaaaccaactgagttgaattacactcaaagaatagattttaaaaatgtttgtacagtaagctaaaaaagaaacaaagaaatgaaatgcatcccacatcatctccgatgtcttccaagtgtcctaaaaaatcctagcgttcctctgtctccacacaatccacaacaaagagagacacacaatactccaaagagacttacctctaatagagttttcaaaacacttgaaagaaatcaccatcatatcatgaatactgcttggctaaacccacccatgttatccttgcctgtgggaaaatcctatgccacaatcccaaagtaatcggacaatgtacgaagagatgatcaaccgtctcactcctccacctacaaaggatgcaccaatcagggtagagggttttgaaaggtcttctcaactgtagtatgtcattggtatttacctttttatgcgccactaactaggtgaaggccatgaccttagaggggactctttatttccacaataagttagctaggtagaaaggagtagaatttgagaagttggataaagctaaaagaaaggattttactgagacttgaagatgatggaatctaagctttcacatctggaatagaaggagtcaaatgaacatgagaaactaaagacattagtctttcaagatcctcagtctccacatctgttagattgtggtgaaagataagatcccaagacatagaagtatcattacccaatatggctgaaattgaaaggtttttagttgtggtgactctaaaaattcttggaaattgtaagcataatggttgttcctcccaccacaaatcttcccagaaaagaattctagtcttatcacctaatatagggtgagtgtgtgtagaaaaacttggagaatatgtgcaatgactttccaggggcaatgatgtgatgtatcccatagatactcaagataacctaatgccaaaggtaaaactttcctgagtgtgcttttatgaccatttaaattgttaaatgcgataaaagtctattttatcaaatttttagcctatgtaattgtatttatttttcagataattttatgaacttttttagatttttttttctatattaatatattatgcatatcgtttgatatcgatcagaggtactgagattgatgatccttaggacttccctagtcaatgatcaataccaagactttgaaccacaccattagcatgacatttggtgttttcttcctttctattataatgcatggttgtgttagtactttcttccatgctatctccttatcttgtcttgccatgcaatattataatgtttgggcatggatgcctacctctaagcatatgcttaagtacctcaaatatggtggtgacaccatgagtatcttagtgaaatttttactttgttcctgttgtggaaatgagaccttcccactcttctaatcttcctcacctcaatttgttttgctatcctcttagaggactcctaaaccctcccatgtggatgatctccttcaattgagaacctgacttaaataatatataaggggatttattaagggactgattttctcctttcattcttttgtgtcatgagagatgtgctaatcatctttttgtgcaaagtgggggatggtgttcattaatgcctaggtcctataacctgcttttaatttacatatgacaccttggtcatttttatttatttttaattagacacattggtttattctatgccttgcggagccaatttaatatttttgcatctaccttatgatgctttgaaataactttaggattgtgtatcaatttgttggagtatgctttgattggaacaggcttcagctaatcatctccttattcattgtggtatctcatagtttatagtctctactattctttacttatggtgtctcttgggggttgttgccaaagttagtgaagatgtctagctggtatggatgctttctaggaaagaggaggaaaatatggagaatgactcctttaagtttattctaagatccttggacagagcataatcaaataagttttgaagccttagagttgccattgctaaacctaaaaaacttatttcttaaattttgttttagtcaaagaatttgctaggggaagggagtctatctttctttcttagataggatggctgtgggctatggtcttttcccaatctattatcttcctttccttttggtattcattgtatgcttgttgtgtaacaaggttgtgcaaccactttttagtgtcttctaaaattttttctatttgcctattggaaaaaaaaagtttctgaacctggacaggctagtttgagagtttagttgttgaatggctcatctcctttccaacttcttgtattcttctagggggctcttttcaagctactttggtgtggggaattagtcttatggtcatgtgagattagatcttcttattagagggcaattatcattttaaggtgggagaattattcttacaagggactctctcttgctagtttgcccacgcttcccttttcctgtttagaaactgagcatggtttgttaatagatggaaaattttgaagagactgcttattggtgtgtgtgtgtgtttgtgtatacattaagaccttcagtgaggtaaaaaaggtggctgttgaggttttgggagaatgcagacagaccatagaggatttttatttggactcaatatgaagagggcactaatggatggaattcttatgaggctatatgccattatggtttttgggtgtataagtctttaaacttaggcccttattccctaagacaaaattgtagattcgtaatgtggctagctaaattttgggtgatgttgattttgggatgtttctctttaagctacattttattctctgttttttatttttaatttgcacagattggttgtaagtggagaagtgaaaatcccctgttacttttggaatttgaagagtgaagtggaatgactcctttggttccttctggaatttgtaggtctgagatattttctaaagcatgttttaccctgctttagaatttgtctttggatttgtctcaagcaaatgaaagaatggcattctctaaagcaggaatattgaagggcagtgtaggacttggatataaacaggttggagaatgttatgtgttgaaataatgccaaagttaggactttaatttaggaataaaaaaggagagatcatttaggatatttccttatgatttagtttcctaattttaggagagaattaagctagattgattgtttcttattcagtcatttgtgtatatatatgtgtatggtgtgtaccgattcattatcaataaaggagttcagaaattcttcatggtatcagagccagttttctgaaaccctaatcccttctggccacctcttattcaggccatcactcattccggccaaatctttctggccatatctcaatccgatcatctctctctctctctctcattccggccatcagtccctgttctcagagccaagggagaaaacactttccagtcagtcgaatagtcgtcagaaaacactcaccgccggcaacttttccggcgaacttttccggcgaatttttccggcgaacttcccggcgacggtttttttctacaccgcaaggagcgcctggaggagatctccaatttgtcccaaagcaccggaaccagaaacccatccacgcgccgcccacgcgcgtttttccggccggcgactgcatctcacgcgccggcgcgtgagggcgcgtgagccactttccggcgacgcgcttcctcctccaggctcgcctgacgccgaccagccacccttcctacctgtttgtgcaatccgagccctgcacgtgcctcttttggggttcttttgcttccgcgggccctctgatcagattttccggcgtccttcggctattttttctcaactccagtccctgcacgtgccttgaaaagtgttcttctacctttccggtccatgacaaaatacggaaaggcatcatcacaagtatccagcgtcacgtcaccagaatcagggggcagatctgaaattccaaaccttggtggcaatgattcctctcctattctcatcacaggacacaaattaaatggccataactatttacagtggtcacaatctgtgttgctgttcatttgcggtaaaggaaaggatgagtacctcactggagaagcagtcatgccagaaactacagaaccgggtttcaggaagtggaagattgaaaacagcatgatcatgtcatggcttatcaattccatgaacaatgacataggcgaaaatttcttgctgtttgggactgcaaaggacatatgggatgcagccaaagaaacttactcaagttctgaaaatacttcagaactgtttcaggttgaatcagctctacatgacttccgccaaggagagcagtcagttactcagtattacaacacactcacaaggtattggcagcaacttgacttatttgagactcactcatggaaatgttcggatgatgcagcaacatacaggcaaattgtggaacaaaagagactgttcaagttcttcctaggactaaacagggaattggatgatgttagaggccgaatcatgggcattaaacccctgccaagtctcagggaggctttttcagaggttagacgtgaagaaagtagaaagaaagtgatgatgggatcaaaagagcaacctgccccaacattggatgcctctgcccttgcggctcggtcatttaatagtagtggtggagatcgtcagaaacgggataggccttggtgtgattattgtaagaaaccaggccattataaggagacttgctggaaacttcatggcaaacctgctgattggaaaccaaagccacggtttgacagagatggcagagcacacgtggctgccaactctgagagcacctctgttcccgagccgagtccattcaacaaagagcagatggagatgctacagaaattattaagccaagttggcagtggcagtactaccggtgtagccttcactgctaatcgaggaggaatgaggccgtggatagtagacacaggtgcttctgatcacatgacaggagatgctgccattcttcaaaattacaagccaagtaatggtcattcatccgtccatattgctgatggttcaaagtcaaaaattgccgggacaggttctataaaacttactaaagacttatatcttgactctgtcctccatgttccaaacttggattgcaatcttttgtccattagtaaattggctcatgatctccaatgtgttactaaattctatccaaacttgtgtgtttttcaggacttgaaatcggggaagatgattggcagtgctgaactgtgttccgggctctacctcctttcatgtggccaattctccaaccaagtctctcaagcaagttgcgtacagtctcagagtatgtcagagtctttcaattctgtgtcaaattctaaggtcaataaagatagtgagattataatgttacactatcgccttggtcatcctagctttgtttaccttgcaaaattgtttcccagattatttatcaataaaaatccagcatcttatcactgtgaaatttgtcagtttgcaaagcatactcgaacagtatatcctcaaatcccatacaaaccttcgactgttttctctctagtacatagtgatgtgtggggtccctcccggataaaaaatatttctggcactcgatggtttgtgacattcgttgatgatcatactcgggtaacatgggttttccttatgaaagaaaagtcagaggtcgggcacatttttcaaaccttcaatcgtatggttcaaaatcaattcaattccaaaatacaagtcctcaagtcagataatgcaaaggaatactttactagtagtctcagtacttatcttcaaaatcatggcattatccacataagttcttgtgttgacaccccacaacaaaatggggtggccgaacgcaagaatagacatctcttggaggttgcccggtgccttatgttttcctctaatgttccaaactatttctggggggaagctattctcacagctacctatttgattaaccgtatgccatccagagtgcttacctttcaatccccacgtcaacttttcttaaaacagtttcctcacacccatgccgcctcttctgatttaccactcaaagtatttggttgtacggcattcgttcatgtgtatcctcaaaatcgtagcaaatttgctcctcgagcaaataagtgcatttttctagggtattctccaacccaaaaagggtacaaatgctattctccaaccaacaaaagattttacaccaccatggacgtctctttctttgaacatgtcttcttctatcccaaatctcatgttcagggggagagcatgaatgaacatcaagtttgggagtcttttcttgatggtgtaccttcttttcactcagagtcaccaaatccttcccaattcgcgcccactgagttgtccacacccatgccgccatcagttcagccagcccagcacacaaatgttccttctcccgtgaccatccagtctcccatgcctattcaacctatagccccacaacttgctaatgagaacttacaagtttacatcaggaggaggaaaagacaggaattagagcacggatcacagtcaacatgtggccaatatattgactccaattcaagtcttcctgaagagaacataggtgaggatagggctggagaggtgttaattcccagcattgatgattctactttgccaattgcattgaggaagggtgttaggagatgtacagatcatccaattgggaattatgttacgtatgaagggttatcaccatcttacagagcatttgctacttctcttgatgatactcaggttcccaacacaatacaagaggcattaaaaatttcagaatggaagaaggcagtacaagatgagattgatgcacttgagaagaatgggacgtggactatcacagatttgccggttgggaagaggcctgtggggtgcaagtggattttcaccataaaatacaaagcagatggatcagtcgaaagattcaaggctcgtttggtagctagagggtttacacaatcctatgggatagactatcaggagacttttgctcctgttgcaaaactgaacactatcaggatccttctctcattggctgtcaatcaagattggtgcttgcaacaactggacataaaaaatgcgtttctaaatggggacctagaagaggaagtctacatggaaataccacctggtttcgaagaaagtatggcaaagaatcaggtttgcaaactccaaaaatcattgtacggccttaaacaatctcctcgagcctggtttgatagattcacaaaagcagtcctgaagttgggctacaaacaaggtcaggctgatcatactctatttgtcaagaaatctcatgccgggaaattggccatattgatagtctatgtcgatgatattattctatctggaaatgatatgggggagttacagaatttgaagaagtatttgtcagaagagtttgaagttaaagaccttggaaatttgaaatatttccttggtatggaagtggctagatcaaggaaaggaatcgtagtctctcaaagaaaatacatactcgatcttcttaaggagaccggtatgcttggatgcaaaccaattgatactcctatggatagtcagaagaaacttggtatcgagaaagaaagtacaccggtagacagggggagatatcagaggcttgtcgggcgcttgatttatctctcacacactcggccagatattggctttgcagtgagtgctgtaagtcaattcatgcacagccccactgaggaacacatggaagcagtctacaggattcttagatatttaaaaatgacaccagggaaaggcctattcttcagaaagacagagaaccgtgacactgaagtatactcagatgcggattgggcaggaaacatcattgacaggcggtccacttccggatattgttcttttgtctggggaaatcttgttacctggaggagtaagaagcaatcagttgtagccagaagtagtgcagaagctgagtacagagctcttgcacagggaatctgtgaagggatttggataaaaagggttcttagtgaactgggacaaacgagttcatctccaattctgatgatgtgtgataatcaggcagctataagcatagcaaagaaccccgtgcatcatgacaggaccaagcatgttgagattgacagacactttatcatagagaaggtgactagtgagacggtcaaattaaactatgttcctaccaagcaccaaaccgcagacatcctcaccaaagctttacctagacctaacttcgaagacttaacttgcaagctgggattatatgatatatattctccagcttgagggggagtgttgaaataatgccaaagttaggactttaatttaggaataaaaaaggagagatcatttaggatatttccttatgatttagtttcctaattttaggagagaattaagctagattgattgtttcttattcagtcatttgtgtatatatatgtgtatggtgtgtaccgattcattatcaataaaggagttcagaaattcttcattatgtgtagaagcatttttctttttatgtttaattatgttaatggagtccacataccgaatatacaaagtataagttcattcatttgtttgcatttctctctttctttagtgagggtgtggaattagttgatgcttgatcttggttctctttctgttgcatactctatgtgcattcttctttttatttctatttcttagtgacaccgatatgtttatatgatgggagagtttaaagctcttatctaatagtttatgtttgactaatgagctacagatccaatcctatgggcatattgcattaagctgagagcatctttgaatatttccgcaattgggggtagcttataatgttatagctatccctactagatgtaatgtttccctggggtaaggtgcctaatatttatgattcccgggtagttaagaattgaaatattggagggttaagcaactaatcattgatttaaaattgtgtgattcttcttgtgtaaacatttagagattttgaggggaggatggttagagcattttccaagctagccagatttggcttgaccatgtaagtagaggccttgtgtcacaccctcgaaaatcaccttaaatttttcttatgagtgcgcgatgctatggacccatccttagccaaccttcccttcccaacgtttagaagaacagagtagaatacagaaatcaaagcaacagggacacacgaggttacaggaaaatcctttcccaacttgtattaatcactcttacaagacaaaattgcttcttgaaccagagtacaatgcacttacccaaggcatacgagaaggaaccctttccccaactctcaccccctgttttaaggctacaggagccctatttaaatgactcatttgcagttacacatttgaattctctcaattcaaatcttggagccaactaggtgatcatgcaactggccagaactgccctcaactgcttgcacaaccacccactgtggatccggccccttgcgacacgtggcatcgctcatttcacccggacggaaattctccctcattccactcggacgggaatccctcattacacccggacgggaatccctcattacacccggacgggaatccctcattccacccggacgggaatccctcattccacccggacggggaatcccttatccggatgtctcacagccgccattctgtccggccgacattccaccttctccggatatctcacatccggcgcctgtccgccgacattccacccggatctgaatcaagtggctaaagggctgacaattcacccccgcctgttgaagtcgacgccctcgtcgacttagactgccagtatgcctgaacctccttctcaaattgccataaagtaacatctctttcccatgaagtttcggtttctgaaatccccttccattgaaccaagaaatcagttcgccgggtctttctgctgtgtcccatggtcctgtgatccaagatcttctctatctcccgatcaaattgtttcatgaccaagggaggggctcgctttgtctgcaccctctctgcattcggatcctcatggtaaggctttagaaagctcacatggaaagtcgggtgaagcttgagcctttcaggcagcttcaacatgtaggccacttgcccaactcgtttgatcacctcgaatggtccgtcatactttggaattagacccatctgccttgtcttgctgctgatcctcttccagatctgaggagtcaattacaggaggaccctgtccctaacctgaaattccaatggtctgcggtcacgatccgcatacttcttcatccgtctagctgccttctctagactgtcccgggcttcatcgaacatctcctgccgggactgagccaacttgtatgctgctggattacttcctccagctttttgcttagccatctccaaaggcatccgtggctgcaccccaatagctagctcaaagggactcgtccctgttgctgagcttctctgcaagttgtagcacaactgagcagtatccattaagtccacccagttcttttgtgttgctgtcacatagtgcctgaggtactcttccagcaaggcattgatcctctccgtctgtccatcagtttgaggatggttggcggttgagaatttcaactctgaacccaagagtctgaacagctcaacccaaaaccggcctgtgaatcgtgtatctcgatcactgactatgtccttaggcaacccaaaatgtttcaccacattactaaaaaacaacttggcagcttcctccgcagggcaagcttcaggggcaggtataaacacagcatacttggaaaatctatctaccacaacaaagacagatttgaaatcacgaacctttgggaatccagtgataaaatccatggaaatgttctcccaaggtctctctggaatggggaggggctgcagcaaccctgcagccttcttcctttcggtcttgtccatctgacagaccagacatgacttcacatatgcttgaacatcctcacccatcttaggccagtaataggatctggctagcagcgccagagtcctctcttctccgggatgacctgcccacttcgaatcatgggtttcccctcaacaaatccttcctcaggccacctgtagggacatatcatcttcctccttttgccacaaggaggtcaccctctagccaataccttctgatcactccctcttttacttgctgcttcagtctaccatatgcagcatcctgctccgcagctagcttaatcttctcattgaagtcagagatgactttagagagggtcgttatgtaggcaattacctccttcctactcaaggcatcagccacagtgttatgccttcctggtcgatgcagccactcgaatttgaagtcggccaggaactcctgccattgcgcctgtctgggactcagcttcttctgagtcttgaagaaggtgttggccacattgtccgtgaccactgtgaagatacttcccagcaagtaatgcctccactgctacagacaatgcaccacaacagtcatctccttctcgtgagtggagtacctttgctctgcattattcagcttcctgctttcaaatgccacagggtgcccttcctgcaccaagactccacccaaggctctattagaggcatctgtttggacttcaaagggtaagtccaggtctggcaaccgcaacacaggctcagtggagatggcttccttcaagccttcaaaggccatctgacactgcatgctccagtcccatgagttgtccttcttcaacaggtcagtaaggggagacaccctcttggaataccccttaatgaaccttctgtagtagttggccaagccaaggaaggaccgcaactccgtcactttggtagggactgtctactccattatagcctacaccttacccttgtccatcctaatcaatcctgcactgatcttatgtcctagaaatgtgatcttctcctgagcaaactcacatttctctggcttcacataaagcctattctccctcaatctctgaaacaccaatcttaagtgcttctcatgttctgttagagttttactgtaaactacaatgtcatctagatacaccaccacaaaggcattcaaataatcaaacagaacatcattcatcaaattacagaatgtagcaggagcatttgtcaagccaaaaggcattaccagaaactcgtatgatccataccgagttacacaagtggttttcccttcatctcctgctgcaattcgaacttgccagaagcccggtctcaggtccagcttggtgaagtaagaagcttttgacaatctgtcaaatagctcagcagccaaggggatcgggtacttgttcttgatggtcaccttgttgagggctctatagtccacacacatgcggagtgagccatcctgcttcttttggaacagcactggtgcaccatatggggctctggagggctggatcagacctgcatccagcaactccttcagttgcttccgtaaatccagcaactctacaggaggcatccggtaaggggcttgagccggggcctttgttccaggtaacagctcgattttgtggtcaatgggtcgccagggtggcaactccttggggagttctgcaggcatcacatctttgaactctttaaggatcttgaccaccgagtcagggacttccatagactgtccctctttgatctcgatcagggctgcaacataggtctcctggcccttcttcaatcctttcttcaattgaatagcagacagcatctcaggttgtcccttaccaccatctttcgtcctcaaggccttcacgaagcaaggctacttctcttctagcaccaccaatccaccaagatgtggaatcaaggccaccttggcccttaagaggaagtctacaccaaggatcaaatcaaaatcatccaaaggtacataaagtaaactacacgtacccttccagtcaccgatctgcatagggacgttcttgactaccccttggatcttttgggctttgctgttgactgccttgatccgattggtgtcctcctccaatttaagtcccaacctggttgcttctctggtggccacgaaattgtgagtgacaccactgtccactaaggccttcactggcacaccattcaccactgcatggacatgcatcagagacttctagactggggtctcaccattgatcacattcagaagttgcagtgggttgactcttggagcggtctccgagtcagagtctcccttgtcgtctgcagtcacaagggctgagagtttctcccttttggggcagtctctggctcgatgagggccattgcagatgaaacatccagccatctgggtggtctgctgcacgaacttagtggtctcctccactggctttcctcttgcagcagggctcttgccttgtttcttccacccaggcttcttaggagctttgccctcagcctttgccctcttgcccccatctgacttgggtctctgcgtggtggagatggcaccacccatcttgtagtccaccaggcagtctgctgcagcaatggcagcagggagatcacgaactccttgtctccgacgttccgtctgagcccatccttgtaaacccgacatgaagttaaagagcttgtcctcctctgatatgttctttatgtccagcatcaaggaactgaactccttgacgtattctctcacggatccggtgtgtctgagcctttttagtgcctctcgagccatccacgcagtgttggtgggaaggaattgatccttcaattcctttttgagagtctcccaagtggtgatctggggccttcccgactctgcatcgtcttccaccctggttcgccaccatagtttggcatcaccagtcagatacatactggtgatggaaaccttctcgccatcaggaacatgagcagccttaaagaactgctcgatgtcccacaagaagttctccagctctttcgcgtttctgttgccattgaagcctttgggctttgggactcaaactttggaaggggcttccgggcctgaggcagatccctgcaacaccgctttcttaaggatggcgatgtcctctccataggactgcagggtctccttgaagtcatcaatccgggactacatctcggttttgaacttagccaatttctcctcaaagaaattgtcatgggactccaatatactcctctgagcttggacttctcccctggtgtgctctgcccacgaagccattgtgccttcctcacgtggccattctcccagtgcctcttctatttgagtcatcctctcccataaggcttccattgcactaccaccagccatctctggtgcttgctctgataccaactgtcacaccctcgaaaatcaccttaaatttttcttacgagtgcgcggtgctaaggacccgtccttagctaaccttcccttcccaacgtttagaagaacagagtagaatacaaaaatcaaagcaacagggacacacgaggttacaggaaaatcctttcccaacttgtattaatcatgcttacaagacaaaattgctttttgaaccagagtacaatgcacttacccaaggcatatgagaaggaaccctttccccaactctcaccccctgtttcaaggctgcaggagccctatttaaatgactcatctgcagttacacatttgaattccctcaattcaaatcttggagccaactaggtgatcatgcaactggccagaactgccctcaactgcttgcacaaccacccactgtggatccggccccttgcgacacgtggcatcgctcatttcaccaggacggaaattctccctcattccacccggacgggaatccctcattccacccggacggggaatcccttatccggatgtctcacaaccgccattctgtccggtcgacatcccaccttcttcagatatctcacattcggcgcctgtctgccgacattccacccggatctgaatcaagtggctaaggggctgacaccttgctttattggaagatttggttgagacatcctaatggggtattagtaagtttcaatttcactattgttctcttgtgggtttcttagggaaacaggaggttgtggaaattggctttttggatttgaaaaattgttgacctcttaaagggtgggtgttgctttgctgccaagcctagatcagaaatctagactgcaaattgcttggccaaaccaggagcctctaagctataggttgaggattttcttctcctttagctgtttgttttctgtgagaagagatttttgggttcaggtagggctttagttagagatttgagagtgtcttttttctttgatgccctattgtaagtttgatctcttaccctccttatgtttagcttgaaaagatagcttatccttcctcttgcctaaatcttgtattaattcaatttctgttgggctttttgaatgtttcagagaataagttgtggttccaaccagagtgcactggg

SEQ ID NO: 11787 - DNA, 5982 bp, Vitis vinifera
  Intron number 2 from transcript GSVIVT01035282001 (locus G SVIVG01035282001) derived from phytozome v7.0 (chr-ID chr4 ; pos 11931100 to 11937081 reverse strand)
ggtaaggcaagtgcccaatccccatttcatttctctatgatttgtgtttaggtttatgccttgaagatgatagcctgtaaagcattgcatgtttaatggagtttgtggtgatggacatgggaagtttaggattatgggactttggatgatattattggactacttaaaacaactacaagtgtaaagaagaatggggataatggaacccctcatcttaactcccaataggctctggactacttatccaactagcaaaagcaacaagcacacggaacaatccaatccactttcaccatcttgattcaaggccttctttattgtttgttgtttagaggattcttgttgtcgtgatttcaagctttgttgaagttaaggttttttttttttacaagtatttgttgaagttaagtttatgaacagtgcccttagattttccctttctacaaactgcatctaaaaattttccatgccttgtttgtagactagattgttattgatgaattgctttagtctttttaatcaggattctctcagtgatcttctataagttggtctgttattttcttggaaaaatggatcaataaattcgaaaccaaaaacattcaccaatcaacaacaaaacaccttcctactttaatccaccctgttgagcacttggagttagaattctcattttggttaacaatccccttctagcaggattcctgagaaaattttatcaaaatcccgttgttaattcctaaatattcagtaaagtagccatagtattattgctgtttggacctagagctttatctctaacctcctcttcctgggttcaaacccactctaactctaagccttgcagtgcccttgtggggcatgaccctgaaaattacctgaatctccttctaatgagatatttatcctctaggacacctagcttgtgttccaaagacttaaagttggtttttttgagctctcacatttacaaatttataagaaagtttagaatttgaattaccttctttaattcattaaatatggattttaacctctaatcaacttcctcctcgaatagaggggtcttgagatcccctttaagggaatctccctctcttttagacaaccagataactccgtaatttccttgtaagccatcaattatttttatctctttaaaaccctttcttttctatttctataatccctagtggtcttttttttaataggtaaaaaatttaatgtattaacaatgcctaaaaaaggtgcattaaggtatagatggtgtatgtaaggatgccaaaaggctaaaaaaccaagaaacaaggtgaggtgtacaaaaaaaaccacaacacaacttagaacctaaccactccacaaagtacatcatggacaagaagcaatcatctaaagacactctaaccagttcaaacaaaatatacatgaaggattgcttaattacttggttatctttttttttttttttgatagataaacacacagaaaatatattaagaaaaagggtgcttaagaggcaactcaaagcatacaaggagtatacaagagacgccaaaagcaagaacacatagaagcaaacactcaccagccctcaactagaacccaaccaatcaaaaaagttgattaaaggtaaaggtcctacatctaaacaagacttagaccaagaccaaagattacaaacaaatgaatttttcatcatttgaatcgaaaaatcctcattaacaaaagttatcctgtttctttccttccaaatcgtccaaaataaacaaagaggagctgccaaccaaacctttctacgcttcttgcccacaaaggaatcatgccaacctaagagagtgtatttggccaaaagcgtaaggacccaattaacactaaacaaagtaaacacaaggtcccacaaaaccctcgccttggagcaatgaataagaatgtgattaatcgtcttcttttcagcacaacacaggaaacatctgttggctaagttccacctcctcctcttgagttgatctagggttaggaccttcctccatgaagcttcccaagcaaaaaaacccaccttagtaggaacacaagggctccaaatgatgttccatggaaacgggactgcacaactaggttcaagagtattataaagggatttaatagaaaaaaaatctcattctttgtttctttccacaccaccttgtcctccaaaccaacaactagtctctttccttgaagagtcgaaaggagcctcaccaccgcctctacctcccaatcattgaaagatctagagaaacggggattccaccctccctcttcccccaaggaatcccaacaatccgctacccacgcatctttagaaaccactaaggcaaacaaagaaggaaaagaatcatgaagggtattattcccacaccatttgttcttccaaaatctcacccttctaccatctcccacagagaaagtaatatttttaagcatcaaggaaccttcctttctaatttccttccaaaaccccacctcatagtcctcccttacttcattggtactccaccctcttccttcctccccaaacttcctactaataacaagcttccacaaggactccctttcaaccgcatagcgccaactccactggggtaaagtcttaactttggagcatcttcaaaggagggggttctcatcggcaaataggtgttttctatgtctctctgaagtaaaaacggtggatcaccttttacttcattgtgtaaagacacgggtcctgtggaatcttcttttctccctttttggtgtggcttggactctattgtgtatagtgaaggaaactgttcttggatgacatggaccgtttgtggggaaagttcgaaagaaggcttggcaaatgacccccttatgtatattttggtcagtatggaaggaaagaaatttattagcttttgggaatgaggagtttttgcttcaaagactgaaatattcttttgtatgtaatctttggttttgcgttaggatatctttagttttgagcccttcttctcttgtaagttttttagattggttaggctctaagtaagggaaggtggtgtgttgctatcctttctccttaggagtgtgtctttgggcttttttgtatactccctgtatactttgagggcactgtttttggtgcttcatcttcttgtttaatatacatccttttatctatcaaaaaaaaaaaaaattcacttttatccaaattgatactcagccctgaaatggcttcaaaccacattaacaaccaacttaaaaaagacatttgctcctgggaagcctcacaaaaaaccagtgtatcatcagcgaacaacaggtgagtaatttggagatcgtcgccactccttccccttatattaatgagacaacttaaagcctccatcccaatcacaaataagtaagggaatagggggtccccttgccttaaccccctagtgctttgaaaaaaacccgttggcaagccattaatcaaaactgaaaatgtagtagtggatatacaccaactaatctagccagcccatttctccccaaagcccattttttgcatcactatcaacacaaaattccaattagtatgatcataagccttctctaaatccaacttacacaacactccactttcattccttttcagcaaagagtctatggcctcattagcaattaacgcagcatcgagaatttgccttccttcaacaaaggcattttgggttgatgacactacctttcccactaccttctttagcctgttagctaagacctttgcaagcagcttgtacaatcctctcaccaaactgataggtctaaaatctctcaaatcatttagaaaggttttaggtaagagacttaagaaagtggtgggtaaggtgatcttgatattatggaacacttgtagagggtagacaaattcttgatgtagcaaatgaggccatagattcttaggttgaagagtaataagttagacattgaaatggtgtatgaccatgtcttgatcttggttcttgagaagatgaagtttggttagagatgggtaggatggattaaatgttgcatatccttagcaaggttttcaatgattgttaatggcactccctcgggtttttaccatagctctaaaggtttgagataagggcaccccttatctccctattcatttgttattgtgatggaggccctaagggagggtggttatcttacgggagttaagataggttttgggttgtgggggggaggtggcaaaagggaggaggtgtatcctttgttgtttatggatgacactcttattttttgtgaggtttcctaagatgaaatggttcatttatgttggttactcttgtagctttatcggggttaaaaattaatctggataagagtgatttgattcctattgctagattggatcatgttgaagagttggtgtcagaattagggtgcaaagaaggcaaacttccagctacctacctaggtttgcctctgggtgctccctttaaagcaatggcggctagggttgaaaagactctgtcgaaaaggcaaaggcaatttatttatttatttttgtgggggtggggggttacgttaatcaagagtacgttatctagccttaccatttgttttttgtttttattcaatattttgaggaaagtcaaattgaggttggagaaaattcaaagagatttctttcggggaggtggagcattggggaaaaagatacacgttgtgaagtagtcgataatgtgtttggagaagaaaaagggggcgaggggaggggaggggttaggtattaaacgtttttaattgttgaataaggcgcttttatgtaaatggaattagtggtttgcaattgaaagaggagccttttgcaatcaagtcattagtggttaatatgaggaggaagagggtggttggcgaatcttgagaagtaagagttgggtatggggttgggctttggaaatctatcaggaaggagtggaataatttctattgtaattcttttctttttattggtgggttatgggaggagggtgaagttctggaaaacaaaatggtatggggatgaaccgctaagtgtttcattcccttttatatgccttagttgtttcaaagaggcaggggttgcagatgtgtgggtttagacaagggaaaaaggccattggaaccattgtttctcttgactttaaatgattgggaggtggacattgtaaaggatttattttcaaggttacaaggggaagtagttgatagtgagcggggaagacgaggtggtgtggatgaccttgagaaacaacttctctattaagcttttatgtgctgctttggaactgagggaaacgttcttctttccagagagtgtgatttggaaccctccggtcccttccaaagttagtttttttgtgtgggaggctagcttaggaatttttttacaattgatcagcttcagagaagagagtggtctatggtaaatagatgttttctttgtaaagaagagaaagaatccatggatcacatcctcctccactatgccaaggctagtgttctttgggagttgctgtttgctctttttggtgtccaatgggtgcaagctgcaatagttaaggaggctttcctagagcagcatggtctctttgtgttaaaggtcgtttgagaatgaagagcattcagatcattatttgaagatttctttccttagtattttgttttcatgggtgaagatgtacatagagataggttctatgtctttatttgattttgtagagtggttggattcttgttaagagagtgttgtttttgtgttctctttggttcgatgtgctttttggcttgttttttatatgttttgtgtactttgttgcgtcatttttggtgctttttaatataattgcatttgttgcttataattttttttttaattgcttgattttgtccaattggaaggttatgattctatgatttgttcacgtcttttttcagattcct

SEQ ID NO: 11788 - DNA, 19880 bp, Vitis vinifera
  Intron number 10 from transcript GSVIVT01035749001 (locus GSVIVG01035749001) derived from phytozome v7.0 (chr-ID chr 4; pos 3926347 to 3946226 reverse strand)
gtgttgcgtgcagctccatctgagctacttaacctgtgagtttgatggcttctttttttttttttttgtctttttatcataaacaagaacatattcataaaaaaaaaaagagattacaagagaaggataagaaatccttccctaaattaaaaaacctgataaaaaacaatggaaaagaagtacgctccaatagacattaaaacgatccaacattgctattttaacctttttgatatatatatattgaaatctaatctagttggaataatgttaggaggaatgcctttgaaatctgtagattgtagtagtagaggtccaaaaagatgaatagaagtagactagatcccatatcatctctaaagtcctcctcttgttctcaatgatccttgcatttctttcctaccataatatccaaatcagtgtaacacaagcgattggctaaagaactttgcctccagtagtgcttcccaaatccttaaaggaaattgttaatatgtcactgatacttgtaggaggaagcaaatccaatctggttagtctaaatagcttgtgccataactctaaagtcattagggagtaaaaagcaatgccaaggacgttgaaggtctctgtggagaggaagaccttcttggttaggttcgaaggtgaggccgggggaaaatggtgttcgcttacagagcacagtagaggctctgttttcgccttaggttttgagaaggaagaggttggttggatgatagaacatttgacgaaggccattgagatgaagaatttcatgggtttcaacagaaaatttagaggaaaaaccagagtacatttaatggaggtttgcttcaacaatcatggtaggtttataaggctctcagagttcgcttctaacagaaagtcaactttcctggtaatacctgagggagagaatggtaggggatgagaaaatctaaagattacgttgtcttcaatgttggtggtcccctcctcgagtactgttgaaaagggaagacagtgcagggaaaaagggacttttcacaaacatgtgggtcctttgtgccgatccttcgcgaatgtagttagagaagaaggaccgaggagaggaggccttgttccagtcaggagatgggcaagagctgtggtgtgcgaatgtcatgttggttctgttaactgggttgaggtcggtcgggctttggcgaaaagtttagggcataaaggtgtggtgactatcatccccttctctggtggaaaaggattattttttgtggaaaccatagaggaagctttatcactccaggatttaaggtttatttggatcaagggtgggcttacagtcttgttaagaagatggtcgccaaaggaaaattcagtaatagagggcaaattcagagaaggttggatagaattacgaggtttgccatttcatttatggtctgaggtacatttgaagaaaattatggggtagtgggggacggtgacaatgaccgattggagaacaatgaaattgtttgatcttagcaaggcaagggtgagagttgtaatgaaggaacgatcaattctcccagctttgatcaaggtattagataggggatgggagttcacagtttcagttgcagtggctggagaggaagacgttaggagaggaagagaaatgggtgagtcaacttaacagaagcttgaacctcactcgtggacaggtggcagaaagagggctgaggaggctaaatcaacggctgtaggtagggcttctgatggggcagttggcagaatgaaagagggaaaagtttgtcaaaaggttgatttggctcctgtggggacacgtggcaagagaagaccgacagtggggaacaacttgtcccaaccatcccagtcttttagtttgaattcaaatattctgagaagcttcaggcctccaaacaagggaaaagggcccaatcttctcttaagcccaatccacaggttgaaactgacttgggccagaagaggggagtttctttaattggtccgctttcgttgtttggccaagaaatgggaggcaaacaacccatctctgcgaagggctctttacgcagagatgacctctctgcaaagggaaaggggaaggtaggctatgaggattttgaagctcaattgaggggtttcgtgttgaagtgtggttcaaagaagctgtggaatgccctgttccctccaagttctggttgccgacaagggggtcgaagtcgaagcgagcctttaacgcttgagagaccttcgtcagctagtgatgatcttccgaaggaagattttttcaaagcgggaacacagttggaacagagcttcagtgcgagtccaagtcgcttgtcggggagtccaaaaaggtgttctggggattgggaaggaacatcgccgccgagtggagacgaggatcaaaggtctattcttaaggctccttttctttcaaaaggcaaggagaaattgcgcaacttctctaaaggtgagacagagtaggttttaggggttttgtgggttttcctcatcatggctcattagacgtggtttttccttcttatccaataactagagaaaaagggctcaactctgtggggtcttgtggaatgatggtagtggaaaacctcgaggtatcttcttatcaacattctcagtcatcgctgtctcttctttcccctccctctggcttggctcttacacacctgagtccttctgttcccgttcttcccaattcagccattcagtctcagtttcctatgaaacctcgagttatatatgaaattttttccaaaaaaaatgacgatggggctttttgtcttgggtctgttggcaatcctaatcgagatgttgcggtgtcccagttagttagtctgaaccatttgtccgagagttttaaatcctttaagcccaatcccagctcgactcttagggcccctaacctggttacagttagccagggtgatgcggagtcccccccgatgggtgggttccaaattgaaggcctttcccccagcaaaatggccaaagtctgtgaggtcttaagttctctggacattaaggtgtattcaaggcagaagaacatatttaacacagatagttgagatctgttggcgttggtttggaagtttagggtcagtgagttgtatttatgaaaatcatcagttggaatactaggggcttgggttctaggaaaaaatgaagggtggttaaggattttttaaggctcaagaattcggatgtagtgatgttccaagaaacgaaaagagaggtgtgcgacagaaggtttgtaggtagtgtctggtcggttaggaataaggagtgggttgctcttctggtgtgcggggcttcaggagggattttgatcatttgggactcaaagaaattgagcagtgaggaggtggtaattggatatttttctgtttcagtcaagtttttgttggatggatgcgaacctttgtggttgtccgcagtttatgacccaaacagtcccttacttaagaagggtttttgggtggagctgttagacatttttggcctttcttttccattatggtgtgtgggcggtaattttaatgttataaggagaagttcagaaaaattgggtgactctagtttcacttctagcatgagcgattttgatggttttataagagattgtgaattacttgatccccccttacggaaaacatgcaagagtcaccaatgtgcaagagattggatcggtttctttattcaaatgagtgagagcttttcttccctcaaagccttcaagaagttcgtcctagatggacatccgatcattggccgattgttttggatgccaatccttttaagtggggcccaacaccttttaggttgagaatatgtggctgtaacatccaagtttcaaagagtgctttagtagttggtggagagaatttgaaggcaatggttgggaaggtcataggttcatgaggaagttacaatttgttaaggcaaaattgaaaaattggaataagaatacttttggaatgctaaaaggaaaggaaaaaaagcatcttggatgaaatatctaacattgatgcctttgagcaagaaggggttctttcttctgatctttctgctcaaacagttttaagaaaaggggagctagaggaattaatattgagggaagaaattcattggagacaaaaagttaaggtgaaatgggttaaagacaaggattgcaattcaaatttttttcataaagtggttaatggcagacgaaacaggaatttcatcaagtttttggagaatgaaagaggcttggtgttggataattccgagagcatcatagaggagatcttactatattttaaaaagctctactcgagtcctcctggagagtcttggagagtcgaaggcatagattggtccccaatcttagaaaagagtgcgtctaggctggattcccctttctccgaagaagaaatctttaatgccatttttcagttagatgggggtaaggcgccggggcctgatggttttaccatagcagtgtttcaggattgttgggatgtgatcaaggaagacttagtgagggtgtttgcagagtttcacagtagcaggattattaatcgaagcacctatgcctccttcatagttcttttacccaaaaaaagttgagacctattagcttgatcacttgcctatataaagtaatagccaaagttctatcagggcgattaaaaggagtactacatgaaattatccactctattcaaggtgcttttgttcaagggagacaaattttggatgcagttcttatagccaatgagatagtggataagaaaaggcgatcagaggaggaaggagttgtcttcaaaattgactttgaaaaggcttatgaccatgtgaattgggattttttggatcatatgttggagatgaaggggttcagtcctaaatggaagaattggatgagaggttgtctatcttcggtctcttatgctattctagtgaatggaaatgctaaagggtgggtcgaggcatatagaggattaaggcaaggtgaccctttatctccttttctgttcactatcgtcgcaaatgtgttgagtagaataatgttgagagctaaggaaagaagtttgttagagggtttcagggtaggtaggaatagaactagggtgtcccatctgcaatttgcagatgacactatcttcttttctaactcttgcgcggaagaactgcaaactcgtaagagtttattgttagtgtttgggcaaatttctgggcttaaggtcaatcgtgacaagagtaatctttttggcatcaaccttgatcaaaatcatctctctaggctagccttgttgctcgattgcaaggcttttgattggcctatactctacatgggtctttatttaggagggaacccaattgcttgcggattttgggatccagtgattgaaagaatctcaaggagattagatgggtggctaaaggcttacttatctctcggaggtaggataactcttatccactcttgcctttcccacattcctagttactttctctctctatttaagattcccgcttcagtggctgcaaaaattgagagattgcaaagggatttcctttggttaggggttggggaaggtaaaagagatcatcttgttagttgggatgtagtgtgtaagctgggggtaaaagggggtttggggtttgggaagatttctttgaggaatctcgctcttttagggaagtggttgtggaggtatcctagggagagtacaactttgtggcatcaagtcattctaagcatttatgggacacatacaaatggttgggatgccaacactttagtgagatggtcacatcgttgtccttggaaggctattgtacaagtcttttaggatttttccaaatatactcggtttgtggtaggagatggggaaagaattcgcttttaggaagatttgtggtggggggaaccaacctttgaaatcccaatatccaagactatttagagtagtcacggataaaaatagtcttatttcttcaattctcggttctgctcgccctttctcttggaactttaatttccgtcataatctttctgattctgagatagaagatctagaatgcctcatgcgatctcttgattgtatgcatttatccacctcggcttcagatgcgagatcttggtctttatcttcttcaggattgtttacagtcaagtctttctttatagccttgtcccaagtgcccgatttatctccttgttttcctactaagtttgtatggaattctcaagtcaatccctttcaaagtcaagtcctttgtctggttagtggcacacaagaaggtaaacattaatgacttgttgcaattgagaagaccctacaaagctcttagtcctaacatttctaagttgtgtatgaagtaaggagaatcaacagatcatcttttccaaaattattccttgtccatggggttgtggcacaaattatttcagctagccaagatggattgggttcctccgagaagcatttcagacatgatgtctatcaattataaaggttttgacacttccaaaagagggatagttttgtggcaaaatgcgtgcattgctttaatttgggatgtgtggtgggaaagaaatgctaggatatttgaggacaaagctaggaattcaaagaatttatgggattccattcacttcctagcttctctttgggcttattgttccgtggttttgaagggcattccccttaacgtgttacaaatagattgactagcagtatgtagttccaatgggatggtctagccaagagagcttgttcgtagttttcattgtgtagtttcttgttcttttattgtgttgtttagttttatctttggtgggaggattcctcatccttcttttgtacttctttttctttcaatgtatatatttgttgtttcctatcaaaaaaaaaaaaaaaaaaaaactctaaagtcatcgaacaatgtaaaaaaatgtgccaaaactccaatcatcaaacaatgtataaaaggtgatctatggattctctattgcccatacacaaagtgcaatgatctagactaaaggctttgaaagttcttcccatttgaagcaagttattagtattaaccctcttgttggccagtaaccaagcaaatgccttgacctttgatggagcttttaattttcatatgaattttgttagagagaagaaaattggtgtggattgattagatagggctaagaagaaagatctgattgaaaataagtcaagaggacgataatagccaaattctcacatatggggaagacgatgaaagatttatacaattgagaatagacataagacattcaaaatcctctatccctgaattggtgtggttacatcagattttttctaaatttgttaggctcttttgtttgcctatgccaaaaaaagcacaaaacaagtagttttagtttattatatgcatgtatgatcattctttatttaatcaatgctattttgtcaaacattaatttctgatgtttgttttgttttgactgtgtggagggttagaatttatatcatgatttttttttccaataagtgtttatttatttatttatttttttaagcagtgcctcaatgtatcttggaaagctttcaacttttcccaaatccaatgttgcttgcttttagttgttgacaaaaccgaggaaaagaaatagaaatttgatgttttgattttattttttggttaggtttcttaaaacaaaagcgtaactcatactcacttgcatggttatttttaaagggtcctgtctagttcctacaatgtttcagtgtttggctggtaactaatgttagattttctggcaattgtcatgagcaaaatttgttaaaattatattgatataaatgttttgtcatcaaaatgatacccaacagtaaagatgaagaattgagcttatagacattcacattttctttattagaaactgaaatttattgcattgtaatcaaaagtacaagaaggatgagcctctttgttgcattgtaatcaaaagtacaatgatattcaacagtgaagtaaactgaaattttattgccttgtcctcaaaagtggatggtgggaaagacaaactctttagaaagggtgttgaattattttcagcttcttatatcagaattgggggattggagatcaagcatagatggtttgtccttcaagtctttgagtaaataaaacttaggtgggttggggtgtaaccttggggcctagatgaattttctttggctttttagtagcactatttaggacatcattatggatgagaattttggtctttttaaggattctttttgggcttccttttttttttttatttgctaaggaggtgtttatgaggagttaaatgttgcatttctagtcttggttctaagaggaggagggttgaaaggcttcaggaatttcaatctcattacccttgacttttttttgataggtaatgataaaaatatatattaatagtgccttagaaatggcacaccaaagtatacatgatgatgtactatgtgtcaaaaggctagcctaggaaagagaaaacaaaaaacatgctcactctccttggagctcaatcaattgataaaacctatcatggatattgaatggtcatctatgtacgttttaacccattcaaaaaactatacatgaaagaagatttcattgcttgacttggctatttggcatcatcaaacgggttcctatttctttcattccgttaggtctaaaacaagtactagggagcttgttgtaggataaccctaggatggtttcctacaatcaaataggtgggctagggttttatttttttattttttagggtttatggagaggaacaagggataaagtttatgccaacagaataaaatgaaataaaatagagagaaagaagataagaagaaaaaaagatagaaacctgagagtttcactaaggtcctctaggataagaaatccaaagtctactaggattctagtaactcattaatgactctaattctaattgtcctataacctaattagctaatcttaatttggctccaacaaatactaatcctaatttaatttcaactaatattaattctacataaagtttatttatgcctttccttttcttccttgaatatactttaaaaagctttccctcatcaattccccctggcttgaaagaacttggtttcgatgagttacatgcttgatgcaattcatagagattcaggttaagcttttgaaaatttgttattgtaacccatgtattttcagagcatggtttgccttgtcatttcacaaaaattttttggtatcaatcttattgagtagacacaagttgaccttcaagaacatacttgatcacaagacatgggctaggattaagtggcaattgaagatcttattcttcgcttacctcactttgatgaccatggtagacaaacacattttttttttcttttttggtgataaaaaaaacaaacagatgtattaattaagaatgaacaaaaacatgagaaggataaaaaatccttcccatgatatacaaacctgatcaataagacctaaagaaacctccactatacaaggagggctatgcaaaaggaacaaaaaggtctatacaagtataacatctcctgaaactcatataggacctaaccctgtaggcccaaccctagggtgtacatattgaaagccaactaagttgaattacactcaaaggatatggtttaaaaatgtttgtacagtaaatctaaaaagaaatatagaaatgaagcaaatcctagaggaagctcaaaaacatagaaaatgagtactttttgtagaaacgatagagaaagctctctttttccaggatttaaggattcttaacattgagggagggaatacagtctagttgagaaggtggtcgccaaaggaaaattcagaagttgaggggaagttcagaggaggttggattgaaatacggggattgccattttatctctggtctgaggttcatctgaagaaaatagtggagcagtgggggacggtgactgaaattgattggcgaacgttgaaattgtttgatcttagcaaggcgagggtaagaattgcaatgaaggataggtcagttctccttgctttgatcgaggtgacagatagggattgggtgtttagaatttctgtcgcagtggttggagttgaagatgttaggagaggcagtgtaatgggagtcgactcgggagatttttgcatctcactcggggacaggtggtggaaggcaggcggagagagatagatcaacggctggatgaagttttcgtgttggggaagctggcagaaagaagaagggaggagaaaagatcatggctgaagcttttccagtggggacacgtggaaagagaggtcaggaggtggggaacaactggttcctacctccctcattgcccagtttgaattcaaaaaaactgaacattgggccagttgggacaaagaagttgggtgtggctagggccgatggggacgaggctttctcagatgaggatggtcgggcctttgagaaaaaggcccattctcttcccaatcctagtccactaactgttgcaaaagtgggctgtaacttaaaaggccagtcatggttgggccaaagaatacgaggaaagaagcccccggataagatgggtttgttacgaagcgaagaagtttttgcagtgggaaagctgtatcagtagatcttgatgttcagacgagaggctccgcgaagaaggaagtgaattttggttcatagaagctgtggactaccctttttcctccaagttttgatcgccgacaaggacttcgaagtcgcagcgagccttttttgcacaagaagccatcgtcagatagcgaagagcttccaaaggaataggttttcggggcagaatatcagttggaacgaggattcagtgcgagtcctcccattttttgtcgatcgtcaaggattcgaaaacggtgttcaggggaagggactttgtcgtcaagaggcgaagtggctttgcgcaaaccctattttgaagaagacaaagaaggatttttgggccgagtggggtccgatcttcgtggttcatcagtcacagttttgccttctaatctataaatcaggggtaaagggcttagctttaaggggaattgtggaatgttgggagcagaaaacatggaggtaaattcgtcttcaccttctcaatcacctttgtcttcttttccccgttcttgtggtttggcacttccatttttgagcccttttgttccagatcttcctagttcagtcattcagtcttagtttcctatggaaaatcgagtaatctttgaaattttttccaaaaaagacgatgatggtactttatgtcaaaaatttgttggcaatcctatccttgatgtggtggagtcccagtttgcttattcaaaccagttgctcgagagttttaaccccattaagtctaatttgcctaatgaggtttccagcctggttatagttagccagggtgatgccgtggtctctccattgggagagttacaattagaaggcctatcccccaggaaaatggctaaagtgcgtgaggttttaagctctttggatatcaaggtatattctaggaggaaaagtagatgctccacaggtatgtgagacctgttggaactggtttggaggtttagggtctatgatgtttttccatgaaaataattagttggaataccaggggtttgggatcaaggaaaaagcgaagggtggttaaagattttctgaggttagagaatctggatgttgtgatgatccaggaaacaaaaaaggtggagtgtgacagaaggtttgtgggtggtgtttggatggtcagaaatgaggaatgggctgttcttctagcgtgcggggcttcagatgggactatttgggactctaaaaaattgcgtagtgaggaggtggtaataggatccttttcggtctcagtcaagtttgctttggatggatgcagacctctatggctgtctgcagtttatggcccaaacagtcccttacttaggaaggatttttaggtggagattttagacctttttggcctatcttttccattatggtgtgtgggcggtgattttaatgtcataaggagaagttcagaaaaattgggaggttctagtttaactttaagcatgaaggactttgatggtttaataagagaatatgaattgcttgatccacctttatggaacgcaccattcacttagtcaaacatgcaagagtctcccgtgtgtaagagattggattgatttctttactcaaacgagtgagagcatttctttcctcaaagccttcaagaagttcttccaagaaggacatcggatcattggccgatagttttggatatcaacccgttcaagtggggcccaacaccttttaggtttgagaatatgtggttgcaacgtcctagtttcaaggaatgctttagaagttggtggagaggttttcaaggaaatgggtgggaaggtcagaagttcatgaggaaattacaatttgttaaggccaaattgaaagagtggaataaggtttcttttggagagctaaatgaaaggaaaaaaagcatcctgaatgaaatagctaactttgatgccattgagcaagtagggggtctcacttctgaacttttagttcaaagagctttaagaaaatgggagttagagaaattaattttgagggaagaaattcattggagacaaaaagctagggtgaaatgggttaaggaaggggattgtaactcaaagttttttcataaagtggctaatggcaggcgaaataggaaatttatcaaggtgttggagaatgaaagaggcttagtgttgaataattccgaaagcatcatagaggagattttactttactttgaaaagctctacgcgagtcctattggagagtcttggagagctgaaggcttagattggtcccctatatctgaagagagtgtgtctaggttggactccccttttactgaagaagagatttctaaggccatttttcagttggatagggataaggcgccggggcttgatgactttaacattgcagtgtttcaagattgttgggatgtgatcaagaaggatttagtaagagtgtttgcagagtttcacagaagcgggattatcaatcaaagcattaatgcctccttcatagttttgttgcctaaaaaaagcatgacaaagaaaatctcagactttagacttattagcttgatcactagtctttacaagataatagccaaagtgctatcagggagtctaagaggggtactacatgaaactatccattctactcaaggcgcttttgctcaagagagacaaatattggatgcagttctcatagccaatgagatagtggatgagaaaagacgattagggggggaaggaatcgtcttcaaaattgactttgaaaaggcttacgaccatgtgagttgggattttttggatcatgtattgaagaagaaggggtttagtcctagatgaaggaaatggatgagaagtttgtccacagtttcttatgcagtcttagtgaatggaaacgctaaagggtgggtcaaggcatctagaggcttaagacaaggcgactctttatctccctttttgtttactttagtcgcaaatgtactgagcaggatgttattgagagcagatgaaagaaatttgttggagggtttcaaggtgggtaggaacagaataagggtgtcccatctgcaatttgcagatgataccattttcttttctaacactagtgaggaagaattgcagactctcaagagtttattgctagtgtttggccatatttctgggtttaaggttaaccttgacaagagtaatatttatggcatcaatcttgaacagaatcatctttctaggttggccgagttgcttgattgcaaggcttctggttgacctatactctacctgggtcttcctttgggagggagtcctaaggcttgtggcttttgggatccagtgattgagaggatctcgagaagattagatgggtgacaaaaggcttatttatcttttggaggtaggataactcttatccaatcttgcctcacccacatgccttgctacttcctttccttgtttaaaatacccgcttcagtggttgcaaaaattgagagattgcaaagggattttttatggtcaggggctggggaaggtaaaagagatcatcttgttagttgggatgtagtgtgtaatccgaaggcaaaacggggattgggatttgtgaagatttctctaaggaatctcactcttttagggaaatggttgtggaggcaccttagagagggttcaactctatgacatcaagttattttaagcatttatgaatcacactctaatggttgggatgccaacactatagtcagatggtcacatcattgtccttggaaggctattgcacaagtctttcaggagctttccaagtttactctgtttgtggtaggagatggagaaaaaattcggttctaggaatacttttggtggggggaccaacctttgggatcccaatatccaagactatttagagtagtcacggataaaaatattcctatttcttcgattctcggttctactcgtcccttttcttggaactttaatttccgccgtaacctttctgattctgagatagaagaattagaaggcctcatgcagtcacttgatgatttgcatttatcaccttcggtttcagagctgagatcctggtctttatcttcttcaaggctttttacagtcaaatctttctttcctgccttatcccaattttctagttctcctccaattttccctactaagttcgtttggaattctcaagtccctttcaaagtcaagtcttttgtctggttagtggcacacaagaaggtaaatattaatgacttgctacaattgtgaagaccctacaaagctcttagtcctgatatttgtaaattgtgcttgaagcatggtgaatcagtcgatcatcttttcctacattgctctttcactatggggttgtggcataaattatttcagttagctaagacggattgggttcccctgatgagcatttccgacatgctgtccatcaattataatggttttggtttatctaagagatgaatagttttgtggcaagctgcgtgcattgctttaatttgggttgtgtggcggaaaagaaatgtgaggatttttaaggataaagtaaggaattcagagaatctttgggggtctattcatttccttgcttctctttgggctttttgttccaaggtttttaaaggggctccccttaatgtgttacaacttgattgactagcggtgtgtaattccaataggttggtctaatctagagagtttgtttgtttttactttttattttcttatttttgtattcttgtagtttagttttttttggtgggaggattcctcatccttctcttgtacttcttttttctatcaataaatccctttgttgtttcctatcaaaaaaaaaaaagaagcaaatcctacatcatctccggagtcatccatgttaaatattggacttaaatgcaattatgaaggaaactttgtcaaataagcattttcgcccaattaaaaatgcgtatttgctagagcttccttcataattgcattttagtccaatatttaatgtaggcttggcccaaattgtttatagttctgggttcctcatttattgtagattttgtggattggataggggcttgttgaggggtgctattttttgttaggccctcattctttttgttggcactatttggcactctttgtatattccctgtgtactttgtggcactcttttaacgttttctttttttctaatatactattcttttacctatcaaaaacaagcatttttgcccaattgttttagcttgatgcttttggtctattttgacctattttcttagcttgaagcttttgatatgtgccctaatgaaatctttctagatgtagatgaaccattaccatatcaccttcttgaaattgaatatattttcggtgtgcatcattgcctccttatagttctcattactgattttgattttttcttataccttttaaaattgacgcatagtaaacaccttttttggttgtgcctcctctagcttcttaattggaaggatttttttttctttggatgaaggatcttcttatgcccattaagtatgagaatatatgtattttcgtagccgtcatgtggaacccttctataaaaaagccaaggttttccaagcaaaatataactcacttttattggtaagacctcacatcatataggcgctttaaagtccttaccaaaaaagaatgtgaccaagcagtaaaaatttatcagaatagaggtatagttcatccatgctacttggaatggatttggatatctctctattttaagattcagcttttcaacaagcttttgcgaagttatgttcaaactgctatctccatcaatgatcatggtacataacctcccttgacaagaaatatgtgtgtggaaaatgctagtatgccgccaatcttcttctctttttacctttgggacaactaataaaggttgtagtacaagactatgaccttctgtcataccatcatagtaatcacattcttcactaagttcatctttattgcgagtctcttcttcctttgggtaactctccaattcaaattttggttcttcaacacaaaagtgtaaacctttgcttgggcacacaacaacataatggccatgcccatcacacttaaagcataaaggagtcatgcctacctttttatttccaatacacattgaaattttacccttattagcatctctatcaggcacattcatggcttgttgattgttaccctcaccaattacatggttagaagtttggaaatttgttgtgcttaaaggtttgtttgctatttggttggagaaagtgctcctaatttgtgaacttggacgtttagaagcctgaaacttgagcccttccattttatggactagtgataaacatcattcacagtataagtgcatgcaactatcatctcaacttgaatctccatttgaagttcaacttaataacaagttgcaagttgagcatcactttcccgcacttgattccgaatactcaactcatgaaattcttttgtatattcttcaacagacttagtactttgtttaagggaaaacaattttttgtacatgaattgtttataattagttaggagaaagtgctccttcatctttaatttcatctcgttccatgtatctataggtggttgtccggtttaataaagtttattcttaatattatgccaccatagatgtgttacccctttcaactttgccttaacaaaatgaacttttctatttttgggcattgcataccaatcaaagtaatcttctatcgacataatccaatctaaaaaagttgttggatttaattttccttaaaattaagcaatttcaaggtgtacctttcttgtcacatcatcatcttgctcaaagagttagccccttctttgattccccatcataaaattgccttgctcttgacgtggtttactaggcgattgtctgaattggtgacttgtagtctcatcttcaattggtggtttttcttaactcttttctaataacttcatgatctcttcaagtttgttatttagttgtcttatagcatcttgatgagattgttgtgtggcaaaaatttcctttaagcttgttgtagcatcattttgattattagaagcattttttgaacttatgcttgcataagttgctccactcctcaactgcatatgccttcaagttaagaacttttactctgataccaaaattgatataggacaaccgtaggatggttgcctacaatcaaataggtgggttagggtttaattttttttttagggtttaaggagagaaaaaagggataaaggttatgacaacaaaataaaaatgaaataaaatagagagaaagaagataagaagaagaagagataggaatcttatcactaaggctttcttagagtctcacctagaagaaaaacaatggagtcttataattgaaatttgcaaaatatgtaaaataacagaatattattaatcattaatcaattacttaatttacatcgactaaccttatgtataggcttctctaagaaatccaaagtttattaggattctaattacccattatgaatctaattctaattgttttataatctaattagctaatcctaatttgactccaacaaatactaatcctactttaattccaattaatattaatccgaatttaatttcaactaatattagtattacttaacgtttatttatgcctttccttttctttcttgaatatactttaaaaggctttttcccattagagctaacctgtaagtgttcttcggttttttcctcacaaatgaaccatgccaacttaggaggtttcctttaactatagagtgcatcacctaaactacaccaagtgaagaacaaaccaattgccttaaaattcttgctttggagcaatggaggagtaaatggttagctgattctttttcactgttacacatgtaacatctatttgacataaatccatcttcttcttttgatttgatcaagcgtcagaatctttccccagatggcttcccattcaaagaaacttacatttgttggtaatcaaggattccaaactatgttttcagggaaaggctctctttctacattgactaaggaagcatagagagattggatagagaatttgccacacttggttttcttctaactcatcctatcctcctcgttgcttccaattgaaattgtatgcatattctgaaaaaggtctccccttccttgagttcccaatcacggaacttctttgaaaagtggggactccattagccccctctctaacttgctcccatgccattgctacccaatcattttttggcaatgtctatgtggaataacattaagcaatactcttacaaggacatgtttgccatgccatctatttttctaaaattttaccctcgtgtcattcccaactatgaagtaagacttacttttaaagggctcccatctgtttctaattgccttctacacccccactccatagccatcctacacatcccttgaacaccatccccttcctcttccccaaactttcctattatgacttgttcccacggggattctttcttagttgcaagtctctagctccattttccaaccagagccttgtttaaagtggataaatttccaataccaaggccctcctgcattttgtccaagcaagcaatggaccaattaactagataaggccttttctcaagcacactccatcgccctattggaagtctctttggatatgctttagtcttaagcttttcagtgctacctgaatatttaatgttggccattctctttctgcaaaactgtgacaacttattttctttctgccattggctgctaaattggtaaagttagaattgtataaacatataatgcattcttaatgactcaacaggagaatgaaaatatatttttcattaatcaggaaagatttaagtatatatatggggctactggacaatatgcatcatgtgtgtttatatatgtatataaaattatcaagcttgtgtgatataggagactatatgaaatatgatatgcatagtttacaattataatcaaggatacttcattgcgtattaatgcaggcacttgcctctctctttctctttgccctccaccccccgcctccctcttaacaccacaccccctcccccaggtgtgaatatctcatgagactgataatatttgcaaattgagtaatgttagtgcttgtttattgtgcagctgt

SEQ ID NO: 11789 - DNA, 2893 bp, Vitis vinifera
  Intron number 2 from transcript GSVIVT01030584001 (locus G SVIVG01030584001) derived from phytozome v7.0 (chr-ID chr1 2; pos 6903275 to 6906167 reverse strand)
attaaggacgagataagagataggaccccaaaaaggtactttagttgcctggtactttagttatttttctttagtaattattgatgggatcttgctttaacagtgatgttttcattatcatttgttgtaattctctgttttcctagcagtcattttattgctgagaataaaaggaaaggaaaatcattcctcttctggacaatcaatcgtctcagaacaagctaaaatttgaattaagtactgatttattcacctttttctcagcctgcttcatttatactttctaattaaattacataattggaaatatattgtgagaaataaattttctgctatctagaaattatcagaagggttaatcactttcttcaattctggaccctgctgggtggcgaagattggtatcctaggagttttattggagggcatattccatttagattgaacatagaaactgtgaagtaattggcagaccaatcaaagtacaacttctctggaaaaccaaagaataactcaaatgtagggataaggtctgagtagggtttcaaagaataactcattgtaaaaggttcattatagatactgatagttgcatgtggcttgtggcatttgtcccagaaaagtgaagctcaataactgagtaaatcttgatttatgttgggagtcccaaagtgaaaaaaaaaaaaaaaaacaaaaaaaaagtgattaggcgtcaaaattctgttggtccacaactttgattcccttacttatatgtaggcaaaaagaaaaacactaatatggacttaacggaaaaaattaactgaaacagtgattatttaaactaattaactaatctgtatgatatttaaagaacatgtactacatattagtgtggcacttattgatcaatggtcctaaaacaccttattccttcaatcactaggccattttttgctgagcacaagtactgaattgcatgttcctttttttttttttttcctgatttttgaatcaaatggaagaatgatgttgatgaagctgggttgttgaagaaaaatcccaaaccatcaaagctctatgtatgggtggcattcacaactagtggaccttggttctcttcaagataagcagcacaaagttggagcagttgacttccttctgtcccactcagtatggacttacagcaaccacatgattaccctttttagactctcatcccatttggacacttacacaattccattaggtctctcataattgccaaaacaccatgacttttttggctctactgatctgggataccttgagcatttaaaaattcaatgatttgatttccacagcaatgatctctggatgatttaatccaagtaaaaacatgttttgcagatgaaaatagcaaaatttatgatggtgtgatgaatctgagttagaaatcacaagtttcactaggggtttcttattttcaaaaatttagattttgaaatgtaattacttttgtttgttctgtgagaaaattgtaatgaaccaatgatggggatggcaaaattggtcacttttcaaagtaggggctttcagatgaaccgcccctgcgcatgcaagaaagtaagtaggattatttacaaagtatatgatctcactggcctttggaagattagtttttttttttcaaatgctagtgctcacttttttttaggcaccacacaatgtaagggagacacatttagcaagatcccctgatggcataatttctagaattggcaactgtgttgctcaggaggattaaagactccatacatttccatctcctcactaagtcatcacaaccatcaaacaccttaacagtgaaaaaacatgtgagaaaatcattcacatgagcacctggatatcattctttcgcccttgtggtatatattggagtgctgtcaaattgtcaatcacaccaattcacccttatgtgagaaatggaagatgtccagttattcccactataattttcaaggaatcctgatttcacttatatggctgcaacttgtggaccagaaaagatgcacccatggaacccattaaacaatagaagctgaaatcatactgttaaccaatttttttgcagttgatgatgtgctcaaagaccgtccattggggtgcaaatttttttgttaaaaacatgatgttctatatgcgatatcatgcttagaatctgaaaaacttatcttacatccatttgattgatgttctgtgtaatatgattaactcaatatatttccagaggagtcgctccttgttttgttaatacctacgattacttacttgaaacacatggcagagaaaaagaaaagtagaaggatttaccttccttgagacttcaaacatcccttaaggaattaagaacataaagtttttccccacttctttttcgtcttatgcctgctttctcttttcactttttaatgattttcttcacaaggagttgtttgtggtccaagaatttgtttatacctacctacaaagaggcctgctcttctattttctggtcattttctattttcttttgttgtgagatgaaacttaattgaagctattaatctaagggctcccctgtttgtactgaatattgaagatttcttcttgttgctagaatcttcaatctgcagttagtagattcataattgaaagctatgcattgattgaagaactctatatatattcatgtgtgaatattatacctgtgatcatttctactggcatgaaattataggtataaatatgggagcaataacagatggctcatcatctaaacgtaaggcactcatcatcaatccatgcacatacctggcagagaaaaaaccagacttttttttccttttttttctttttctaacttacattttcctacatcaggattgcatagcgc

SEQ ID NO: 11790 - DNA, 7191 bp, Vitis vinifera
  Intron number 1 from transcript GSVIVT01032990001 (locus G SVIVG01032990001) derived from phytozome v7.0 (chr-ID chr1 4; pos 24919943 to 24927133)
cgaatcttcagtcgcttcatccgaagacgtttcaggtggtcttagttgaaaattttcacttgatctttgttttctatggtgataggaaccctagaattttgacattaattcttagtagttacaattctgccattgtagttacttgctgcaatggcgggtttttttttaggaatctcgtacctgccgattgatttctacagaagtggataaaaaagaaagaaaagtagtcatttcctattatattgcccgttgtttttttccaaaaaattgagaaacttgatttggatttgctaatagttgtattaggctgaattaatcgagctttgttctctcaaattcccagttaacgaagaattgaaacttttgatttcttttttttacagttctctaaacagaaaaatgtagcatcagtttcttgctaaatttccttgattttagcttctgtaattggtttcaaaatatatatagtttctttttatatgcaatcatgtttctttattcgttttaggtaagaatcatttggttcaataggattttattgtttgtaaggttggtgcagttaacactcactaggatggggagagccaggtatcattaactggacttatttctgactctatttaggacgttgttaagtggggggagaatcgaatcagaatggaagagaacggattcagactgtgattgtgaacatttttaagaacaggagaaggctcttaccttgcattcaatgtattcagaggaagactgctttctgtttcagagcaacctccaggggagctcattgatcacgataaaaatgcactttggaaggatgggcattggagttctttggtgaagtgctcgttttcttgggacaggaaaaaaaaaaagaataagaaaagaaaaagaaaaattatccaagaagaaaattgatgccctgaatgtgtcagaaattgttattctttttggtaacatataaagcagctaaaagccaaggagtatttcaaggagctgttgtgtgcctcctcaaatggttctatgtttactaaaaatgcttgtggatggttagttctcttctctgctgtgttgaataagacagttctcttctcagctgagttgaataagacactagaggtagtccttgttttgcctgattttccatacttcaaagtacttgaaatagagaagtacaagaaagaaccctaaaacccaaggatccaagaatgaaaaaagagcccaacaaggaaagtccaaaagaagatacattttgtggaggcatgaaattcccaacaaactcctctagcacagaggcaccttgcttagcaaactaattttctgcttggatgactgatctatgtgccaaagagaaggaatgatccaccacttagacttaatattatcaggatctacacatccaatctccagggactggttttctcctaagaaacccaagagggataagtaatccttcaaagatgcacaaaagaaggtagtaagcacccaagaaacagaaccatcaaaactagcccctcctcataaaaacactcttatatataggagaacatcattggacacgtaaggggggagaaaatctccaacaaagaagaccaaatgcatttgctccttgtttaactaacaaatttgagaaattaaaagcctttaaaaggtgtagaacaatcagatcaagctatctaatattcctttatgtgcatttgttgattgtactagcgtgtatgaagaagatcattttatgtctatgataggctttgcaaattggttgagttcgaagtaaagagagagagagttttttttttttttttttttctttcttcctttttgttgacttgtttgtgctaaatgtatagattgtgtatatctttttgcgcttttttcagctgctttatttataaatacttattcttgtttgcctttttttttttttaaaaaaaggaaaaaccctcaaaaactctttcctgtgctctctctagatttgggctagaaaatttttagtttatacctatatgtctattgaaattttttttgatgggttggactcttttgatgtgagaaaggtgttcttttgttaatctcttcatctcattgcatttttggcacctctacatactgcacatgtactttagtgccccctttttttattacgcaatgttaataatattctttcttgcctataaaaaaataataattcctccttgcttgaagaactagttaggttgcatggatggagctttatttaagggagaaaccaatgactattattgtgtgagaggctagccatgctaatgagggccatatttccaaaaatggataatgggaggattaatttgaaattactcttgacactcaactaagtggtagggaggttttgggttaaagtgtccaccaatagcgttaaaagtataactaaaataaaaaagagaaggagatgcttgtgaggttggactaaagtggcaagggatgggatagggatgtggagagtttcaagtttcgttctcccaaataggggaagaagaaaatgttacctatcaagaggaagagttaattgggagtttcccttgaggcttgtctcaagtggcagggaggtctcaggtttggtttagcataatagcaaaaaataaaaataaaaagaagaggatgaccctcagttctggttgaaatggcaaaggagggtcagggttgaggggaaaagagaaggagatgggagtttggttgaagtgatgagattgggtgaagattttagaattccaagtttgattcccctgaaaagaaaaattatatttatccaaagtaattcctaagaaaatcaaatgttacaattaaaataaaatttaacaggaatttcaaattcccagctaacctaatgttagaatggaaatctcatacccattacaatttttggaatttattttcgaaaatatgaatccattccaattttagacgttgatgaaccaagcaccttaagaggtcttgaattttttcaacatttggttttttcaccccttatttttctattgcccaaaattgcaaatatattgaagaattttaaaactctttgacttagattgggcagttagttaccatccttctttctattgctctatattgaaaagctctggcaagttatcattaaaaaatttccaaattaaaaaaaaaattcctaggtgggtcctcttcttccaatgtgtttttgcccatttttgatcttatatgcaaatgtctctacaagtcaaattactgttatttggaaaaaatttaatggattttttgcctcaaggaaaaagttggccgtgggatgtgtctgacatgcccattggttagatatatgtccaataggagtatccagtaaaagaaaaaaataaataaagcataaaagtatcttgtttcactttaagttaccttgtactcatgttagatatgttatcttttggtatatttttcaatgtggcataagatatataaccccctcaagtaaaagactccatgaccagttgaccaaaatgaggatcccaaattgcatgaccaaaaaggacattatttagccatgtgattgtcctaggatttgggtttgacaaatttgacatgtagacacatgccaatacccagcacttgcccttgtgctcgcttataggttcgtacaaatgtgccttgtagtagtgaacctgaaaaaattcgttgtcgtgcaatcataattgtgtccacggagaaattctcaagttcatttattgaaaggtccaaattcaactgtttaatttaaaagttatgttgctgaatttggcaggcaggcattacacatggatcagtagtggagctatatgggttccttatattaggcctcctttggctgataggaataagagattgaaaatgcatatttcattccgattccgagtttcagagaatgggagtaactttttcaaagtccagtcccatgtttagatgcactaggaaccaaaaaatgggaatgacttgcaatttccatttgagagtagtaggaatgactttagaaaagacctttttagtagcacctttcttcagcatttattccacttctttggcaatcaaataaaatatctttattttgttattaaccaaataacacaatatgtgtgcaataatcatttttttcttccattccttcattcttttttggaaattaaacaattttttgttttttattattcaggatcatataagacatgacataaaaaaagttttttttttttttctttttcttgttgctcaacaaccaaatagaaaatctttatttttcgtcatgcaaatctatgcatgtgaaatgggaaacggaaaaatcaaaatttttcttcttttttctcatttgtctcaacaatttaaatagaaagtatccatcttttcaactaaaataatagatgaaattaaaaaaagaattaagagttcattttgttttccttcatttcttagaactcaaacaaaagtctcctatttctcattcattcatataatataaaaaccaaaaaagtaatataaatcaaaattttgttttttgttttcatttggatgggaattggaataattggagagtatagaaggatgactaattgaagagttgatgtctaatgggaatgaaaatttattcccattctaggctattgcatcaaccaaatgttggaatgactcactagtggaatgatatttccatttcgccattccatcccaactaaacaaatgcactcttaatgttccagctgaaccaaagttcctaacactaaattttgctcaatttcaaaccatgaacttttccagattgtatatgggtctgctaatattgataccaatgcttttaggaagggtatcttcttagtgaagtcctattacaagcttttatgcctagaaagtgcttgcattttctaggcagagagatttgggcctctaaggtgtcatctaaggatagtttccttgcatgggagatggcttggggtcatagttgttaaaggcaagcttgaagtgtgcctagctagggttaaggtgcaatcactccctagttatagcatctgcttgccaaaacatgcttcttgttggagaggcacatctcatctgctttacttttccttttaaaacacttctattcttaaaatttcaattgcacattgagattcatataatttcattacttttttgttgaatggttctttttaatgtttggaattttaatttttttgttacttgcattggattttggttcatattttataaaattgataggcatcctatgtcgtgtttcgctttgcttaggtgtgcgtcttgtgttgcaccttgctcttaatcctaaggagacttttgtgccttgggtgcaccttgcttcttttaaacctatgcttggggtaagattctcacgatggatcttcaaatgagaagaggctggatttcaatgaaaagtattgtctttgcaaacattgtattcattatgaaatcccttagggggctaaaccttcccttatggatttcatggaggatttgtaccatgtatgtattgtgcagggttttttttcctcttgttttgtttttgttttgttttgtttttttgcatgtttgcattttgtatgctcttgatgtactaggattgtgccccctttgttgataattgacccttaatctgtattttttgcttgcctattaaaaaaaaaaatcttgttcattgttagctatcatccaatttttgagttatggtaattttcttatttgggcttgcctggatccttctgaggaatactagtgatatccttcctgggtggtattgtagttttttttgggttaaaatcaaaagatgggttggagatgacctgtttatccttcttgttggagatgacccatttatcctttatgctggattaaatggaaaatgaggaataggagaattgtgaaggttcatgtagcactctattagcagtggaagacctcttgttggagatgacccatttatccttcctaggtggtatggtagttttttttgggttaatcaaaagatggtttggagatgacctgtttatccttcttgttggagatgacccgtttatcctttatgttggattaaatggaaaatgaggaataggagaattgtgaaggtttatgtagcactctattagcagtggaagacctcttcctgagaatttgctcccatggctgagctgttataggggttgtgaggtttgtatgctgagtagtctttggtggtttttgattcgctatcttctttcttcgccttggtgcaccttgaatacttcctctgtgctagggttgcaccccttttgaggagcatgctaattcatgttttttgtttgccaacaaaagaacatttgtaatagctcaacagcatatttgagtggtagtaaaatttccctgttttaccatcacccaaatattttattatttctgataattgaaaggaaaaaaaagggtggtagtgaaacaaggaaatagttaagattaaagtggctttcagctaacttattgcagacatgtcaatattctgaagggaatttaaagactatcccggcattcactgaatccggataaatagtgaatggttgaagcttaagagagactggtgcttgaaacatgataatacattcatgcaggcatttaggggccgacaaggatgaacatcgaagatgggtgcagtgttataggggaaacaaggaaaataagtagctttattgctgaggtatggagtgtcagggagggtcttttgttggccaaacagctgggattaggaagctgatagctgaatctgactcaaagtaggcaactatggcaattgaagaagtgtattcagaagtgccaaatgacttaattttcagtccatgtggagagttgtcgaggagtatcttggaatgttggtgcagtacacctttgggagggcaaccatcctcctgggaggagatgaggaacctcctgtttgatgactcgagtacttcactgagttgcctggatgagggtgtagctctagcttatttcaagcttgtaatattaaacatagctaggagatgtttttacttttatcatttggttgagtctatgtcagtgttaacagcttcttggtgattgatttcttgtcttatgtgttgccattatcatgagaattaaaaaatattcatttatgcttaattgtttttgataggttctttggctccagctgcagcagattctggtgga

SEQ ID NO: 11791 - DNA, 2899 bp, Vitis vinifera
  Intron number 3 from transcript GSVIVT01020240001 (locus G SVIVG01020240001) derived from phytozome v7.0 (chr-ID chr1 ; pos 8672008 to 8674906)
gcttgattaagtactggtaagaaacctattttttcattcattgtgaatgatttacatacaagtgctaattggtgatgaattagttcctatcacattgttatgcggattatagctttcatatatattgattaccagttcattgttattgatatgctgcatgtatatggaaatggttcctctttgtatatttcatatatttctatttatctttaaggtaagaagatgtattttatattaaatttattttgcgtatatctgtattttctactctagatttgacacaaatttgatcaagaaaagagttgtacctttgtatcatttgctggttcgctatttcttgcttacattatcttcaaggttatgaaggagttacaacttacaagatgggggcaaaccatcatgtgatacctattgaatagatgaagtacatgctttgaagaaagtgaatcgttgtatgataccctttgaattgatgacttatgtgctttgaagagattaaggatggaatataaagtaaactaaattccctgatgtgatgaaaccatccaaatataacttttatgaattattgctggatggatttgtcattagtttgcacatctagagagatctatgtaggctatgacagtggctataaaactcatataagatatgaaaagcaaaattattttataaaggtaagagaatacaaataatagagtatagattgttgggttccaagagaattataacagcatggacaagaagataaatcaatgatctctatgaaaaatggctaagcttctctagtggcagtatatcccaaatggcacagtatagtagtcattcttaacaattagccttgagaaaccccagtggttctttaacaatcattcaattggttactgcttaccaccccgcttgggggtcacccttcactagacaacctaggaaagacaacaccacgatgtagacttttttacttgctttagaagtgggaggtatgttctaatgtgatagaagacacaacagcatgaaaggaagaatctggactacctggcagaaattatgcttttctgtttgttgtttgtgttgggcgtccattatgccattccattgcccctctcacctctgtttttttgtcttttattactcaaacctaccctatgtctcatatctaaaggtgacaccatccttataaaaaaatacaaaaagatgacagtatccttgattatcttttgaaaaattcgcattttataagttcttattttgtgtagcatattttctcctttctctctctgaattcacacaattgtactattactttttttcttttggtagaccttgaacaactctgcaatcaatgtagtatttagaagtacttaagaaatgattttgacaccttgttcctcgacaaaattcatttaccttatattcttcttattctctatgcatcgaagtgccccaggggagaggtttggttttgggggaagtgttattatacttgatttgatgagcattttgagtggcagttccagagttgccagatttgatggtctagaactagcagattggcaaaaatccaaaccagatacctgttataaagggcaggatctggactctggacatagcagcctgaatagaccatgaggcctgaattcagcaattattaagggcagctataattgcaaggaataacatggtcaagggaacttgggattgttttctttgctgctcatgatcagcagtggctaagagaacatcatgttatgaggataatgctgagctataagtataagagcttcacaaacttattggcttaatttgaattgcaaattttaatttcagcctgctctgtggattggatgtgaccaaacttgaacattccccatcaacttggacttaaaaaatttacttttgtgacaagctgaatcatacacacttttatggatctagattagtgtttgacaaaagcctgaaataataagcttgctcctcattactcttcttaatctgcaatgtattggattaaaaaaggactgatgattcaatcacaaactcagatatcctcaggaggagataatcatcctattatgccatctgtagggacaagatacacctgttagtcatgaaaaagagaactatcatctggcattccagctgccttctgcctcaggtagtttgaaagatagtcctcaaagcatgtttgtagctatgaggaatcagtggaagaacttagcctataggctaaagttttggattaggaatgctaaaaaatttgttaatgacttgaaaatggtgaagataagcagactagagttttgaatagcatgtgatgctatattaattggtgttgctgaacatgaatagaacttttaaacttaaaacttccactggttcatctaaacttcaaaagagttatgcagattttctattttcatattttcaaatattggaaatataaatatggagaaaaatccaaagcctgaatctctcactctattgaactctagctttcatccccaagtaagacatagcaaggttgagttgggtgtattatgttgcatgcttctacatcaatctggaatagtcctcctatatgtttgtcaatctagatttcttcattttctgttattgttcaataaagctattctactgcaaattaatggtgacttgacaataagaagtggatcctttgttagtagactggaattagatcatcctactgcctcaatatttatataaacaaaacagagataatgtttgatgtacatttacttgcacgttaggtagtttatcttcattgttgttcccttttcctagttaaaacagcataatgctgtcatggctattggagtctaatgttttcttatctggccttgcagggactaaacccatttctgctatatactgcaaggtg

SEQ ID NO: 11792 - DNA, 21868 bp, Vitis vinifera
  Intron number 3 from transcript GSVIVT01013092001 (locus G SVIVG01013092001) derived from phytozome v7.0 (chr-ID chr2 ; pos 8381944 to 8403811 reverse strand)
aaaatttcaggtattcctgatcagaatgaaagtatttcttttttccacagtaggaatttatacgagaatcttgtttacattgagtttgtctctataacattgtcaaatggtgcggtcataaaatcctaggcatcaggatggaaacttctactaggattgttttcatttctcaaatttaaccgatggatatgataattacctattataattcattggatggccataatgtatttaaatgtgtgaaaaagatgccaactacactgatggtcagtctcatccaattgcacaccatgttagcctaatgttttctacaatgttccacaccatgcacatgttgtgttatgaacaattgcttatatacaaagtagcaaacattataattggattaatatcaatagtggattatttttcagctattcaatggatgataaatcactatggttgcctcataaatagcttaaaattcttactgtctctatgcttctaaaaggttctccatgctcatggttagccttgattctttctcgctactgtgcttgttttctttttctttcctttcctttttccttcttgtttatgtaaagtttttcttattttaactttaatttttcctgaatttctttaacttcacactacatgattcttttgagaatgcttaagttttgtttttgtttttttttttattggaaacgacaaagagatatattgatagaaaaaagaagtacaaaagaaggatgagaaatcctcccaccaaagaaaactaaactacaagaaagtacacagtaaaacaagcgaactctctagattggaccattccttatggagtacacaccgctaaccaatcaagttgtaacacattaaggggagtccccttaaaaaccttggaatagaaaacccaaagagaagcaaggaaaacaatagagtcccaaagatactctgaattccttactttatcctaaaaaatccttgcgtttctttcccaccacacaacccgaattaaagcgatgctcgcagcttatcacaaaactatccccctcttagatgaaccaaaaccattaaatttgatggacatcatgtcaaagatgctcatcgggggaacccaatccatcttggttaactgaaataatctgtgccacaacccaatcgtcaaggagcaatgtaggaaaaggtgatctgctgattccccatgcttcatgcacagaatacaaatatcaggactgagggttttgtagggtcttctcaattgtagcatgtcattagtatttaccttcttgtgtgccactaaccaaataaaggacttcactttgaaagggacttgagatttccaaacgaacttagaagaaaaaacctgaggagaaccagaaaattgggataaggctagaaagaaagatttgactgaaaaaagccctgaaaaagataaagaccaaaatctagcatttgaaaccgaaggtgatagatgcaaaccatcaagtgagcgcatgaggccttctaagtcttctatctcagaatctgaaaggttacgacggaaattaaagttccaagagaaaggacgagtagaaccgagaactgaagaaataagaatatttttatccaagactactctaaatagtcttggatattgggatcccaaaggttggtccccccaccacaaatcttcccaaaaacgaattatttccccattttcctaccacaaaccgagtaaacaaggaaaactcctgaaagacttgtgcaagagccttccaaggacaacgatgtgaccatctgactaaagtgttagcatcccaaccattagagtgtgaaccataaatgcttaagatgacctgatgccatagagctgaaccctctctagggtacctccacgaccattttcctaaaagagcgagattccttagagaaatattcctaaaacccaatcccacttttgccttcagtttacacactacatcccaactaactaaatgattttttttgccttccccaatccttgaccataaaaaatccctttgcaacctctcgatttttgcagccactgaagcgggtaacttaaataaggaaaggaagtaacggggcatatgggtgaggcaagattggataagagttatccttccatcgaaagataagtaagccttttgccacccatctaatcttcttgagattctctcaatcattggatcccaaaagccacacgccttggggttccctcccaaaggaagacccagatagagtataggccaaccagaagccttgcaatcaagcaactcaaccaatcctgaaagatgattctgatcaagattgatgccataaatattactcttgtcaaggttgaccttgagcccaaaaatatgcccaaacactagcaaaagactcttgagagtctgcagttcttcctccttagtgttagaaaagaaaatggtatcatctgcaaattgcaaatgggacaccctagttctgtttctacctaccctgaaaccctccaacaaatttctttcctctgctctcaatagcatcctgctcagtacatctgcgactaaagtaaacaaaaaatgggataaagggtcaccttgtcttaaacctctagatgccttaacccaccctttagcgtttccattcaccaagacttcataagataccgaggacaaacaaccactcatccatttcctccatctaggattgaaccccttcttctccaacacatgatccaaaaaatcccaactcacgtgatcgtaagccttttcaaagtcaattttgaagacgacaccttccttccctgatcatcttctctcatccactatctcattggctatgagaaccgcatccaaaatttgtctcccttgaacaaaagcgccttgagtagagtggatggtttcatgtagaacccctcttagacgccctgaaagcactttggctattatcttgtagaggctagtgatcaagctaatgggtttaaaatctgagattttctttgtcaaactctttttgggtaacaaaactatgaaggaggcattagtgctttgattggtaattccgctcctatgaaactctgcaaacactttcattaaatcctccttgatcacatccgaacaatcttgaaatactgtaatggtaaagccatcaggccccgacgccttatccctatccaactgaaaaatggccttagaaatctcttcttcagtaaaaggggaatccaacctaaacgcgctctcttccgaaataggggaccaatctaatccttcaacgctccaagactctcttgtagaactcgcgtagagcttttcaaagtaaagcaagatctcctttgtgatactctcgacattattcaacactaagcccctttcattctccaacaccttgataaatttcctatttcgcctaccattagccactttatgaaaaaacttagagttacaatccccttccttaacccatttcaccctagctttttgtctccaatgaatttctttcctcaaaattaattcctttaggtccccttttcttaaggctctttgaactaacggatcagaagtgagaccctctacttgctcaatggcatcaaagttagctaaatcattgaggatgctttttttcttttcatttagctctccaaaagaaaccttattccactccttcaatttggctttaacaaattgtactctcctcatgaactcgtgaccttcccacccatttcctccaccaatttctaaagttctccttgaaactaggatgttgcaaccacatattcttaaacctaaaaggtgttgggccctacttgaacgggttggtatccaaaacaattgggcaatgatccgaggtccttctaagaagggcttcttgaaggccttggggaaagagctccccccactcatttgagtaaagaaaacggtccaatctcttacacatgggagactcttgcaagtttgaccaagtgaatgatgcgttccgtaaaggtggatcaagcaattcacattctcttataaaactatcaaagtccttcatgcttgaagttagactagaaccccccaatttttctaaacttctccttatgacattaaaatcacagcccacacaccataatggaaaagataggccaaaaatgtcaaaaagttccatccaaaaatccttcctaagtgaggggctgtttgagccataaactgcggatatacaaagaggtccgcaaccatccaaagcaaacttgattgagaccgagaaggatcctattaccacctcctcactatgcagtttttttgagtcccaaatgatcaaaatcccacttgaagccctgcacaccgaaagaacaacccattccttatttttgaccgtccagacactacccacaaaccttctgtcacacttctccttttttgattcctgaatcatcacaacatccggattctctgaccttagaaaatctttaactacccttcgcttattccttgatcccaaacccctggtgttccaactgataattttcatggagaaactcatagaccctaacccgccaaaccatttccaacaggtcttaattacttgtggagcaactgttcttcctcctggaataaaccttaatatccagagagcataaaacctctcgcactttagccattttcctgggggacaggccatctatatggaactcgcccgatggggataccagagtatccccttggctgtctgtaaccaggttggaattctccttaggcaagctgggtttagacttattggaggtaaaacacttggacaactggtttgataaagcaaactggttctcctcctcatcacggacaatgccaacataattttgataaaaagtgccaacatcttttttagaaaaaatttcagaaattacctgattttctataggagactgagaaagagaggctgaactagggagatctggaccagagggactcgacaaaggaagtgccagattacaagaagggatagaagaagactcgggtggttgagaaggagaagacagacatacctctgagtcttccattcttggaatttcgcaaatcccctcaaagatgagccctttacctctgatttctggactagaaggtgaatccgtgattgatgaaccacgaagatcggaccccactcagccaaaaaaaccttctttgtcttcttcgaaatggggattgcgcagatccgcttcgcctcttgacgacgaggtccctttccccgaacaccgctttcgattccttgacaaatgacaacgaaagagaggactcgctctgaatcctcgttccatctgagatcccgtcccgaaatcctcttccaaaatgcaaacttcgctaaccgacgatgacttcccgaggaaaagaggctcgttgcaactccgaagtccttatcggcgattgaaacttggagggaagagggtggtccacattttctttgaaactaccttctcttccttctgcgcagagcctctcgtctgaacctcaggagctttccttttttagactgcaacatcttcttctcttcgagatcgacctttcttaacaaaagacatcgttcctcctaatctttggcacaaccacgacgaaccttttaaattatagcccacgatagcgtctgaaggtgggctagggttgggaagaggctgggcctttatctcaaaagcccgaccatcctctccagagaaagtctcgtctcctgccttaactttgattggaccttgagagcgtgcaaacaacaggaccgcctttgcagaagaaccatctcgctggagtgttgaagacgacaacgctatagtctcgtgggcttgagaaacaactggaccagcatgacgcccacgattttttgtcccactttgggccctaacaggctgggctttaaacatgggctcaggcgtagtgggcccattgaagttttcttccgcttggcccaaaagactcccttcccagccattctcccttttggccgccaattttgtacttaaatactggtaacgtgactggggaagaagcctcctattgtagcactcattatccctaatgctactgcgtagcccctctgcattttttgaccactgagagacgcaacctcccactttcaacaactcgtccctgttacgggttgacttagacgtggaaatgtcatcttcatcaacttctccggtgactgaaactgcgactgtgaatgtccaggccccatcttccacctctagcaacgctggtagcacgacatttggaagcgtctccacccacaacttcaccttcgacaagtctgcaagctttaatgattcccttaccaccttcgttaccctctcccacttcttcagaatgaatttcaactgatcttcatcccacaagtgaaaaggaagacctttcaattctaactagccctttctgaattttttgaaaacaaccatattttcacttggcgaccatctcctcaggagaatagaccttcctctcactaataatcttccctgctcttggaaccattcaactcttcttgttgaatccacaaagaaacaccctttgaaagtggaaatgggagttacaaacaccattcctttcgtacccatcatcctcgcaataacttttcgttcgtgagttcaatcttgaactttttctttgcattcacaaattacagctttgacccattttccaactgacaatagaactccattcctaggtccatcctctgcaaccacttctgcgtatgactgacaacctctgtaaatgcccttactcacgtgagcatctctaaacgtctccttcaaagctcctccaacttgatcagaataatcttgcactgaagaaatcgccttcctaaggtcttcccactcattgcctttaacaccctcggaaacgacaaggattaatggcttcctttttgtaacaatttctgtaattttcatgtaacgccctctattattgaaacaaatctccatcaagtgagtcctagtcttgcccctaatctttcgtataaatcccctggaagctccaactccacggctttcttcaaatgctccgtcaactaatccaactcctcttttccaaatcctactgagacaacaaaacctcggctcctttctgttactgatatccaagttcccccattcgaatccttcaaactttacctggaaagactttttctccacttcaaacttttcaaccttcattctcttcccgtcaaggaatagttctcttgcactttcagcccacaataatacttggtatcttttatcaaggaccttttacccccattagagttaacgattgtgagtggttgttgttatgcttaggttttgttggggaagtgtgaagtgtttttggaaatagtttttgagaacaaattttgaaaattgttctttgatattttgtagaacaaaagtctgtttggggacttgaaatatttttaacctgttttctatgtttcgaatatgttttaaaaataacttttatatgtagtgctttatttttaatcattctccatgtttatataattattttttaaaaccacttttagaaaacaagtgaaaacaactaaaagatgttatctgaaaataccttattttctatttttaagaatataaaattgttttatacttttaagaacatgataatattttctgctttttggttgtcaaatgtgttttcctatttattttattttatttttggttctggagaacaaaaaattattttttaaaaatagttaacaaatagggccttagcctttcaccacatggtactattacttctcatagacctagatttggtgtatgaaatttgttgattaatttgtggagtttagctcttccacttctctttaaccttgtttaccgtctccacctttaagatgccacaaatttgtcatttctctttccttattctgttgtctatatggatgtcatccgaatcttgtgcacctaactcacaataacaaattatcttgagccttagatttggtctcttattgctttctttgatatatctaaaaattctcttaaggactacttcatctttgtaaaacatagcaaatggctttttatgtgctagttttgcttaaaccacattattatgcggtaccacaaaacttgccaaatggccaattatatcttgcttcactgtgttgtggcaaggagcttgtgacattgtttttcttgctatatggttgttgttgaattcttccttggtcagtaaaagagatgttaggatgagatgggagttttgttgtaagaaatgaagcaacatttgaaggattgctcctttatgtttattcttatcttttttaaccatttgactatagtaaaactgaagaaaatttgatggttagaagtgatcaaatcaaattttgtaggacgtctccatttgaaccatatctctttggtttagatttcgcttaaaaaatgggattagataattcttataggcaataatataattttataaaaaggcactatagaaatagtgcaccaaagaaacaataaaaaaatggagccaaggaacaattaaaatgagagtacaaaaaacaactccctctcttgggaaaacccaaccaatcaacaaaatcaattaaacgcttattgagccttcacctatgcactaccttacctacaaaatgagattactaaggaatgtgctattcaaaacatggacaaattgtttctcattctcaaacgacctttgattcccttatttccaaatattacaaaaaaatgcataaagaagcaattcttccaaccttgcaccttttttcccatcaaaggtccacatcaccttaaaagagtctctcattgtggtaaacaacacccaaggaacacaaaacaaagaaaaaatgtaccaatgaatccctgtcttcgaattttgaagaagaatgtgatcagttgattcttctttgactttgcataagaaatatctattaactaatgtccaccctcatcattgaaattgatcaagagttaataccctttcctaacaagcttcccacatagagaaacttacttcaaatagaacccatagattccaaatgacctttgtcaaaaaaagaattaaatcccctaactatgaggtaacatagagagaccatatggagaaggtatcattccttgaatccgtccacattgccctgtcctcctcctcttattcaccaccttaccttgcggctatgttacatgaggcccgacatgggtgtcaagtgcaggtacatgtctaggtgtcggatcctttgcatctcaaaattttaagacatggggattgggctgaaaatgatctcaactatgggtgcgaatacttggatatgacacttttagagtagattagaggtgaacttttgttagttgaacactttcgaagtttacattaaattataataaatgttgtcttatacactatgattttggtgcaattggattgatattagaatttcatgtaatatgaaagttattttttatgattgaattattatgatgtgtctttgttacttgtataagaagatatttatctcattttttttttttttactttgataagatgctaagtataaatatactttaatttactttgtttcttgatctcatagctaatcttcaccatttctatatttaaaacatttatatataaatgaccgggagttggaggaagtacatgtcttttttgggaggttgcatattcacttcatctttttgggtattgatgatgttatggtttagctgaagacaaaaaatggtgattattttttaagtccttctactcctccttagcaagtaggagagtggggcctttccctcatagtgtaatttggaattcttaaactcctgtaaaagctagctttttttaattgggaagtaacttgggctaagatattgactcaggataagctcagaaagaggggttagaggatgcctaatagataggagagtctttaagaattgtgaaacttcagactaaacaattaaaaatgatgcctaacaaataggggagtctttaagaattttgaaactttggactaaacaattaaaaattcctttttgtatctattttgggattgagttagattgtacattggggatggttctatgtcgttgttagattttacagattggttaggttctcgtagggtgtggttgcttatttttgtatactcgccccttctggtttttgttgctttatatacatcatgtatatatatataacattaaccaaatatatctcaaatgtaccataaaatagttcaaattgatgcaagtcaaattagtccgagaggttttaagcatgagtttgggagacttatgtctagtcttaaagaaggtctaataattcttacattttaacttctcaaacttcaataagatgactcatactaattaatatcattaaaaagatcaaatttcacataataaagtatttcaatatcaattctatgctcacttgtctaatcccacaaatccctcaccgaagcttcttttgataaggttaaagcatacaaatatggaaaagagaaactatcgagagagaacgtgaggggaaggaatgaattggtagtctaagcaagtttttccccaaaattaaaattttaaattagatcattcaattaatagtcagatatatctataacaaatagctattgaatcatatcaagcacaagaataaccaattgcatgatgtagtatagataaaccatcgagaaatccctaggtgtaaaaaactatggatggtctattctttgcaaccaatccgctaaatctgaaaagaaggtatacaattttacctaatcaaatgcacctagtctctagggtcttgtattgtcagcacctacctcttattccatatcctagacacaacattccttgtgctccttagtgaatcaccttaaaattgtattgaggctaagtggttcgaatcctaaacctctaaatcacttgacaatttctttcaagaatggtgttgaaaggttgaaagatggagttattagggccatagggatagctaatctcttgtgcatcatataataaacctatgcatttatccaaaaaacctagggcgtttatttaaacaattataacttcaattacaaaaatgcccttgaaattacaaagataagactgaaaaatacaaaaaaatatgtctagtgcttgaacgggatgtttgaaggttgaaggggggcacatttgtactttctctgggcagcatttgaacatcctttaggacgtttgaatgcttcctttgggagttcgaatgttcaacccttcaaactgctttcctactttgtttttcatgtgtttgtccaaaaataagccatagtaatcttcgtagccattccttaaaccccaataacatcaaatatatacatacctctagaattatcaactttgaagttgcttgaagttgattgggaactggtaagacccttaaaagtcttatgcatcatcgacagtaagaaatggaccaatattaccaacctaatactaatatatttacaatcttcctctttgataattttgtgataaaacaaaatattacaatgagacccctcaactctcatgataaccttgaaacaaattatgtttcacataaattgtatgaattagaatacaatctgacgtaaattgagagagcagaattgtggaaataattttattctccttccttctcagaaaactacattagctttatacagaaaaatcttagctatagaaaaggaaactaattactaggctatatcaaatcccatgatttatgggatactctaacaaaataggaaactaactaaattaacctaattctaggaattctggctgttacaagcaaactctcctaaactagcataattactatacacagcaaaatacaagccattaatttacaaccataattcacgttttcccacactccccctcaagctggtgaataggtattcaccattcccagcttggatacaaagctttgaaacactgaactacttagccctttggtaagtatatcggcaagttgaccatgtgtagacacataaggtgtacatatcaatccactatccaacttctctttgatgaagtgtctgtcaatttcaatgtgcttcgttcgatcatgctgtactgggttgtgagctatgctgattgcagatttattatcacaatagagtctcattgggccatcccatttaatctttaagtcttctaaaacgatcttcaaccatagtagttcacacacaccctgagccattgctcagaattctgcctccacactagaccgcgctaccacattctatttcttactcctccatgtcacgagatttccaccaagaaagatgcaatatccagaagttgaccttctgtcaataattgagccagcatagtcagcatctgtgtatgcctcaagtactaacccgccattccttttaaatagaatacctttacctggtgtccctttgagatattgtaacactcgataagctacctgcagatgagcttcctttggactatgcatgaattgactaatcatactcactgcatatgctatatctggtcgtgtatgagatagataaatgagccttcccaccaagcgttgatacatttctttatctactgtagcatcattttctgcctcttcaagtctaagattcggatctattggagtacttgctggtttgcatgcggtctttccagtttctttgagaagatctgtaacatacttttgttgggagataaaagtgccttgcttagagtgagccacctcaataccaagaaaatatttcaacctccctaatgccttgatctcaaattccttagccaaacattgatttagaacctgtctctccttgtcatcgtttcctgtcactattatgtcatcgacatacaccaagagagctgtgagtttccccgaagatgagtgtttaatgaacaacgtatgatctccttgactttgcctatatcccatggttatcatcactcttgcgaatcttccaaaccatgctcctggtgattgcttaagtccgtacaaggccttttttaatttacatacagtatgagcagccaaattattgtcataacctggcgggacctccatataaatttcttcctctagttctccatgcaaaaaagcattcttgacatcaaattgctgcaaatcccaattgtaattagctgctaatgacaacaagactctaacagtgttcatctttgcgaccggagcaaaagtttcttagtaatcaatcccataggtttgagtataacccttggcaaccaatctagccttgtatctttctattgatccatctgctctgtatttcacagtataaacccatttacaccccacgggtttctttcctgtcggcaattttaccaactcccaagttttgtttttttctaatgcctccatctccacattcatagcttgtttccatttttcattggtcaaagcctcggatacggtggtagggatagaaatagtgtttaggctaacaaggaaggctctatgagatggtgaaaattttttaaaggataggaagtgtgtaagagggtatagaggtcgatttgtgcattctctaatccctttcctaacagcaatagggaggtcctggtcatcattgttcacatgagattcagattgcaatgaaggattagaatttgttacctcattctcagaatttgggttgaagtcttggacttgcacagattcagggacaactgtcttcttccttgaaaacactttgtcaaatctcacattctcaggggcagattttggattttcaggcacaggtttaggctgatcgggcaatttaggtaaggtttcaatcaaaggatcagtgggacgagattgttttgacaagggaagtgatggcagatcaaggaataaaaaatcccccctatccttatcttccattactgaattctccccctgaagataaggaatagtgaaataagattcttgttcatggaaagtaacatctaccgagacatagaatctttttgatggaggatggtaacacttataccctttctgagttgaagaataacccaaaaaaacacattttaatgcccgtggatctaacttccccctgttttgattatgaacatggacaaatgccacacacccaaatatcctaggaacaagattgtttgtagtgtgtaggtttggatagaatgttgaaagtatgtccattggacttttgaatcccaagatcctagaaggcaatctatttatgagatgagcagctgtaagaactgtttctccccaaaaggatttaggcacatttttctgaaacatgaaggatcgggttgagtcaagaaggtgaccgttttttctttctgccactccattttgctgtggagcgttaacacaagatgactcatgtattattccttccctctgaaagtatggagttaggacttgattgaaataatccttagcattatccgacctaaatcttttgatattgactccaaattgagtcttaatcatagaacaaaaatttggaaggacagtactgacatcaaatttatgtttgagcaaaaaaatccaagtgactcgagtacaatcatcaatgaatgaaacaaaccatttagccccagtaatgttaggaataggagaaggaccccaaatgtcactgtgtatgagataaaaaggaatagaacttcttttattgctaactggaaaagacacatgtttgtgtttagcaagttcacacacttcacaatgaaaatgttcgacgtctagacctttaaataaagaaggaaacataattttaataaccttaaatgatggatgttcaagtcggcgatgatgaagccaaactttttctttattgaatgaaaaaacttctgagacaaaagaatgagatgatttgcctttggtaatgtttgattgacttggtgttttgagatagtagagtccatcccgttctctagcatgtccaatcatcctccccgaatcctcgtcctgaaatacacaatgactatgataaaaaaccacattgcaatgtaaatcttgagtgagtttttggatagaaatgaggttcgtggttaacctagggacatgaagaacattttttaacatcagtgatgggcttattttgacatctcctatacctgctacagtggtcaaggagccatcagctgtggctatttttctattgcttgaacatgggaaatatgtggaaaaaatgtttggtgaatgagtcatatggtcggtagcacctgagtcaatgacccaggagttggcaaaggttatatccgagacatttaatccaatagagaatggaaacttacctgaatacgccaatgaaccagtacctgttggtttgtcaaggttgcaagtaagagacctcaccctctcaacttcttcttgattaagactgcctgtctcttgcggtgttgctccattctgttgtactgttgtaacatgggcctgaccattattacttggttgttctcccttctgtccccactctcgacttggtggttttccatgtagtttccagcaccgctcacgtgtatggtgtgccttcttacaataagtgcaccataagttgtccttgtagtcacgattttgagtctttggttgactagatcttccattgccagaaactagtactctttccatatttgtggctgaattgttaccactgccagccaccatagccgagctgtccgtgttctgtggattaagcatcaggcatcttctgctttcctctccttgaattaatgccaccacctcattaaagcacgaaacttcttgcttgccaagaatctggatttgcacttggtcaaattctggattgagtccaacaagaaaatcatagactcgatcttgttctatgaaatccttgagaatagcagcatctttgggacacttggtctttatcaccctgtaatgatcaagttcttgccataaagatttcaattgattagcatactcagtaatagttttatctccttgtttagcagcaatagttttcaccttgacctcgtgtacttgggccgcatctctcgccttagagtacgtttgttggattgcatcccaaatgtccttggcagtagctaggaacatgcatgtgtcactgatttcaggaatcatagaattccacaaccatgccataatcatggagtcttcttcatcccatgcttcaaaatgaggatctcctagtttcagccttgtacccatgagatggctgatcttccctttccctttcaacacggtgcgtacaagttgggaccatttcagataatttttccatccagcctatatgcagcctggatattttgcaattctccgaaatgttggggtcgaataatctcctctgattggactgtagtggttgtttctgcaatctttgacattttttacggaaaaaaaacggcaatttctaggtgattcaagcaaagcacgtgggtcaacaatagacaacgttgaaagccaagagatcagattgacaatgaaggcaaaaaaaggcaaatgaatggcaatgaaggccaagaagaaaatgaaaattctaggagaggaaacaaatgctctgttttgagtttcaaaaacagaagaaaaattgggcactgtattcaacaatgaaggctgaaacaaaaaaaattccaaggatcctaattcagctctgataccatgacgtaaattgagagagcagaattgtggaaataattttattctccttccttctcagaaaactacattagctttatacagaaaaatcttagctataaaaaaggaaactaattactaggctatatcaaatcccatgatttatgggatactctaacaaaataggaaactaactaaattaacctaattctaggaattctggctgttacaaacaaactctcctaaactagcataattactatacacagcaaaatacaagccattaatttacaactataattcacgttttcccacacaatcaatacatcctatttatatacaattactctaagcaccaaaataggaaagctacacctaccacccattatcttataatctcttccataaatcatggatcagattctactaagaaaaaaaaaaccgaaaagaaataaatacaattagtacaaaatcaattcattgaccaagatcacaataaaattcctaaggatctacaacaacaattagtcatcactcatcctttaaatccccaaaatcatcatcatctccatcatctcattggtaaccctcttcttctaaatcagtcccttcttcatcttcaactattaatgaaagagttggcatcaaacctagcttccttagctcccgtagctctaataacatcaccctatgtcaaatcatcatatgattggacacaaaatcatcttctacacctccatcaaaattgccatcgtctattctttctatcaaccatttattgttatcatctatatttttcatataaatttagtcagtggtgccaggttcattgtttcttttcttcaaggcttgattatagctaatgtacaccaaatcgttcaagtgtttatgagttaacctatttatgctcttgccatgaatttgtaaaaaaattcataagcacatagaaatatataataaagttctaaatcacctttaaggctttaatatactggtaattattttagtcgcttacattttcaaagatattccaattttatttacaacccgatgcactatgtgttacatttaggatttttattgcaaacatttgcaaatttggagctatggcttcatatgaaaatgtaacatgtagtgcatcaggttgtaaatagaattggaatgtctttgaaaaaatgtatatgtattttaaatatatacgtatatattaataatgtagtaaaacaatcaacttattttagcaaaaatatgatataagcatttaaataaacaaaattaagtcattgaagcggtggtccaatcttccttgtcctaacaactaattcattttcatatagaccttgagcatttatgtacaaactcacttcttttgcaattttttcttgtttgaagatctcttgtcaaccttaggatgcatttattgaaatcactaataacatctgtattgagccccatttccgatatatggcagaagaatttcaggttcaaaaagtacccaacaacatgcaaaggtccataaaactgaatctcccgcctcttatcaatgattttgaaggtttccttgtatttctcttcattttcattgaaacttctaataattgtcttctttgctctattcatagccttgtaaatgtatcccataggaggttttctttctttgtcaactaaacaaagcacacgaacaaggggactaaaaacctttgaggaaaagacactggtattccaaaatgaaggcattaaaactatgttggttatacttctccccttttgctcttttacctatttactttctgactaatctggacttataaacatctttctgaagttatgtttttttgctgatgcaatctagataatgtgataaaggtcattggaaattgagtcttagcaagcctaagcaattctgtttgtccaatgaactgttttatcatgttaagtagtcctgaatagttatgcatatagtcatttaatgttatagctctctccaatgtcctcttgatgttggatggttttccaatatcctctcacatcaagtcaaggcaataggcaatatggcgtccaaaacaaatgtggccattttaaatttaacaaccttcccatgtgacattgtaaacaatgagaaaaaatttgaataagttataagataaataatttaaattttaaaaatttaaatgaaaaattcaaaaagtagtatttcttacctaacaacacataaattgagcaattatttgttatgactttgagcgacattttattcaccaacttgctccacccatttgtcaagtaattcaaacatcttatctctctcttgtcgttccatccatctaatatgattgaacatcctttttttttttttttgccattctaccatatggtgcttcattagatcctttgtaagacttaattctttcttaaggtttgtaactcttacctcataaaaattccgtccctttataccaacatcatattgaccaatggcatcaatcattggttgaaaacttagatgagaaatactgacgtcatacatctaccttgtgagaaacataaaaactctttctcttgcttctttttagtaggcatcgttgataattgtttggttcacccttccacactctcgattttgaacaaccatctctagattgggagtgaaaaaaatgatccataatactttttttacttggtctttgtagtgaaggttgcaccatcctactaactccccctaccccggttactacctccatgagaggtattaatggttattaatctctcataatctttatctttaaggccaaacaaatcttcattcacattctggttctccatatttatttcttcttttttactcttttttgtactcgtatattcttccatttcttctttaacatgttttagaggtttttaatatttttgtatccaccaataaaatgttgtttgtgcctatatatgccttgttttgttactttgccccaaaatatgtatatgagagtgttcaagtcctttccattctgcaaattggtatatttccatctagaaatttgccttccacttgaacttgacttagattgttcatccttgcaaacaaattgtctatactagcataaaagattattcatacgtgctcagcgtctagtcgaagttaggtgcgcccaaaacctagttaaagtcaaatgtctctagagagctcccctttcaaatgcatattgtcaactccacttgtacaaaaaagccttattaagcaaagaaagagttccaatgcctaatccccctcctctctttactccgcttagattgttgaccactttaccaaatgaaattttttctccaaagccctgtctccttaaaggaaatctctttcaatcttcttaagccttattctaacttttgtcaaaatggaaaacaaaggcataaaacaaatggacaggttggatagtgttctctagatcaaaataaggctcctccttctgaaatatatttccttttccagattgatagcctcttgcaaaaacactcttccactccatcccaagccaccattggtttaaaaggaatgtgtagtggaagccctagataagaagccaagagctcctacctacaccccaattcataggccaacacctccacatagtccacctttgcaactagaatcagctcactcttttctagattaattttgaaatctgatgtagcttcaaacccaatgagaaaccaacttaattgaatcatttggtcttgagtagcctcacaaaaacaagcgtatcatctgtaaataacaaatgagacagctcctcccactcacctcctgtcccccacatttagataatgtggttgttgttctttttctctttttcctttggctccctttgtataattcctgtttacttgggcttcagccaactttttgatgctcgtctttaattatatatgatcctctactggctactaatgtaaatattatagccaggttctcctctctttggtttcccagaacccttgttaccagtcttctaatatatatttatatatattagtcaactcattccacacagcagtagtttcttttttcccccatatctacgctcatttgtcactatttttattgtaagtatcattagtttttaccaattaagttcaaccacttatttctttaatatccattttcctttactcttcttcctcctttctcttagtatgaacatcatatggcacatgctctccctgtattactatacattctttaaaatattttcttgctctttgtctctctctttacatttatgcacacacacacatacacacacacatccgactatcatttgatctacttttaaacactattacttgctaatccctcttgtgtttgcttttctgagatcatgtgtcatttcagtcacatcccatccaatttactgtcttaagttcttatcacatttacttggattgcctattttgaatccagtaaacatacaaatgtactagaatctcagtcttcctttcgtgatcccttgagcctatctttgattagaccacaatgtactcttccctatcaacaataaacatctaatatgtttatttatttatatatttatttgtcaaagtagttataattgatggctttcaaatttagattagtgaaagaagctaaaataaatgttgtagaacttaggaaaaaaagtattaccttttgcagaggtgcctacatgaaagtttatgccttatttactaaggcttgtaaattcaagacctcatttctaggcttcagtagtagctgctttagttggatcttgaattttcttttgaaaacaataaagctatgtgaaaaattatgccttatttactgtagagacttgtaaattcaaaaactcatttccaggcttctgtaattgctgctttagttggatcttgatttttttttttgagagaataaagcatagataaagctaagtgtcactgtctgggatccggggcgaacattgatataatactcttcaaagaaatagagagaaaccttaaaattgggatttgaagatccaacaaattgaggagatctagaagcccaaaattgttgtatgtcactaaaatgtgaagatagcagttctgtaaaagaagaggtggaagtatctttccaccatgtgggactgaattggccccaagggagcaaataatgttgcaccctaaaatatgtaaccttgttattgcatgctatgtttgtttaaataatataactatagaacataagaacatatgtgtgctttgaaagctctacagagattcatctagtacagtgtcttaatgtgtcacatattctttttcttggaaaccagagaaagagg

SEQ ID NO: 11793 - DNA, 4183 bp, Vitis vinifera
  Intron number 3 from transcript GSVIVT01033668001 (locus G SVIVG01033668001) derived from phytozome v7.0 (chr-ID chr8 ; pos 18797986 to 18802168 reverse strand)
agataggccgctgcctgaatagctctcaatctcaggtttgggaaatgtcttaaaattttaaagtctttttgatgtagcttttaaccatcttttataagtataattacatgattagtggtggattattatgtgagtaatcttgaaattttggattgtattggcaggaaaagaggtttatgccttacatatttttcaaggtttaaactttctggatataaaattgtttgacatagattattgtgctgacatttcttgcaatttttttttttgttggtaggaatattacaaattttcttgacatttttctacttttctgtttatgtaaagtgaatgttgacaatgattttctttagttgttttctttgtgagtgtatttatacctttagagttttgtacttgttgactaatttagatttgattagttacaaggtttacttctttacattgcctatcttgctttccttcacatttgttgtatatttaattattttctttggagtcttccatgtttccaaatgaatattatactggaattctctgaagagcatcacagcaataactactagtagcctgaggcatcttttatctcctatcataccgtcctccttgtctccttacataagaatccaaaggtgtcttgtgtgacaaatgtgccagaatgtcctatatatgttatatttctctgtttctagtacatgctttgtaattcgttaggagcaaaaccccctacccaagtttacttccgcgatttcaggagaataactgcctatgaaaagcaaatggtttttaggagaataatgccctttgccgtgtgtggtagaaagaagaaaagagtgataaataccagtccattttggtcccccttctccatcaacaaaagggtgcattgattggttaaggttcattttagatgcataatccttgttctaatcttttatttatgatattgtcatttcaatgtttgtgtcaatgatgttaacttcaattatgaatcatatgcctatcaagagaaaaaactttgattataaaacatcaaactttcatattttatctgttctcgcagagtggaaaccttgtattatttaatcgtgtctgcttgtagctgtggtttcttctttgacttaaatgtgtatgcaggcttttttggtcattatttcatcccatattctagtttaatctagagggattcagaatgagccttaaaattcaataaatattggttatgaggcttgcaggcaaccattgaaagaccttatcctgcttgtgtggagactataaatcacaaacatgttggtatcttacagtcactaaagtgtccaagcaacctgatgggctgagggggaatacatatactccctgtgtatatatatgtatctccctcccccacttggctaagccttttggtggtcagtgtatacttcctgtatattttgggatgcaacctgatgggctgagggaatattataactccctgtgtatgtatatgtatctccctcccccacttggcttagccttttggcagccagtgtatacttcctgcatactttgggatgctgtttgggcatttccttttaatatatactccctgttttacctatcaaaatatatttatatatatagggtgtattgtatttagtctttgctgtcctatcactagctatctttgatccatttttagaatttctagtagagttgcctcttggagggatttcctgtgttcaagatatgaggactataaaagcagttgcctcataaaagaaaggctacatgcaagccgaagtttaggggtggatttgggaaggagaaagggaggttaatatcagcatgggtctaagtaacaatgcttgtattggcaaataactatggacaaataattttgaagattgccccaagagctaagatatcattttcaatgagatgtccatattctaagaaatttggatatcttaatatttcatttccaatgaaatatgatattcttagatattaaatcccatgaatatattatgcattcttgtatgtggtttgtataacgaataaaaaaatatcaagacaaaatggaaaacatatcgtacttcaatatttaatatttatttaaaacaaaaaatatattgtatcccaatatttcctattaaaaatatataaaatatctttcatatttaatattatttgaaaattgtttgttctataatctttcatttagtaagtaatttttttatattttattaataatattcataattaaaaagatttataatttatatataaaaatgttatattatgttgttaaatgtataaaatacgacataaaataattttaatatttaatacatacaaaaatattattttatgttgtattttatacatatttttcattttttttctttttcaaactataatgttaatttcttaatgattttttattttatttttattttgtaaaatgattaatataaagaattaaaaatttcgaagaaaatgaatgagaagaataagtttataactcatgggatatgtatatatcatatctcaacttaaaattatcatattctatatataagggatattaaataagagattaaataatatatctcaccatttattttaatcccatatttggttgaacatggattataataagtgttgagataacttatcttatcttatcatcaatcgaacatgaaatctatatatgtatataatcccatctctttttctattatatctgaccaaccaaacatgttcttaggctacgtttggttggcaagataaaatagagtaggatatgtatatttaggatattatttcctattggatgtgaaatacatatcctatgatatgatttctaatgggatatgacatccttgaatattatattcaatggatatgatatcttaaggtaacatattcaatgagatatgctatattatggttatatttagtttgtaaaatgaataaatatttgaactttataaataaaattttttgttttatgttattcaatatataaaaatgacacacacacacatatatacatacataataataataataataataataataataataataataataataatacatatattaatattagtatactatatattttatagatatctttttagttcttgttttttaacaataaatttaattttataataaaaaaaaattattttacaaaataaataatataaaaaaagataaaaaaacaaataaatttatgattcatgagatatgtatattctatctcttagcttagggttaacatatctcatatcgaaggaatataaaaaagaaggtggatgatatacccattacttagtctaatatgattgaatataggatataataagtgatgagataacttatcatatcttacctccaaccaaacatgggataaaatatgttatcatttctcttattctatcacatgctatatccaatcaaccaaacatagccttagggtaatggtagttaaaataccaatggatcttattgtgtctattcagaagatttttttttttttttttagataatctattcagttagatgtagaacaaatatctaagtatgtctatgatttaccttctttttctatagagaatttcttggaaacatttgtcatgaaagaaaatggtatctatttgatgaagttgcatcacaaataagatggtgattaccagtctgttagcaagttgggagagttgggatttggccagaaagggcatggaggagacatatttcacgagtacagatgtaagattaacttttcatgtacgtgctatcttgcataacatgcataggtatgtgctaataagcattagttcttgtctttatggatatttgtaaattaaccaagggttatgacacatcctatttgtataattatgatgtattttggtcttattcttttcaatagtttcttgtttattaaacaacttgttagatctaattaaggaagttaagcaagggagaaaagcttgagctttcaccttttaggaactgtttctttgagatagaataaacacattgtgaattttgttgaaatcttttgatgttaagattttgtagttgttttgggattggattcccatgtgattgtatccctttcaacagtttttgcttagccaatctgcattgcaggttgccgaaagagccttctttttgtggaaaa

SEQ ID NO: 11794 - DNA, 6526 bp, Vitis vinifera
  Intron number 3 from transcript GSVIVT01011149001 (locus G SVIVG01011149001) derived from phytozome v7.0 (chr-ID chr8 ; pos 7329913 to 7336438 reverse strand)
agaaagcaatttgcagggagcctcaggagtccaaggttgggtgtctaacctatatagtttcttgttgatcatatgttacttcattatgcttatttctcatgtattgattttatacccttaatgttcatcctgttattgctgtccttactagatattttttcattttcgtagtgagtgcaatttggtacagtgttttttatttaccagattttctgctcatgtgttgcaatttttgatacacttgctaggcattttacttgagtgtcacaaatgcaatctctaactggaatgggacttttgatatagtaatgggaaagattcagttgtttaagatgtggctatcaatgatattttgagggatttggaaagcttgtatctgagcactacacttttgtggcatcaatgcaatgtgaatctcattgtgccatttcttttatgcttaatgttgatggatcctccttgggtaacctggaataaatgaagaatggggtttttatgaaaattatgatattactttgcattgaagccatttgggggttgggttatggttatgaggctgctccttgtaggtgattcttttaacatgattctttcagtagatacttatggtgcaagccttttggcacactgtaatgtcttagtatagatttgcaataatcattctaataaaggcattactgccttgtggatacacatgaaggtgcaaactagcccactatccattttattttatttttgatgaaatgttgatccacctttgcgtgtttagtatggtcatgctgaattggattgtgagctatgctaatgcctgacttgttatcacagtaaagtctcattagcccctcccacctaaccctaaggtcggtgagtataatttttattcaaagaagttcacatattccatgtgccatggatcgaaattctgctttttcagttgatcttgctaccattgattgctttttacctcctaagaaagtgcaataactagaagttgatcttcgatctgtaactcatctagcccaatcggcatctgtatatgcttcaagtctgattccttctgcctttggaaattgaatgactttgcttggtgttgattctaaataacgaagaattctgaataccgcttctatatgtatctccttgggattatgcatgaattgactcacctcactcactgcataacctatgtttggtctagtatgcgataagtagatcaacttcccctttcctttagtatacattttcaccaattgagaccactgcaaataatttccaccattgagttcgaaagaagtagtgacattctgatagtcaccgggagttgtgctctaggttatgaattggctggtagtattagtgctaatttcagacatgcgtggagaagaaaaacagtttgtctggaaggctattaggatgaaagaaagttgagttagtaacaattagggctggtctggagaaacgacaaataatagtaaaaaagctggtctggaattaaaggggtttctgctcaataatgaagactgagcaggcttatggttgaacaatgaaggctcaatggtgggaagatggatcttgacagagagttttccaactttgataccatgttgactttgggatttttgagaatttctctcttgtattatttcaatagaattacaccaaatatatacaaattgtaagagatcaaaattgggaaaaaagaaaaggaaggagcttatttctatcctaggatatctctatttacaaaaaagaatcagtcaactaaactaataaggaagaacttaattaagaaatatttcctagctggaacgtcttcgtacaggttgttcatattttccaacaggatgtagtttgtgctacctaagggaggctaaggttgattcctgttggaggctttttcgctgtagttggtggctatgtgacaaggacattcttattttgatttctatttttctctccccttatggttcatcatggtgaatctttttctatgttttttatattgactcccatgtttgcatttaaaaatgtttcatctaatataaatatatatattttccccttttttctggatgtattgaagttgcatgtgagagtttgtaacttcgctttgcaaattgttatggattcacctttttgcacatggtaaggtggaccttgttttaagctgagcaaggattgttttcattgaatccaatgtgggacatgttttcccttcttaatagttttgctgctttttttctttgttattcttcgtctttgaagggtcgcttgtgtttccatcatggtcttctttgtctactaataatttcttatgctccttttagtgttttcatataaaaatatcatttttgttgacatttttttacgagattttggtgtcatatgcctcagttccagttggatgctgatatttgtgttagtttcccaaatgtttacctgcttattcttgaattcatgaactctgctgtccttaccttgaagagtccaccaaaacttggattcgcccctaaagcagtctctgatcatttacaaatttcagagaagcattttgatggaaattagtgctttaacatgaattatgaattcatgaccatccattaacctcagaactaaatagaaatagatttcaattagctttcttgttcactttgtgctttcttctactacaagtatctttattagcattcagatggactgttgtttagcctattttttttttatctttgtagcctacttttaagtctgcgattacaatctgagaattgggagcgccatctttcttttccgtgtaccatttttgttcatgatgtgaatgtttcaatgctgtgaaattaccaggtgaaggtattgcttcagttaattaaatattcaatcacctattcaatttgatttttaaggccaaagtgatagatccgctcaatttcgctagcttttcaatgtatgagttgaattgtgtaaactacaagttagagattttgttgcttatcttgtttatataacatttgatttgttaatttcagctttcataaaggaatcacaaagtttttgtgtttgtggaatggaaatcttttgtgtagccatctgcatgtatgactttctttgtttttattgggattgggtacaacataggatttagacctcttgacatgacaactggcattgatttctttggcctgaatattttttattttatttttgtaacaagatatagcatatagataacaattatgtattaactcctaaatttctgtcatttgttatgcacttggaaattgagcttcaaaatgttttttcaagtactatttcctatgccatcagtcatttatgtaggcagtctggattatagagagagagagaggtggtggggattttcataaccatgactgttttgttaaaagtctgaatgcaacttttattgttttgatcccaaagaaaggaggggcagaagacttaagggatttcaagcctattagtttagtgggaggactgtacaagtggttggctaaagttttagccaataggttaaagatggtgatggggaaggtggtctcaaaggctcaaaatacttttgtggaaggaaggcaaattttggatgctgtccttgtggctaatgaagttttagactcggttttaaaaggcaaggaaggggcggtgatgtgtaagctggacattgaaaaggcgtatgaccatgtggaatggtctttcgtggtttcagtcatgagtatgatgggttttggggagaaatggattaggtggattaagtggtgtatttccacagtaagcttttccgttttggttaatgggtcttcctcaggtttttttcaaagctctagaggtttaaggcaagaggatcctctctctctgtacctttttgtgatggtaatggaagcttttagtagtctcctaaggagtgcattagacgggggttttgtgtcagcttgtaaggcgaggagtaggggtggtgagggagttaaggtgtcacaccttctgtttgctgatgacactttggttttttgtggagcttccaaggagcaattgctgtatttaagctggattttaatgtggtttgaggccatgtcgggtttgagaattaatcttgacaaaagtgagctaattccggtgggttatgtggaaaatgcagaggaattggctgcaactattggttgtaaggttggaagtcttccgaccacttatttgggattgcctttaggtgcgccgtatagatcgctggctgtttgggatggagtggaggagagaatgaggaaaaaattagctagatggaagagccaatacatttccaaaggaggtaggattactttgattcggagtactctggtgagtatgcccatttactatatgtctatgctctctatgcccagaaaagtcagattgaggttagagcgaattcagagggatttcttgtggagaggtggggctcttgagaggaagccttatcctgttaggtgggatttggtttgccttgagaagtgtaatggggggttgggggttaagagcctttctatcctcaataaggctcttttgtgtaaatggagttggagatttgctattgagagagaggctttttgggaccaagtgattaggggaaagtatggggaggagcaagggggatggagttcaaaggaagcaagggacgggtatggtgtggggttgtggaaaaatcttaggaaggaatgggaagttgtaagaagtaggctattttttgttgtggggaatgggcaaagggtaaaattttggaaagatatttggtgtggggatgaacctctttgtgtttcttttccttccttatttgcactgactgtttcaaggatgcttgggttaaggatgtgtggaggtgcaatgagggtgggggaagttggagcccgcttttttctagaccgcttaatgattgggagttggacgaggtttgcagattttttgtggccttaaacgagaagcgaattcagcaagcagtggatgatagggtgatttggagagagactaaatgtgggaagttttcagttaagtctctttacaaatcattagtatcaggccatccagtctccttcccttcgtaggctatttggaaagtctcggtgcagcctagagtgaggttttttgggtgggaagcaacttgggggaaggcccttaccttggatcagctccaaaagagaggatgggctctagcgaacggatgttacctttgtcaaaggcatgaagaatcaatagatcacgttctcctccactgtgaaaaggcaaggactctttgggcgttgcttttctctatgttcggggtgcagtgggtgctgctgaccactgttaaggagatgcatttggggtggaatgggacttttgtaggaacgaagaggaagggtgtttggagagcaagtcctttgtgcctcttttggacggtttggaaggcaaggaacaaagttgcttttgaggaagaggagctgtcaattcaaaggcttaggttttcttttgttattttctttggttggagacgaaattgtctataaaagatggtctttcgaccttagttgattttgttggttgggtggcaacccgttaagggtgggggtagggaagctcctcaggccttggcgttcagctagggtgtgaggggtgtttttccttcttgtaaatttaagcctctgctttggtggtttttttaatacaatctctttacttatcaaaaaaaaaaaaaatagagagagagagaggtgtctcatgcaatcaccttttcatagaagtcagagctgtacctgtttatgcacttgtaaccttgatggttggtgctatgttttgaggaataatgctgtgtattgagtcatgatgctatatagttgctgtgttttgattgattaaaaaatttggtttcttttaatgcttgtaagtggtatatcttgtgtattacgttctggtcttaaattcaactgagttcttatgttactgagtagcattcatttctggtattaaattcaataagttcaggttaatattgcaacttggtggttgagcctgagcccagtgccactggacagaagttgcaaaaaaccattacacctaatggaataatatgtttagagtactgaaccaattacatttttcaagtgctggttataatgcccaagctgcaattaatagaaaaattgtttaatcatctgtgagatcagtttgattagggaaactattttgcacttcttgagttcatgtgctatacctatatattccagaatggaaatcatctgtacccttagtgatggttacagcttacatgtggcctctaactttatccttgccctggctaaattgcaagcctgtaggaatattctaaaccttgcctgatgtggtttagggtcagccacttaggtgtctttaattgggttgatattaaatttggacataaaatgggtaatttttttttcttttaaatttcagttacaaaaaatttaattccaaacggtgaatgtttctttttgttatctgatgtattattatctgatgtaggacgttccaccactgg

SEQ ID NO: 11795 - DNA, 7034 bp, Vitis vinifera
  Intron number 3 from transcript GSVIVT01036044001 (locus G SVIVG01036044001) derived from phytozome v7.0 (chr-ID chr4 ; pos 7784450 to 7791483)
ttaagtcgaggtatcgctgttgctagccttagcaggtactatacttataataatttctagtcatttctaagattctttagttggtggtggttgtctgaacagatgtgtcaacctaggccatctattgaggctaaggggcttttggattctttggtcacttcatctaatgtcttaaatcttgagttattggttggtggattcatataatgtgtcatatcttgagtaatgtactctactaacattttattggtcaagagtcatttgaaaaaaggttctgataaggacactccgatttttatttgatcatagatcatataatggtcaaaggatgtgttgaaagtgaatgtggccttctaataataacatcaactcaactttaactgtggaactctgaaaaatcaccagcattttgtttaccatttgaagctagccattatcttttattctttgctgctagttgtatgtcttcttacttcattttgataattttactgattgtcccatgaccacttccaatagatcccttattatgctcttagtaggttgaactcaaaattattatttagtacaaggtgtgagatttgaaatttactcatcaattttagtgtcagtgcaaaagaccccagataccttttgttttaagtttctggcttcttcatggtctttgtatctttgatatctaagatccatgttgtgttgtatcagattaatatatttttatgcatgtgtttgccgtagacaagactaaattgtgtgccaggatagagggcctgtagtgtagatgtgtatatgtataatcttttttagataggaaacaacaaagaaatatattgatagaattaagatgtacaaaagaaggatgaggaatcctcccaccaaagaaaactaaacaacaagaatacaaaaacaagaagctaaaaggtaaaaacaatgaacaatctctcttagcttgaccctcccattggagctacacattgctagccaatctagttgtaacacattaaggggaatgcccttaaaaaccatggagcaaaaagcccaaagaaaagcaaggaaatgaatggaatcccatagattctttgagttcctagctttatcctaaaaaatcctatcatttctttcccgccacacaacctaaattaaagcaatgcacgcagtttgccacaaaactatccctctcttggatttttcaaaacttttataattgatggacatcatgtcggaaatgcttctcgggggaactcaatccatcttggctaactgaaataatttgtgccacaatcccatcgtcaaagaataatgtaagaaaagatgatctattgattcttcatgcttcatacacaacttacaaatgtcaggactaagagctttgtagagtcttctcaattgtaacaagttattaatatttactttcttgtgtgccactaaccagacaaaggacttgactttaaaagagacttgagaattccatacaaaattagtaggaaaaattggagataaatcggaaatgtgggacaaggctagaaaaaaagacttgagtgtaaataactccgaagaagatgaagaccaggatcttgcatctgaaatcgatggggataaatgcaaacacttaagtgaacgtatgagactttctaaatcttctatctcagaatcggagaggttacgacaaaaattaaagttccaagagaaggggcaagtagaaccgagaattgaagatatgagaatatttttatcagtgactactctaaatagtcttggatattggaatcccaaaggttggtctccccatcacaagtcttcccaaaagtgaattctttccccatctcctaccacaaaccgagtatacttggaaaaatcctgaaagacttgtgcaatagccttccaaagataacgatgtgaccatctgaccatagtgttggcatcccaaccattagaatgtgtcccataaatgcttagaatgacctgatgccatagagctgaactctccctaagatacctccataaccatttccctaaaagagcgagattccttagagaaatcttcccaaaccccaatccctcttttgccttcggtttacacactacatcccaactaataagatgatctcttttaccttccccaactcctgacaaaaaaaaatctctttgcaatctctcaatttttgcagccactgaagtgggaatcttgaataaggaaagaaagtagctaggaatgtgagataggcatgagtggataagagttagcctacctccaaaagataaataaggcttttgccacccatctaatctccgcgagattctctcaatcactggatcctaaaagccacaagcctttggattccctcccaaaggaagacccaggtagagtataggccaatcaggagccttgcaatcaagcatcaaggccaacctagagagatgatcctaatcaaggttgatgccaaaaaggttactcttgtctagattgaccttaagcccagaaatttgcccaaacactaacaataaactcttaagagtttgcaattcttccacacaagtgttagaaaagaagatggtatcatctgcgaattgcagatgggacacccttgttctattcctacctacactgaagccctccaacaaacttctttcctctgctctcaacaacatcctactcaacacatcgatgacgatagtaaacagaaaaggggataaaggatcaccttgtcttaatcctctagttgccttgacccaccctttaacgcttccattcactaaaattgcataagagattgaagacaaacaacctctcatccaggtccttcatctaggactaaaccccttcttctccaacacatgatccaaaaaatcccaattcacatggtcataagccttttcaaagtcaattttgaagataactccttcctcccttgatcgtcttttctcatccactatctcattggctataagaactgcgtctaaaatttgtctcccttgaacaaaaacaccttaagtagaatggatagtttcatgtagtacacctcttaatcgtcatgatagaactttggctattatcttgtagagacaagtgatcaagctaataggtctaaagtctgaaactttttttgtctggctttttttaggcaaaagaacaatgaatgtgacattgatgctttgattaataatcccgcttctgtgaaactctgcgaacaccctctttgatcacatcccaacaattttgaaatactacaatggtaaatccattaatccctatctaattgagaaatgactttagaaatctcttcttcaataaaaggggaatccaacctagaagcactctcttttgagataggggatcaatctaagccttctactctccaagactctccaggaggactcaagtagagcttttcaaaataaagtaagatctcctatatgatgctctcagtattattcaacactaaacctctttcattctttaaaaacgtgatgaatttcctatttcgtctgctattagccaccttgtgaaaaaactttaaattgcaatccccttcttttacccatttcaccctacctttttgtctccaatagatttcttccctcaaaattaattcctccaactccccttttcttaaagctctttgagctgaaagttcagaagaaagaaccccttcttgctcaacggcatcaatgttagctatttcatttgagtaaaaaaaccggtccaatttcttacacacaggtgactcttgcatgtttgaccaagtgaaaggggtgttctgtaaaggggggtcaactaattcgcaatcttttctaaatccaccaatgtccctcatgctagaagttaaactagaggctcccaatttttttgaaattctccttataacattaaaatcaccgcccacacaccataaaggaaaagaaaggctaaaaatgtctaatagctccacacagaaatccttcctaagtaaggaattgtttgggccataaactgagaacagccacaggggtccacatccatccaacaaaaacttgcttgagactgaaaaggagcctattaacacctcctcaccggacagtttctttgagtcccaaataatcaaaatcccacctgaagccccgcacgttggaagagtagcccactccttattcctaaccgactagacactactaacaaaccttctgtcacacacctccctttttgtttcctgaaacatcacaacatccagattttgaagccgtaaaaaatctttaaccacccttcattttttcctagatcccaaacccctagtattccaactaatgattttcatggataaacctctctaaccctaaacctccataccagttccaacaggtctcaaataccagtggagaatttgttcttccgcctagaatacaccttaatatccagagaatttaagacctcacgaactttagccattttgttgggagaaaagccttctatttggaacccacccaaaggggaaaactcagctttaccctggctaactgtaaccaggttgggggcctcaataggcgtgctgggcatggtcttaagggagttaataccctcaaacatttggttcagacgagctaattgggactccacaacatctaggttaggattgccaacagaatcttgacataaagcaccatcgtcaatttttttgaaaaacatttcaaaaataacttgagatttcgtaggatactgagactgaattactgaattgagaagaatgggatcagaaggactcagaggtggaagtgccaagccaagggaggggaggggggtgaggggaattgacaaagaagagtgagaatgtggagaataagatacctcaaagttttccactacgatcattccacgagtccccacagagttgagccctttttctctggttactggattagaaggaaaaaccgtgactgaagagccatgatgaacaaaacccttgaaacccttagagcctgctctttcttcaatgttagaggatttgcacaatttctccttcccctttgaaagtatagaagccttaagagaagacctttgttgattatccgtgtctcctcttgtcgacgaagctcctttccccgaacaactttttcagaaccctgacaatctactgaaagtaagaggactcgcactaaaccttcgtttcgtctgtgttcctgcttcgaaagcatcgtcctttggaggagcaacaaaatcagaagctggaatctcatacgttagaggctcgcttcgactttgaactccttgtcagcctctagaaattggaggaataagagtagtccatagcttctttgaaccgaacttcattgaggaacccctcaactgagaaacagagacctctgacattgccttcccctttcccgatacagaggagtcttctctgcttaaagagcccttctcagaaatgggctgttttcgtcacatttcttggcccaacatcggtaacaggccttctaaattcacacccctttcccaacccaaatttgcttccaccagtggtctgggtttatgaggagattgggcccttctctcttgcattgcattagaggcccaataccacttctcatcatttgagtgggccttgtcccctccggcccaaacttcaccaacctgctttggcccaataggtcctattctctgtttatttgaattcgaattgaacgaaaaggagggttggaaccagctgttccccacttccgttcttctcttgccatgtgtccccatggaaacttcttcaatcttttgactttctccaccctctttcattctgccagttgccccaacagaagaccgtcctttagtcgttgatttagctttcacaaccagccttctgccacctgtccacgagtgaggctcataatcctcccgagttgactcatctatttctctacctcgcttatcgtcttcaactccaaccattgcaactaaaattgtaaaaacccatcccccatctaacacctcaatcaatgcgagaagaacttaccattccttcattaaaattctcacccttgccttatgaagatcatacaatttcaacattcgccagttgatctttatcactatcccccactgatccacaattttctttagatgttgcttagaccataaatgaaagggcaatccccataattcaatccatcctcctctgaacttccccacgatttctgaattttcccttggcggccaccttctcaaatgggttgtataccctcccttaatcttgagaaaccttaaatcttggagagagaaagcttcctctatagtttctacaaaaaataaaccttttctgccaaagaaagggacgatagtcaccacacctttttgccctaatcttttcgccagagcacggccaacctcagcccagttaacaaaatcagcggggcatttgcacaccacatctctcgcccatctcccaactggaacaaggcctcctctcctcggtccttcctccctgactaaattcgcgaaggaccagtacaagggacctacatgtttgtgatttatgctttcatccctgcactgccttcccttttcatctatattcgaggagggaccacttgcattgaagacaactcattttttagttgctcccatcccttgcccttcacgccctcaggtattaccaggaaagttgactttctgttggaggcaaactccaaaagccttataaacctaccatggttgttgaagcatacctccattaaatgaactctggattttcctctgtattttctgttgaaacccatgtaactctttagctcgatggcctttgtcaaatgttcaatcaaccagccagcctcttccttctcaaagcccaaggtgaaaacaaagcctttactgtgctctgtaagcgagcaccaaataccaccggactcaccttcaaacctaaccaagaaggtcttcctctccacagagaccttcaacgtcctcaccattctctctctagtattttgtgtatatgtataatcttgttcctttcagtttcctgaagtggttgtttttttttttgtttttttcaggtctggtaggtcatctataa

SEQ ID NO: 11796 - DNA, 9238 bp, Vitis vinifera
  Intron number 18 from transcript GSVIVT01008744001 (locus GSVIVG01008744001) derived from phytozome v7.0 (chr-ID chr 18; pos 1634126 to 1643363 reverse strand)
ttccactgctagagtgctttacatctatagcacaggtatgctgtactttttgttaataggacagtattgtacttagtcttgtttaacacactatataatctgatatgatattatattctttcaattgaggaaaaatgtgtgcattgttcaaaactagaaaggcctgaaacctacttcccttgttggaaagcaagttctctctctctctccccctctccaagtgtatcaatctgttagcctgtacaatttactgtgagttgtattttaacattcactgagtggtccagcaacaaactgctgtacttgtgatagttgtccttttttgtagttttcctttccatttcattttttgtttgggggctgcgatattccaaaatcaagtgctctggaggttcattgattggtccacagttgtgatgttgatatgtgtgagctgtggaaggcctgttttccagaaatgcattcagccacaaagagcagttaaggatggaggaattacaaaatgcaccataagcttgccattcagattggtgctgtgcacccattatattgaattcttaaattggggtactgttcatgcacaaatgttttgagagtggcttaggttcattttgtggcatatctttagtaggaaattttagtttttgagaattagaaaatagcttctcactaaatggtggttctgtataactaagaaatagaaactgatttttcctaagtagcaattttattaattagattaaataagggtgaggggagacgaggaaaccctgaaatttaaacaagttaacaaaggtagatgggacccaaaacaaactgcaagcctgaaatgagctcacaaacaacctgagacaattgaatatttaaatataatgcctaacctacttttatcacccctgaaaattaccaacccactccagaaataacagcctagccttttttcttgacagtgaacaatttagatcttttttttttcttttttctttttttatgcaaattccctttcatggaaaggagttagctttcttagcatcttattgttaggaccaaaagccttaatgtgccaatctgaacgaaggtcggagtgagaatctggaaacaattaagaaaccacaaagtatgcacaaacaaggggttgagttttcatgctcaaattggcaatggagaaggaagtcatctggtgaataatcagagctgaagctagtagtttccagtctggattccctaactgtcttatattaagcttttcaatgcttaagatcctattctgcgcgattgtctagattaagaggtaattttggatggaaggactcaaggtgatgtttgattcaaggatggagtcttggggatggtattccatcacattctgcctactccaaggcttggtcattcatttgttttggagatctaatgggtttagagtcccataaaatagctgggttagaaacccatctaggacatgggttttgtgaaaacccttgctaggtaatacttttatataaatttaaaatgatgagcgtattttctcaaattagaagaacatacaaaattaattacaacttcatctctttataaggtaaattaattccaatgccatctttgaagaagataaaatcaatgaataatatgaaatgcaactttatctttcctaagtaaattcaatcatcatcacatctatttataaatacaattatattaaaaatttgatattatgaaatataagaatgtgaaataataaaaaaatttgtaaacaaccatctattattgaaagaatttgatgaattttagtagactttcaaccttttctccaatatcttaaaggaatctcaatttgatatttttttagaataaacgttatcatcatcgtcataaatgttatctttggaagagtgagtgagaaaacaattagctgatcatatcttctttcattgtgctaaaagatggacagtttgtcgtttctatgttgcatgtgtttgggtatgagtgtcaaatgcggtaatatgtcttaagcgttgaatccttcacaactcaaattttaggatataaggacttgactaaaaaagataaaaaaacggtgacgggtactaggacacgacatgataagagaaaaatcaattaaaaataaattggaagtaaagatattctttttaaaaactctcatatttttctctaattttttccctcttatttgtatatattctttaaaaaaatcactttttagctaactttactttttctctaatgtaactattactaagaaagttgaaagaataaaaatatatcaatgacaaaataaatgagtattcaacaatgatcccatgcctacattcatgtcatgttgtattaacacaggtacgttggtgaaattgaaggatccgagtatcataggtgccatttattttttttctttgttttatatggagtagatgttgccttatatggttacagaggcccttctaagttagcaagggcctttttgtcacgaagaaagagaaaaatgtgtggaagctgatatattatgcttattttggaccatttgaaaggaaaaaaatacttattgtttgataatttggaaatgtttaatcaaaataccaaaaaatttgtttgaaaaaatcaaatagccatacccaaaataaaataggagtatttgacaaaaatcccatactcactcatttcatgttgtgttgacacgggtatgatcggtgatattgaagggtcaagtatcagaggtgctatttgattttttctttgttttacatggagtggatgttgcctgttatggatacaaaagtccttctaagttagcaagggcctatttgtggtgaaaaaacggaaaaaaaagtggaagactgatatatagtacttattttggaccatttgaaagaaaagaaattacatattgtttgaaatttgaaaatattgaatcaagctaccaaaaattcatttttgtgttttttttttactctaggctaggatgtttatagatgaggatttgatgtatatattaatttaattgagtggttttgtattgcttgataagggagtgattttttatctcgtctttttctatgtcatttgacaacctttatatactatcgtgcatcttagtatgtcattttttgttaggcactagtaatatatttttgtttgtctataaaataacaatattatcattgttgttgttgttactattttgataaaacaggtttaaatgtttgtgaaatgaataataatctctaaaatcctaggtttttaacctttgttggatagtctattctacaagttttctaaaatatatgtgcatgtgtatatatgtaggcagaaactctatttttattctttgttttttcactttttccttttccaaaatataggcatttcaaactcaaaataagagttgattttctttgatttattatggatattataatgttcttattttataattttatacatattttgagtattagttattacaatggtggttgattttttaaaattaaagattttttaataaatagactttgtaaatgttatgattttattataatatgatatttttctttctatgattttttgaaagtttgttgtataccatacatatgtatgtgtattaatttgaagaatattatttgaaattttgtgtgggtttaatttgaatatttttcattcccattttagtatttagtttgtgtaggaatggaaatcaggacattctacttgcttgcaaagcatacttgggacaatatgggcttgcccctctattctacactacttaaatatggggaagactcaaactttggacctttggttcattgccacctctagttcattgtgagagggtactattgctaagctgcaccttagggtaaactgtcttataactttgatttatattgtttccaagtaccaaaatgagaataattgattcctagatttctctattctaagcatggataatctattcacattacttattctcatgaacctcaaggccttagagtcacattcaccaacttggtggttttcctcatcatgcttcgcacgttgaaactattgaactacttgagaaaatggagttatttccatccaaacctcaaagattttgagcaggaaaagcaatatcttaaagtttttaattagccattgaatcttatatttattggtggatgacccattctatattaggtattggaaagtccatgcccttacatttatatgcatcttagtgaataggtgattttgattttaagtccctttgaatgagagtgggcccctaaaaagaaacccttttccttttggaatggggggttgttgtgggtaacagggtatatgttttgaaatgtacaagtaattgttttgactttaatagtgtgaatacctacttgaaaatttggacattgaattagttgaataatgtttttcatgaggccaaatataaattcctattagaaatgaaattgttaaacatttattgactagatttgatatttgaagttctcttttcaatcttaagtgaattttatatcctcaaaattttaattttggccaattttagcttgatatacacctgatgctcaatttcttaagctcttaggttttaaaattaaattaactataaagaaaaaggtgatgcactttttgtttatttttctttctaattttaatcatattagtctctaaattgctcattttcatttcccaaaaagaaaaaaaaaactcatggaaatggtcttgcttgtgagaatttcatggcattgttctatttaggtctaggttgaaaacatttgacaaatccatttagtaagttatcaactataacaagtttgtgaaacttttagaaacatagggggaggagggttgtccttgtaggtagaacaagcgtgtttggtctaggacaattgaaggaaaacactctaaccatattcacagttcaattgagtccacttggtcaagttaagttaactttccaagttttagtatcatggtattgtgcataaacgtgtgtactattaattttattcttaatataaaattataaaatcaacaaacaaaaattttgaaattattatgcaataattgagatcttcatttacatggaggttgaataaagaatgtcattgaaaatcgtgtgaaaaataaaaatttctcattgataatattttaaatatattttaattttattgttttgcaaggaggtccaccataaggttaaataagtaattttatagtgtaatgactacatagagaaatggagggaagagaatctttgcatccaagtatctaaccttacatatatattttagagttcattgattggttcgggaaagcataggctatagcttgggacaggcctgaggccctgacgatagcttatcaccaagctatagcttgtgcattccccaaacaatcaatgaattctagaacatctataagattagatacttggatgcaaagattttcttccctttttattgtttggcacccgataaaaggaccttaacctagcatgcctaagttgtaagcctatactttccccaatcaatcaatgaactctagaaaagtgagattctccatcaccaaagaatccattatagtacaaacaaagattttttgggagactttttcaaagtttgagcaaagctcttattatcatcaaacatcctttcatttttctttctacatgctccaaaacaaaaacaaggggtcatctcccattcttttcagcatcacctatccccagagtgactatgctgactaagtaaaaaatccttaaatcattcttgaaagcacccatacaattttgaacaataatatatcgaaaaccttcaatgaatatagttggttgactccgtgcacttgcacttgcacaaataacatctattcattgattaggagccaacctctcctcataagctggttaggcatcaaaatattctagttaagtaaagaactagtcattagcaatgctataagctctacattttcttcggagaaaaggaccttgagccactcggagataaagatataaaatgatttaatagaaaaaacaaccatttttagtacaactctacattaacctatcctccttattcactatctctacctaaatgcttttgtggaacactccattgcctttagcttccggacttgagaactctacaaaaaataagggtttcaatggccctttccaccctcttctcagcctataaatctgtgatcatagcattcttgtgagaacaattctaataaaaggaaaaaaaccaaaaaaaaaaaaaaaaaaaaactctcaatgggagctctcttcaccatatgtgaaaccaaaacctaaacctctagaaccatttttttctttcaaaaacaaattcattgcatcaaaattagtaagtatgaagataggtgataattccttccaagatttactaaaaaatgatacaaaaggaaacgtgtctataccactcccaagaaaaaaaaaacactacatgcatcttaataaggtaaaagaattaaatacaatctagaaccatgttgcacagctttagggggtgtggggttggggtaaaaatgccctttatgaaagatactaattgcttggctaaatgatctgctactcggttacctcagccatagacatcccttaaaatacgtgtcgtgggagaaaagtcattcttcttgcctttgatgactttctaaagacctaatccataaacctctctcgttttcaagagcaccgactctctcccttttctccaaagttccccacatgtctaaacatgtacttccaaaccctctttccctttgaccaaatacacacttccctagggatcacaatcttttattgcaatataactcattaaatcttttaataatcttttggagcaatattttgctcataaaaggttcatagtctaggtcaacaaaaataatgttatacaccttcaatctacaatgtcacaatgcattatgaccttgtaggtcattgagactgatatttgagaatgaacttagaatgcttcagatacgtcctccactaaacctagacaaactagaacaattctgattatggctcaaagttgctttaaaactgcttcaagcactatgcgaatgtaactagcgttgtcactttgtttaaagttagtaatacatggttcaatgctcattttagaggtgacttgtggtccaaaaatagaaagtttttgaaatggaatataaatgaacttaaattttggaaatacatggaaattacgagcttgctagatgcaaacaataaaacatagaacataatatggaaacgtggttatgaaaaatattaactaaaatttccatttgttaaaggaaaagtgttttgtacagttacctattgttaatgatttttctatttttctattattttttgaatgacgatagcatagaagtgcacgtgttacatgatgaaaaaaaaatcttgataccaatttgatagattttggattgctcatactagaaccagattagagttggaaaatagaagaagtgttaagttctgacaggatggtttgtgtggtgactcacctttgagagtttctttcctctccctatattctcctgcagcttcaaaatgcatggattgcagagatttcagaggtttcaggcggtcatgggcaaatcacaatccttgtttctcaagatggttccatgattgggagttataaagtgttaagggcttgcttaaaagacttaaagaggggaaaggcttagagaaggcggagataggtgaaggatgttaacgacgggaagttctttttttgatctgtttattatgccttataattaggagatagggtggttttttcttcaaaggaagcttggggttcttaggccccttccaaggtgcacttctttagtggggaggtagcttgggttgggattctaaccttagatcatctgcaaagaacaggacttttcgaaatcgttgttgcttgtgcaagagttcaaagtaaatagctaatcatatccctactcattgttggaaagcaaaggcattgtggcatcttttgctctttctttgggctcccttgggtgttcctatttttggtgagaaaggcccttctagaggagagttcaaaggagtgtgccccacatgcttgttttgggccatatgtcattaaaataattgtggatcctttgatggaatgagcatttggatcaatttctcaaaggttccctcaactctatgttcttcctatggcttcattggttattgatgattccttgtccttgttggactctattgattgtttagtatctaggtaatgggttgggatcagccgtgccgccaacattcagcagagggcctaataatcacaaatggacagaagaattagaagttggtgaataaaaatggattcaacatgtatagacctaaaaagggacttattgaactgtctggtcctatctggttttagtttttatgcactgaatatatttcagatgtattaatcttagttttactatcttttttattctgtagaaatagtttatcatgtgtttgcccatgttttctctctttccatgatgcaatgcgaatgcagaactttgcaagggaataagctgcaccttagctttttacaagaataccagaaaatgcagagaaattttggatcaattcaaaaagctttgttttttgttggtgagaagcaagacaagaagagtccagggaaacgaagcaccatttcaaaatcttgtttatttatcctatctaatttctattttttagtattaatttcatgctaagggttgtggggtttgtttccactttgcctctagaaccccacaacatttctggggcagaaaaagaaaaaaataaaattcttaataactgcattcttttcatatataatatacaaatttgattcatacatgtcagagagacggtacatattgttcattttcttatgactgctagttttacatcctgcccctctctagttgtgtttttaagtacatgattttttttatcaattatttgaagagacatatatagttgattttcgtaattcctgctagttttagttcctgcccttctatagctgtgcttttaagtacatgattttttcatcaaatatttaaagtacagaaaagatattgagttacaatactacaaaatctatcctcacttctcactgtatcatgtttatttggctggcccttgttttactttccaggcattaggtactgggttttcgcaatttgctgaacc

SEQ ID NO: 11797 - DNA, 2610 bp, Vitis vinifera
  Intron number 3 from transcript GSVIVT01029939001 (locus G SVIVG01029939001) derived from phytozome v7.0 (chr-ID chr8 ; pos 1786621 to 1789230 reverse strand)
aagagaggtgactggctttgcccaaggtaagtcctctgtaatttgttttgaatattttctgtactaaactacctgctatgttcttggcctaggtttgtagaaggcaccatcttctgccatagcctctaaggaatttgacatcaattcataaagagttgaagtcaagttgagggtgattagaatagtgttgagctttgatggttcatactttgacacataaagccaaattcatatagttgtgttaaggcttgttggttttagttctgcttctattttaattattttggtttctttagagtgtgatagtgcaaaaataacctttgtctaaactccttttaatttctgaaatactagcatccaagttgcatgtgatgttgcaatgttgtgatacgtatgcaattgcaggtcttgctgctaatacctacatgatacaatgatgttaaagattactggaaactaaaagctccatagttcaaagctgcatgcaggatttccttaacagaccaattcatataattaggaaaagaaaaaaattacttcagcaagtgaattgtaagcgatcaaattgttgatcacatattatttttagtttgctaataaaaaaaattgcaccctgacatttcctttttatttccagagtttagatataattaaatgatcttcttatttaagatatattaagatatgtttctttttcccgtttctctttcccccctctcaatcttgtttgaatatgaagctattttggatatttatgcatctcattctttagatgtatctgtcagtttttttttttttttgatttttttttttaatttgattgtgtttctgggaatttctctttgaattagaacttttagtgttggtgaatttgagaatacttctgcctcctgccccattaactgccctaataaaaagattaaaaaaacactactttaccaaatataaagaaaaaaaaagttgcgctttcccgcaaagttccatccttatgcgcttaaaaaagaaaaggaatttctattcttctcatctgtctcctcaatccacttctctttttgcttgtttatgtttatcaatattttgtgtctcaatatcttgctggatgtgagtattagtttgtctttgtttttatttatttttgataggtaatggtgtttgtatgtctttattgctcaataaaaaatgacttaccgtttcaaaatttttcatctcatttaagtatgaagttattcagctaatcatggttttttttctcttgatgcagcttttacttttcaaattctttgtttgtgtttctctttgaattaagattttattgtggtagtgaatttgcttacttttgtccacatgattgatgctgtttcattttgtgataagaggatgatgctgtttcatgctgcactgagttcttctatttcatcttctttttgctaaaacttctctgcatattcttctcctttttgcatgaaaagtaatgccattaatgctgtatttgctaaaactaaagaacttgagataagtagaaatgatgatagtaagaaagcatatcttgacaagtttctctttaaattgggactgttgtgctagtgaatttgaccaatctttgttatatgactggtgctattttatttgacttacagtaattacagatatgattagataaagtaattacagatgactaggtaagtaatctgaatgaaacctatattttaaaatgtagtattgggatagactgaatatggtttaatttaataaattacagagaaaattagtattttattgaataacttatttgatttatttattcaataaagtataatatgcatataaaagtatttcttggttttaaaaaacaaataaaagaaattatactgtatttttgacaataaatgcccatcatgtgttccatgagctagtagtaaccatatgatgggagagacccctgggagaagtcataattagtgatggttatggaaaattttgaatgtgttggagtaatgacctcatattttaatgtcatgaatttgtcctccatcaaatttgtttgataggcttaacaggtattttgagccagcttattaatgtaatagcaaagataggtgtatttttgaataactgcacttggtttcctaaaaataagttgaactgtgaaattctctatggcaaactggagaaagtaggtgaggaaagaactgattgaattaccgtgaaactcatttctaataaataattattctcgatgttcacaaactctgtttagtgttgttaaaatcaaaagcatgtaaaataaaagtatgtatttaggacatgagtaggctttctttctaaaacctggcttctgctagtgagggtagaccacactgaagtcttcacttaatataatgggttttaatgatatttattgcctgagttccttgctgagtttacttgtacttgttgtcataggtattcctatcaaactcatttctcttttttctttttctttgtagcttggttgcctgtttattattataccgttttcttgctactcccaggacttgcatctcctggcatgtgagatcctctctgataaataacattttcatttcattttttttccttttcattgagcag

SEQ ID NO: 11798 - DNA, 2695 bp, Vitis vinifera
  Intron number 3 from transcript GSVIVT01001361001 (locus G SVIVG01001361001) derived from phytozome v7.0 (chr-ID chr1 3; pos 23973214 to 23975908)
aatttaaaactgcacttcttcaacgcttagagagggtaagcactgttgttaagatactcataatctcgtaacataagaatgagcagtttagatgaacaaaactattattcttgtggttttaaggccaaaatttaagtataattattatttaaggcattcatgttgagtagggaaatgtcctcacttgtgaagtgagaaacgtccaattattagatcaataaatcataaagaaaaattagtaagcaaaaacagttgtttctttttgtgtaatcaatttgttattgacaatagttttaatacccttgtttcagtaagaacttttgttccagccttttcagaagtttctatacctcttcatttctatgataggtggcatcaatcatttggtcctttggctttgatatgattatttcttttaaatgcaacattgatattttctattttttctgataaaatgtcatggttaggtgtttttttaaaggaaaaataagttcattgtgctaacataccctttcagaaagcctttttctattgtaagtttttgtttttccctttctgtttcttttatggcctaaactatttatgcctttctagaggataatttgggaatcaaagaaagaagagaagaaagagacttgtttgagtagtctccttatggaagttgaatatttggggttgcaaaaaagaaagtagaagaagaagagaaagggagttgagcaacagatgttgtctctgagcctccacttgtttataaaccgcatctgtgtttaaattgaacttattgtcttttttgaaaacaacatcattatttatcaaaattttctgtgcaattagatcccaaaatttataccctttcataacttttcttcatatcccataaaaatgcattatttggagtttggttccatcattaactgctatgacccctgcacacaaacatggacctggcaagaaaatcttctcaaactggagtagttaaccagtttttctgtcacaaatctctctagagatctttgtgttggtaatcaaagatggtgaactattgacatcatagcatgccatattaacagccttagacaataatgattttggcaagcctacacatatcatcatatctctagctcatgatcattctttctgctataccattttgttatagcttacctggtgtagtatagtgtttagtgctccctttgccttcataaaatttcctaaattcattgagtttatatccagctcaaaatgccatgagctgctgggccgtgattctcaccaacaaataaaatttcttcctttgacctgtgaaaatgtatactctggagtttcccatctccctcctgagtggcaacatgggggcaagaaaaggaaagagggatggggtttctctcgcttttggcatagcggtccctcagtgggaggcctgcactgcacaatgggctattagctcaatggtagaacacaactctgataattgtgtcgttgtgcctgggctgtgacaatggaaacacctaaaagttctacttcactctttgctctatatggagtgcatctaatatggcagtgttttagcttttaaggttgagatgctaactttactagaaagcttgattctggcatcctcattagttgttagtgatctcttggtggagaggagtcttgatgataatactttcatggatgtttccaggtaggagatggctgtggagaatttattgctgtattccacaaattgttttatctttctagaaggttgggatggtcctctcctttaaagctataggctttcagagaggagaactgatttatctggcagtttgtagaggattcctcccccttaagtgttgttaggttttgtttgggattttggagtttggtcacttgtttctgggagttgccttttttacttgcacactttattttgtttttgctgatctttttgtagatgtctcatccttctttgtattttcttctcatagataataatattttccagtttcctattgtggtagttgcttttttttttttttgttgttgttattgtacatagttctatgatttggggttcaaaggatgagccttactacagagaagttgagttagagaggcagaattcttcccagttgatgctgtgtgtgcataagaaagatggagagatagcaagtcaccttttataccaatgagatatctcataggagttgcatctcttttcctaaatatctctgaggtgcagtggttgatgctgaggtcagattgagagtttttggtttgtcatgaatggtttatggtaaaatggagaaaatcagttgggtgactggtggtccctattctctcttttggtgcatgaagaaagaatgctacaagcagctaaaggaatcaagcttcaatccttatgttcaaatccttatttttacattctttgtttttttggggtttggtatcaactggttggagtaatgagtttttcttggattttgtacatgacctattttgtagttgattctgctagttccatttctgaggttgatcctgtttactctggatatacaaggcttatgcttcccttttcttctggttgacattaatagttcatattagaagcaaagatagaaggaaagaagttgtctctatagttatgagggtccatgtttggaagtgtgatataagatagttcatcctttctattcttcccaggaaa

SEQ ID NO: 11799 - DNA, 6348 bp, Vitis vinifera
  Intron number 2 from transcript GSVIVT01012172001 (locus G SVIVG01012172001) derived from phytozome v7.0 (chr-ID chr1 ; pos 785681 to 792028)
aaaagatacccaaaggagggttttaataaattctttagggtatggaatttagtttatctttgaataatttgaggctctatggtttatatatattttttataatcaaatttaattacacatctggagacgcgatgatttgaactcacgatctctttaaaatcaaaatttgatagtattttaacttataaatttcaccgataatctaaattattaagtaaatatctcattttcagaagataaaaattttcgatatttataaaagtatttcatctaatacatatataatgtattttaaaaccatgaaattttgggtcaaaatgtattgttaagtaaagatatatgcttagatttttatttttcttttgaaagggtggagatagatgtagtaattgacttgatagtttattgaaatataccttaatgaacattttgacaatgtaaaaactttaaatgttctctaatttttttaattaaaaaattaccctctttcttcgaaaaaaattgaaagaatttattaaaaaaaaaaagaagataacaatattaattagcatgtcagtccatgaaagttgaaaggatctattcatctttgcaatgcaggtaaacaattaatttggtatgatgataactttaataattcttttaattctttttgtacttttattttttgcccttttgcaccttaacaaattactactcccatccccgtgtgtacggacgccacaccacttttggtgggggtcctggggggaccatgcgtccatgacattgccattgtaaaatttagtacatcataaaagtaaatttattaaaactatttttttattttttattttaaattaatgaatacatttgtttttagattttttttaattgttaatattagagttgggtggatgctcaagtcaggataacccaatctgatcaaatcaaattaaagatcgagggaaagcaatttttagagttaaaatcgttataaactaccaaaacaccatactaataaataataaataaaaaatctcttaagaaagatcgagagaattcaagaaataaaagtctttagtcaaacaaaatgaaagacttttatattataaaatgaaacgattctcaattttattatgctctcatttatgactttggatgaagaattaaatggtgaaataactatttttggatcatattttgaaaatataagccaaagttatcatatagttaaagtgatcatattaagattaataaaataatattttatttttccaaatttgacttgtttttataaaaagtgattttaaggcacaaaaaatatttttatttttttaaagcatacatgttctctcaaatggactcatttttttaatataatatttattttctaatggtacttttgtggatcataaaaaatattggaaaaaaaaaatccaaagttttttatttgatttattgtgaatttttttttaaaataaacatagtaaaattatttaaaaatcatatattttcaaattcaatctagaaaaacataaaaaaaatctagacaacaatctaagaaaaatctatcctaattttgacttttctttttctttttttcatttttgcccttcatgtttctttctctctatttcccctcagattttccatcaatccaaacagagtctttaagatccaacccaatattgacattgaatttaagaatcatatataaaattaaattcaatcaccaactgaaaaacaattggggtcacctatttcttaaatccacaggtgaggttgcattcacaaaattaattgtaaaacaaggtggaagacactattgaatgcctcaaaagggttagctcccagatattgcatgtgaattattttgaaggagagagagtgtcacctccattaaaaggaattaattttcatccaaagccaaaaatgtgaccacacccaaatacctagggctatatcaagtgtggccttttgtggcaagccatggtctatgaaacaataatacccattcaaattttatttcatattttacacctcacaaataaataaataaataaatcaaaccaccttattttatttttatttttatttttacttttattggtgtgattgattttattttatttttggtcaacttgtgggtaggagggcatggagtagggggcatgagtggagagctttcatcatacaaaatgtgccaattccaaataatgatcttatctccctttgcaatttaactttaaataatttaagatttacatattgatattgcacgtcatgtatgaaataggcatcaaaatttatacacaaaggaggtggaacttaatttacatatttataaattaattaaaaatagttttatccacttattctctaagagaatactacacatttatgttttcttttaaattattgttcaaaatatttttaaaaaaatttaaagcatgtcaaatttgttttaaaaatatttttttttattaatttgttattggagttacaaaactaattttacacaattattttaaaaattaaacaatggataaggttagtttctattgaaatattttttaaaattatttttaaaaatattttattacaataatagtttatttgagaacctagaatgtcattatatttatttttgtctttttaattttttttaaaaataattttatgtgtaatataaatatttatatttataaaattattttttaaaatagcccctttgaaataattgaaaataattagaaaaaaagtgttaaaaaaaaaaaaaaatatcaaacttgttttagtggacgagaacaaaaacccgtttttaaaagtagttacgaacttacgaaagaggttcttgattttcttcaggtccacgagtcggagtaataccaaagttctcactagggtagttccgtcaattctcgctctctcaagcaagggcaactcagattgtccgtacaattcgaaccactgcggcgcgaattcctcaaatcccgatgtggatctgtgtccacgaatctcgggcttccatgacatccaaagcccctttatttccccaaaattacggaaacaccaccgcaaatgcagtctgactaaactacccctcttgggggcccactcccgtctcatctcgttgatatcctatcgtctcgtggttcctagatatgggagcatctactttttcgagaaagacactgaaaactatttttatttttttattttaaccagaaatatgttttttttaaggtagatggaggagagattgtctagcgtatggcagactcacatgttaattatgttatattatagtgggaggaataatctgttgtgtcaggcgtacagtaatttgcataggaccccgttcgtaggcagtgttatgtatgtcaaattgaatcagtgtcttatccatcattctttcatttttattctcttggaaatagttacgttttctttgttgtttcatatttctaatttatcgaattgcgtaacaatgaagtgttgcttgatggttccatttatatatatatatatatatacgatttgattggtccccaattccatatgtcacccatcaatattgttatgggtcaagatggactattatttttaatactcactttagtttgagttaatttttttcaatccaatcttgattgggtttggcctcgtattaaattttggataactttagtctaatttgatttgatatttttttaagaatatttttaatatatatatatcattttatatatattatattcatttttttagatattttaaaaaagtttcaaattatcatcatctattttttttcttcaaaaaagatatatataattttttttattatcttaaaattttgctttatttactattttaattttcaaatcaaatttttttttaaatattataaatatttttaaaattatataactcaattgactcaaagttaatttaaacttagataaataatatttgattagacactttgaattaaatattagattgaattgaatttaagttatttattttttaatttgagttaaactcaagttaaccgttaatatgacatattcttaaatcaatgtaagttataattgaaagactggttttaaccacaaaatttagtgtaaatatacaaatgtatttaatatattttaaaattttaaattaatttgtaaagaattgttaaacgtacttatttatttattttacccaaactctctctaaaaaataaattgtataaatataataaatttataaaggtactaatttaagaaaatttaaaattaaacgatggattttatgtatttataccaaatctcacaaaatatgattgaaattaaacacatagttaaattttttttttaaataaatttttggtttggataaaagaattaatgtttttttagtttatatcatttttaaaattcaattcatattaacaggaaactaaatttaatttaagtctcattaaaaataaaaaataattaggttaacatttaaatttaaattatttttgaaaattattttactcattgatgaattcaatatattaaatgagtgaattgaaatttacgtaagaaaatttgaaaatatatgattggtctgtttttaagttttaaattatttatgtgagaatttgataaagttacttaaaattttgaacaatttttttccatttggtccgtttttaaattttaaattatttttaaaattaataaatcttatcaattaagtttttcttatacatgaagaatttaggtaaggaaagataaacaacaataaaaattcttatttcttaattcaaaattttaaaagtttttatttatcctcaaacacagttggaaaaaaacattattcatttgccaattttattttatttttctctttttcaaacatttgtttagttatgggatgacagggtaaatttgtaattttaaattgatggtcaacggcagtacgacgttgtatatgcggcaggtgatacactacgcccgattcacgtgcctttttatgtgggaccacatcttgaagtgagaaaaatcagcagctgccgcttccacggtcgttacaatgttgctgcaatcttattatatttttattataatattaataattaataataatataatatcaagaatacattttagagtatttacataaaacatttttcatatttcgtgaataataaaaatttttaagtattaaaaatattaaattttttaaaaattgttatcaaatgaactttaaaacgaattaaaagtaattttagaaaaataagatatattttgtaaagcatgttttatacaaattaaatatctgatcaatttttaaaaattatttttaaaattcaaagagaattacttaaattgattattaaataattattttttaaaatcattttatattaccaaccccattttcacaattattatacaatgctctttaaaatatattcttgaaaaaaaatgctaaaagtaattttttttttttgtagaaataaatttttgttttgaaactcaaaggtccaaaggtttttttttttttttttgaaaacatttagcagaggaaaaaaaaaaatgaaaaaaattcaaccccacttatcccattatcaaaattagtgggctctgccaaaggttgggttgactgttgagtcgaccgggtcaaggtgcgtcccttccattgtggtggatggccgacacgaggcgacagaagccatgcccgtaactccctcacgccttctgaaacccataaaccttccagtttcttcgctaatcagaagctttaattcatggtcttcaccttcagcctccataagaaacgcttcttcttcttcttctccttacaaagtcttacaagtgtactctcagctccaccgccaatctcgaccttttgacagcttctccatactcttcaccatcaagtcctgcgcccatttgcggaacctcccactctttggacacctccacgcccatcttctcaaactgggcttcaattcccatgtctacgtcgccacttgtcttctccatacgtattctctcgcttcgttgcatgacgcctgtgtcctgttcgatgaaatgcctcataaaaacaccgttacctggaacaccatgatcacggcctattcgaaatctggggacgttaagaaggcgcgtctcgtgtttgagcaaatgcccttgagggacctcgcttcgtggtctgccatggtcgctgggtacatgtatggtggcgagtggcatagtgggttggcgctttttcgagagatggtggtgaatgaggggctgagacctgataaagtgacactggggtcggttttatcgggctgcgcccggatgggttcgcttgggttgttggtggggaggtcaattc

SEQ ID NO: 11800 - DNA, 6232 bp, Vitis vinifera
  Intron number 11 from transcript GSVIVT01011573001 (locus GSVIVG01011573001) derived from phytozome v7.0 (chr-ID chr 1; pos 6346895 to 6353126)
atattttcaaaaaccgtagtcctccttgacttcaaatatgctgttgttgatgcctgttggtgtgtgtgggtgtgttgtgtggataagatgctttttcttctatgcaccattacttttgtaatgaaaaccacaaaatgagattagttggggtttcaaataaatgaaaataatgcttacatgaggatagggtgcatagggtgtcaaagttttacttaacatggaacaaattacagtattggcagaggccaaaatgaggctgtagagtgacaatggggccctttagtgagtaaaatgaaaattctgtgtttctttggctgtcagaatccaacttagctgtagcatatgttggttaattgtttctcctgactaatgtatttatgttaaaaaagttccttgacattttctccagaatttcttgatagagcttttcattttttgattggatgtgatgtattgaatgattttgtgaagttgttaaacagagaattaataagttcttgttgacttggaagaggttgcaaggagaatccaatacactttgaatgctgcatatctgtgtaaatatgatgcttgtttatgggactgaaacccttcctcacatatggccccatagccacatgtgggagacaaatcaacagcaacggtggataggccccatggccgcacatgatgggatgacaaatctgtagcagcagttgataaatagatagcatgttccacgtacctgcttgtggggagacaaatcaatagcagcagtagataggccccagaccctgaggtgatggggagatcatatcattgtagtaatagataaatagataggtaggtgatggtgagacaaatcaatcgtggtagtagataaatagatgaggcctatagttgtaggagagactctaacttgagacttgtagtcctgataccatgttaagctaacaactttcctagaagtttaagctgttaggttatgaaaccacagtacatatcatactaattgttccaaaaatgacgagtacagaattttattgaccccttggaaaactcagtcaatatattcctttcctctccattaatattatgtggaaccatatcaaaatattaaaagtttggataattattgaattggatattttacttgaatggttatattcccacagctgttcagtctttaaatagtcaaatcttggatttttgatctcttctctaaatgatgggcatttttggggtttcaattttgaatgcaatggcaaagagagtctttttattttttatttttcctttttcctttttgaattttcttattttttaaaaaaattctttttcaaatgagagaatgcaaacaaacagagttggccaatgcctccttaaaaaggctgaaaaaatatttatagttaaattttattgagtaatccaagggtttggaccttttgtcgcaatgctgtgtattttagatattcctttttaagttatatttaggatttgaaaatatttattttctaatgatttcttgttgtgagaaggttttatttatttattgttatttataggcaaagtttctttcttcttaatttctattttcaaaaatttcgatcttatgttttaattccattgtttagaaggtttaaaagttctagagaaaagaaataaggtcttaggaggctacgagtatgttagtttttttctttttaatgactttattgagtttttaaagtttttatttatttttatagcctattaatgaagctaattgatataaaaggaaaacaacatgaatgatgagaccttttgcaaattttattagtgaaatttcaattatattctcttttatgtaagacacctagaaagtcttagtgaaacttaaggtttatttctctttcttctatttaattgtgagattccattattcttgcttctaggtgatataaattagaagacattggtgagattataaggtttttctttcttctctttcttcttcgtggatgtactttcttgtgtcataaccctttcacattctcctccacaaatcctgatagggtaaaggcctagtccaccatggtttaattgcaagtgctaccttggcattgtcctacataatgtcacctccttttttagtcatttctcctatggattcattaataggcatggccaatggctttgtagagttatgcttctaatctctgttccttttatttggaaagtaagaaagagaatacttgaaaattatttagtggagtgagaaattttttttgaagaaaggtactttaaggcctcctagaagaaatcaccctttgcatttcatatccatcccttgtatggagagaaataattgaagagaagtcgcatatgaaagtggaatcagatatgtgaagggaaaagtattttcaagtgctttgatcatgggagacgtgccaaattaagggagactttatgagatggcttttatttgatttgttgttcagggtacaaaagttgagtagtcaagcatcgataaagttagtgcagccaaatggaatattgagatgcattgttggaaagataagaatgattagaagaagagattaatttatttacaagaagagaaagctgtggtggaaaacggcttccatgatcctttgtgccttttcacaatatgacatattaatatatgtaataatcgaaagaagttaataaagtaaaaatatttgtatatttttataatattaacaaaatatgtataaatgtgtaataacaaaaaacaatacattaaacaatgagaactatgttagtgtcaaatgatcgattcatcaaaaaaaaatgttagtgtcaaatgatctaataatttccattgtcaatgctatcgtgcctacataattaatttaaataattttttaaagttaaaaagataaataatgaaataagttgaattgaaaaatatataaaaataaaatattttttggagggttcccttgctatatgtattatggacattatgaaaggagacgaaccaaatatatttaaaaaatagagaaatgtctgattaagcattaaaacttacttttctttgtaattttttgttgtaggctaggttatatattgatggggagtccctaactatcatagatttttgtagattgatttgggtcctcatgaaggggattttgtttttgttgccctttttgttttttgttttttttttcattctagcatccgttgtatacagcttgtgttctttggtgtgcttttgctcaacgttgttttttttttttttgatagattcctttgctcaacgttgttaatataatttctttattttcctatcaaaaagataaaaataaaatattgaaagcataagagagggattagggttaggatttattgagaaagaaaaaaaccagaaaaagaaaaaatggtagactaaaatgtgaaagatggaaaataaaagattgatatgaatgtgagaatgtgaaatgcattttggcatttgcagcgagggaccagattcttctttttttcttgttattttttattcaatgatttgatataaaaaaaaaaagaaaaaaaaaaaaagaggtgggggggagatgttgaagggatatcctgaaataaaaatggatgaacggaaggtgaatggaaaatacaaggtggattttgagttagagactggtttttttgttatattgattgaataagggaagttttatttattttattattattgttattttaatttgatgtttgaaatgagcagagtttatgatcaattaatttttatcattaaataaagtgataatgtggcttaataagagaccttgaggatcaggaggcttttttcacttgagataatcatatacaacatgtggtggtttgctaagtgctaatatggtttcttcatgtgttacaaagactaataggtagattagttccaggctgtgaaaaaacaaatgaaaacagcgttaggaactgtttagttggaaactatatgtatgtctgcagcgactaagtggatcaagcccaggaggttcaatttggtggtgcatcatgtgacaaccacttttatgtttgttgctgtatggctatttgcctagtcttgagcccatcatggattgattcctctcatgggaagacttgtgatgttttcgtgagcagagatgtagctacccatgtatttgtcttgtgagtatgtgatcttgaaggggagcagctccacataagctcagtgtactaagtgaagatcagttggaaattatagatcatctatttgtgtatggtaatttgtgggagattgatcttgaattgtttcttgtggcaaaccaactgttgttttttgatgagttggtatttttttcatcccttgaatttgagaggacaaagaaaacctaggtgcattatataatatggtgcacttagaagcacctggttgatatctggttatatttgatgagggtaaaggacagattggaatctgttataatatttgaaatatcgattttccttcccattaatatctcgtgcccttcaattttctttttgggttaatagaaattgaattctcttttcctatcttgtgacataaagtcattttctgtttaaattgagtttactgcataaatttggcacttatggaactttagggaattttggaaccacatcaatataaatgtttttttttttttaattgactttggattaaaatttgattttccagccagtgaaactatttcataaaagaggtttaattgtatttcagatgttccgatgattgtctttcaaaactgacttacattgctttaaatttcatttaaaaatgtatggagtgggggtttggaaggagattatgaaggaagctaagtggtgttgggagaacataaagtttaaggtagggaaagggaccagagtaaaattctggtttgaccagtggtgtgggaatgagaggctgtcccattcttttccccagctttatgagatggcggtcaacaagaatgcaacggttaatgagatgtgggatcatagcagtggtcaaggaggttggaatcttagatttcatagacttcaatgattgggagctggacttgattagaggattgcttattatgctcagggacttcaagttatcttcagaggaggacgtggtgctttggaaaggaagggggggggggggggcatgggaagtatggggtgaagggtgcctataacgggctggttgttatcaatgcttgcgactttccgtatagaggcgtttgggtggacaaggtcccaaccaaagcggctttttttgcttgggaagccgcgtgggggaagattctcaccttggataggcttcaaaaacggggttggcagtttcctaactgatgtttttagtgtgactgtgaagaggagagtgtgaatcacattctattacattgtatagtggtaagggccttatgggaaatcgtctttgcccttgtgggggttcagtgggtgttcccagagttggtgaaggaggcgttattcagttggaggggtctctttgtggggaaaaagaggaaaaaaatttggaattctatcccgttgtgtattttttggacggtatggaaggaaaggaatatgttagctttcaagggaggggtgttaaatatacagaaactcaaaaattcttttgtttgtaccttgtggagttgggctagggtgtatattggagaggagtcctcttcactcttaggttttttggagtggctagcggccacttaagggagggtaagggtgtttgttttttgtgctctcgttttgaggctgatttgtatacgtcctgtatgcttggtggcctttgccctttaatatatttgtgttatctatcaaaaaaaaaaaaatttcatttaaaaatgtcaaaatatgattgtagatgaactctttttgtgtggtgtagttaggctgttcttatctaagatctaggtttttggtcaataatttcattgtgtaataatgatgctacttcctatgttcttcggatagagtaagagtaagtaacattgtctttaagcatgatctaatgcttcttttaagatattctagagagagaaaagtttacctaaaattaacctttgatgtgtgttattctctaatatttatttcagctttcttattgccgaaagcaaagataattttattatactagttcttccatgttctttcccttatacaaaccaagatcacttattttgattcttcaaaatttaatggaatcctgtgatcctactacttctgttccaggaaattc

SEQ ID NO: 11801 - DNA, 4254 bp, Vitis vinifera
  Intron number 3 from transcript GSVIVT01030187001 (locus G SVIVG01030187001) derived from phytozome v7.0 (chr-ID chr8 ; pos 10715338 to 10719591 reverse strand)
tgttgagggtcctaacttcttggcagcattctgctgtgactgaaccaccgttcctcaggaaagaactgcattggtgaaggtgttgttcatctgataacatattagggcttattcagctgccagtgctgcaaccaccgccatgcagataaacatcattgcccctgccaactcaagcgctctagaactggccatcatgagtgactggctgttctgcccaaaaacttttagcaccgaaagagaaatgcaggcttagacgtttggatgctgatgaaaatgctgtgagctttggttgtttctataggagcaagtgtgagggtatgcaattgcttagcttaatgctctgatacttctttaccgtgcccggatctgtgtttttctttctctggctggttttcgtttgtgagaaaaattgacgtccaactccttgatcaaaactaaggaattgttctaagttaaaaaatatcagacaagtaacccaaaataaacacctcgtatggttaggatagagaagcagttctttaagatgaggaatgattatgatctgaaactgagatgaatgggaaaggagccaaacagttgatcctgcttgaagaaaatgaatcacgtgtgttaattccaatgataacagggcttactcaaccataaactccagatctctgagtgttttagattgggtttagaccccattgcgctgtattggttctaagtccaatctaacctgataggccttatatgattgaatattcatttccaaagctttaatttattcagcaatgtggcagtgagagaaaagaaaggcaaataaatcggttagctctttgtggaagtcctgctttcgaaattgatcagagtattgtaggatttccttgacagataatatgccttcacgtcataaaactaaaagtattacgttgctccgcatttatttagaagcaacccatcaaatgtttttttattgacagatttaatagcattatttttataaatttttaaaaaacaagagacatttgtacccaatatcaaagaacaaatttgccaagcagttcaaaacaattaccttctctgttgctcagtatatttatgtaacaaaatgctacaagctttggtggtagagagcgcgcaatctaagtgcattatgctgccagccatgggaatgaggtggggttgtgagtctaagtggttgtgccccattgtgagtgtcgtagttggcaatttcgggcaactaagagctcacgagcggtctcttaatttgggtctatcaaatccttcctccgattatttgtctaataaagaactttgaggcgttgaaggtatttagagactaaggtatgtagttaaggtagtggaggggcaaaattaaatcaatcgggattttcaaaatagtgaaaatcctttaaagaagttttaggagacttgggtagcttttgtgtttttttttaactacgtatttttgtgctttgttccaagattgatccaggatcaatctatctactgttgtattattttttagtcattagattaaggttttccttcctatttaaatccaaaaccttcattttagggttgaggctccaatagttgtcacacacaaccattgtactcctctcccattctgagtatgagtgtgtttgtttcccaagaaactcctatccattttgaagtttacaacaatttttgattgaggtttttttaaagtatggactaattcttttggttctttcatccattctctctttagggttattgggttgaagtaaatcctattttcgtcttgtgtgaacttaagaagaggtcaagattaaatttaatgtggactttaagtatgttttgaaaggaaaaaaaaacagataaatgaagtggaaaagtatcagtcaagtgattcaagaaggattgacggacttgagttaggtaaaatcttataacagttgttactatttatagtggatgttttttttatcatttatagatccatggtttttaatttctttaaagatcttctatgttaaatcttggtgtcattgctttattctttctatttctttattagttaatttttccatatttatcttgactaagaaaataactttgttttgataagtggattagtagataatttgagctaaaatttgtttgtgtaatctttgaaattgttagataatttttaacttggtttttgtttgaagtaaatggtatttagatttgtttcaaaaatagtaggaagttaatgaaaattctgttactttacttgctgagagcgtgctaatgcattcaattttacatgtctcaacttgtctattgaaaagaatcaaaacatgaaattttaattgatgatcttttttaagttatttttttaaactcaataagaacttttatacttattgggtttattttgttaaaggaatttataatttttaaaaaattaaatatgaaaattaagaaaatattacttttcacattacctttattttaatttatgttaaaaggtttacatttaataaaactatataatatcaatattattctttaaaaattatgatattagttttaggtgtaacttccccttaaaattaaacacaagaagctatacaaaaagaactttcatttcacaaccttgtttatttttatataaaaatcaatttccttgaaaaatgcacaaaaatgaagaaaagactgtttggtaggcatgctaatctagaccttggaaatgataaatgtatacacccgaattgggagctacatttattagtttcgtacataaatgtgtggcacaaaattccccatgattcctattctttggttgacccccaatcacactacgaggtagcaaatattaatgtatttggaggtaaaattataacctaaaaaggcttttatctccgatgaatacgaggactgaatttacagtaaaattaacaaggcatccttctgataaccttgctttcataactttttttttttttcttttcaaaattcttttcaaatgcatattttcaaacttaacagaggagtatggtcactttctaaccccacgtcccaagtctctaactacatgattttgatacttgtcttacatggggtttgttttttgaaatgatggaaaaaactaaaatattttatttcttccgataagttaaaagtaatatactaatatctatcaatataactaaagtaatttgttgataagagaattatcactttctaacttcatgtctttagtttctaactatatgatttcaattttgaggtgtttgttttttggttgaataaaaaaaaaactaaaatatttgatttttttatattaaatatttgatttttttatattaaaaaagtaataatataaatcaatataactaaaataaacttattaacaaaagtattgccactttttaatttcgtctccttagtctctaattacataatttcaatatttgtattaggtaatgtttgttttttagttgaatataaaaaatcgaaatatttgattatttttattaagttaaaagtaatatgttgatattaacaataactaaattgaatttatttttatattgattgatatcaatatgttatttttaactgaatagaaaaaattaaatattttgattttttctattcaattaaaaaataaaccccatcttaaattaaaagtatttttaagttgtttttatgcatcttttctaataaaggccttactctattccatacttttggtctggaatagcggcctttgatagtgccggcaataatgttcctctagttgtcccgaatagtcaagttatattttcgagttcgatataaacaactagttactaggaatttcgctaccttaggacaggtagagttactgccgccgtttaccggggcttccattcaaagcttataacacttctccttccgaccttctagcaccggggaggggaatgatccttagaagttgtcgctcgatcgaaaggatataacacatacgaaaccttagcttcactgactttctaaggtataaccttcgccacgacattgggctcatggtaaaagccccctttggaattaccacaccaagctgaattatgagggagttaccttctaaaggctagaatcaagcttgtttagaaaatcattttatatttaacataatttgtgcaatgccccttctaaaatattaaatttttttttactttgatttgagattataattatgactaattaaagctagtcagctcacatggacatcagtcattttcaatattatttgatagc

SEQ ID NO: 11802 - DNA, 1808 bp, Vitis vinifera
  Intron number 2 from transcript GSVIVT01014426001 (locus G SVIVG01014426001) derived from phytozome v7.0 (chr-ID chr1 9; pos 3632477 to 3634284 reverse strand)
tggagacttgtgggggccttccgaaagcaccgcctgtaagtactttttctacgcttatcgtctttcgtgctctgtttggcttccgagaaatcggaggaaaacgttgaaaaagaaaaatcggaaaattttttactgtgtttttctcagcgaccaaacggaccattaggcctacgttgtttccattttttttttttttttttctgttactaagtttagcttctgttcggcattgcggatttgcggttgactttgtgatagatgtttcagggtgcaattatatcgaaaacttgcttgaaattttctttgaattaaatgttgatgattcatgaaatcctgatcatgttgcaatccatacctcgtttggctgttgacaaaatgtggaaaattaagaaaagcgaaagataacaacatccgcagaattgaatcgtgaaatcagacatgaaataaagctacagaatagtgtggtgaaatcaaacatcatggaaagttcgtattttgtttagattcggtcttggttgtggatggtactagacaggaagaaaaatggtattattatggtgttttggttgtgatttgggaaaattttcatgtgataaaaatgatttaacttctcactcgctatttaaagatatgaacaaagctggagaaacaatagcccattgaactaccaattataatttgaattaatttttcctcgattgattatggtttttctatttttccataattttgaaaatcaaagcaaaattgcttatagcttgtggattggacatgttttcaagatttattcgaaaggaatttagctggggtcggatatgttttcagtcatcatgaatttgatgacttatatgagaaggaattgaggttaaaatttttactgtcaatatcattgatttaagttccatgcaacatttagacaattccaatttgcacaacttaagcatgcttgcagagtctaaaagttgaataaatgaagagaacacagttggaacacttcaaagaatacaagactattctcataaaagattacaagtgtagctctttgctatacctcaagagaggccttcacctatttataggctccttgggacagattgccattaacactgaatgggcttacacaacttggaagaactttacacttctttgagaatgttttgacaatctctaacaagcttcaaaaagtgactttaactcgatgtggacagcatctaccttcatgcttcactataaatacaagcaatgacctcatttgaacagggcataacattcaactccaagccatcttcattattttgaggctaaaagattggtaaaacacaggagtcttagtgagacaatagtgttataatagcctaatgacccatctcttaggtaccaattttgctcaagcaataaattttgtaccttttgccttgttaagaagaagataattatatgtgctatctacgtgagttaggacctggttttgggatggtctttggtgtctcttgtaccaagtatgaagagtaatgctcatgtccaagttcaatcttaaaaaattaacatggaattataaattgtttagtttaagtcactttggtgtatggagcaagtcgtgactgtttgtttgtctgtgtatatactgtactcacatggatagacctggccacattcttgactagtcatttgttgttttgttatcgtattattagttttatgcatttctttgtgtttgtttattcgttggtgtgcccacaataaaaaatcattttcttgttttttctggaccaggtttactagaaaaaggaacccacttgatcatttta

SEQ ID NO: 11803 - DNA, 2571 bp, Vitis vinifera
  Intron number 3 from transcript GSVIVT01021381001 (locus G SVIVG01021381001) derived from phytozome v7.0 (chr-ID chr1 0; pos 4673233 to 4675803 reverse strand)
aattcgtccatttacagttcaggtatcatggccatgactaagtccattttatgcagatagtctttatcctattagtgatttacctctctaaatttattggacatatgcagctagttactttagcactaataacattctttctttcatgccatattaaaagtatttacaattatttattggtaatcaggggaacttagtatatagcagcttacatgttttaactcaaattattgatgtctctcataaatctaggacaactgaagaaacaagttcctgttcaagctagtattttatagcttatgatgtaacttttttttttttttgataggtatagctcatgaagtaagtaaaattcttgtatagtagacattcaaattttaaactcagttatgttcaattggctgttgacaattatacagtgatagctcttagacaaagcatacctgatttgtggactgactaatatggtgcctcgatattttattgtaatttgctactccaaaagtcccactgactgagattcaaacataaagtgcatagaattgagctattgcacgtcatttaattgatatttattgctctactcttaaaaagaaaatgattttccatgaatttgtggagtcccttctgctttcttctcacaaaagctcctgtgccgggtaacaaggatggacacaggtgccatcattgttatcagttagattgagataaccttttccttatgaagccttataaaccttctgataaaagtgttaataactggaaaataggatgaacatttatgggctttgtatcagattaaaccctataatggtctcatgaaggaaaaactcactttttatattagattaacacagtttactgagatattgctccaacacctcctctttcagaatattatctctcatatatgtagcattgaattcagttgtgatttatctctaaaaaaattgttgtaaaaaaactaagaatataacaagatagtttgattatatgtaagctactagaaaattgataatgccagttatcgaccaaaactttatcttctccataatgaacacttaaacatgaacataaaagttgaatggccttcaaattttaaatatgaaagtcgaacttcaataacttaaagttttttagttatgtggattttccctgccttgccaacttttaaggtggttattttttgttgcttcacaaattaggggtatcaaatgatgtctcctttcacaaatactaccatatcagtgaatatttaacccttttgtaacatattctacaatggccaaatgctttaccaaatcagaacatcctcaaagatctgacgcttcaaaaatgtgatttcctcggtgaaattgaaatttaaaaccttattgcaacactacctgtgatagtttgttgaaactatatcaaacacattgcgcctagacttgtttgacacttttatcctattaattcctgtactatggactgatatgaaatagttacagcttggagtgaggatcacttagaataatagatcaaagtcttgcagccacttacgacaaagaccagctttctgaaggaatcccagtgaacttccactgttatggaaaacatcaagcataatctgctaatgatgcaatacaccaaagaaaggtagagaaagcagttggtgaaacacttacaaaaataatacaaaataatcgttagtgaaacgttatcaaaccaaactaagaactaccaaatattatgtatggcataaggcatttctgcatcaagccatataacataaatgtagtagcttataaaacaacttcttataataaggcttataatctccactcaacaattaatctctgaaatttacactgtctagtttcccaatgaaagaagttcccagagcaacaacttcaaatccatctaaagctacagaaaacactatataactaatttgggtttttttcatggccccatgtagattcatggtaattctgttgtattatagtatgtgagtggcatgatagtccattaaacctgaatgctcttttgtttaattttgtttatcctttcgtataaagattcatctatataaattttaactagatttgtattattggctttgccatgcgagcttcatatggaagagtgagtagcttttgattgctatagataccatatatgctaaaagcaggtcttctcatgctctatgttttattttttattttgttattatttttaaattttgcatcccctgcctttgttcttatatatcattcttattataatattgagaaaacttgctacacttctaggcctgtaagaaagaatttatcttcttgggtgtatggttattttttttttttggatcagcaacataaatgtattaaatgtgactaaaaagtacatgagaaggctttgaagaatatcttcatacacgccaagaatcatcttgtaacattacctgagtccatgttaataataacattcctctttctcctttagatttttaatttgtattacaactgctttgaagaaaacacactctggttagtatgttcatgtggattttttttcccttgtgcatgtaga

SEQ ID NO: 11804 - DNA, 4371 bp, Vitis vinifera
  Intron number 3 from transcript GSVIVT01020899001 (locus G SVIVG01020899001) derived from phytozome v7.0 (chr-ID chr5 ; pos 17575493 to 17579863 reverse strand)
tattattattattattattattattattattattagtgatattattattattattattattattattattataagatattattattattattattaacggatattaatattgttattgttattaattttaattattattattattagtgatattattattattattattattattatcattattattattattattattattattaattttaattcttattattattattattattataagatattattattattattattaacatatattaatattgttattgttattaattttaattattattattattattattaattttaattcttattattattattattattattattattattattattattattattattaaaaatctatatcctcgcaacttaatttcctaaagttcatttcttcttattattattatattattattattatcattaattagaactttcgaaatcttattattattattattaattcaaactctcaaaatcttattattattattattattaattcaactttcaaaatcttattattattattattaattcaaactctcaaaatcttattattattattattattattaattcaactttcaaaatcttattattattattattattaattcacactttcaaaatcttattattattattattattattaattcaaactttcgaaatcttattattattattattattattattatcattaattagaactttcgaaatcttattattattattattattaattcaaactctcaaaatcttattattattattattattattaattcaactttcaaaatcttattagtattattattattattattattattattaattcaaactttcaacatcttattattattattattattacaaattcaactttcaaaagtctatggtctcgcagttcaatttcctaaagtccgtttctcattttctttaacaaattcaatttaattaccggagctctaatattttaaatttaattccaaatactccaattttcaaataaactccaataatatagttttcactcaaatagttttaatcccatttcagttcctaaataatcttctgatcttcttgattttacataagcaataatgattccttcataattctaaagcacgggatttgtgagattagctcatgaacaataaattgggttttattgggggccctatgtttgatccctttttgactgtcaattgtcgtgcttaatgtattttgcttgaacttcgttttgcactccgatatgcatgagctatgttttgtattcattaattgtgcactaatctcatttcttgatagcacatcgtggctcgtggccgaggtacgcatccactctcattctaatcaatctctattgcgtgttttgattctcatattgtgcatgatttaggtgagtatccattgactttctcgttgattgccacgtcagtttcattgtattagtagagacccaactttaaggatttagaggaatgttatggtttataccgtaccttcctgataagtaacctgacccccgagcccgatctggtttttcacagaccacctttttcaaaataaagagtcacgcttaaggttttctttcttattttgtttacccttttaaaaataaaacaaaaataagtggcgactccaagtcattttcttaatcaataaaatcatttttcgaataaaaagcgagctcgccatcgagtgggaaacgcatgagccgaaatacggggtccacatgtaccttaggcaaaacgtttcaaaattgacatattaatttacctaaataccttacgtaagtattggaaaggaaaagaaccgaaaaagataggtttttggggccaaaaggctgaaccagtcgaggcattggccaaccggctcaaccgaccagggaaccggttgatcggttgcccttgtccgatcaaggtctggtcgagaagtgtcaaaaacattttctctcatccagtaaccttcccttctcggttgaggtactctccttctcggtttaggtttggttgattgtgtttgtattttttgttattaatttgaatattttaggctaaaacctatagtaatttggacttattttaattaacgaaatttataagattaatttgaaatttaaattttggtttgaatatttgtttgggattttgtacatctttgaatatttacatttgggctatttttgtttttgcatgggtctattctacaattttgttggctgagtacaaatttatgacgcgtggagtatgaaatttcatggaagaaagtgagaataaaaaagttttaggaagacattgaacttgttgtaagcttatttgaatacaggttttatttcccaattttatttgattttatttttactagtttctataaatatttatttgtaaatatttattgagtgtttacaaaatcgaatttcgaacaaataagagattttgtttaaataaaaagaataattcagtaaatatgttttaataaaataataattttaaaatattcttctaagtaaaagaaagtttttattattaataaaaattcagaaaaatgcttttagaaaaatccaaaaaaatgtttttaatagcatttaaaaatttgttttttaataatcattgtctaaaaaattctttgtttagtaaaaaatgtccaaaaattgttttgtaaataaagttgtccaaaaatttaatttttatttaaaaattcttttgcaaataaagttatatatatatatatatgtgtgtgtatattgtataagtaacttttcttaaatgaaaacaaattcaaatacttttgtaaataaaattataaaagttcttttttttaaaaaaacaagtaaaaatattttttttgttgcaaaattgaaattttgtaataaattcttttgatacaataagtgtaaataaattttctaaaaattgaatacaaatgaaattgagaaaataaattgactttttttttgtaaataaataaattgaaatcactcattcaaaattgtttttaataaaatcctttgaaatttcttgaaaaaaaatatttttttaatatcttatttatttaaataaatcattttgcataattcttttgtcatttattttgtgtattcttttaattagatttcatcattatttttgtgtatattgatttttaccataattttatatgttatttttcttagtatacataattaattaattaattgtcacaattctcttaattcgtttagtagagaccgtatgtatgcgggattaaaggggtgttacaattcattaccatacatttccaataggtaacctgactcccgaacccaaattcggtttttcgcaaacctgtttttcatttaggagtcacatttagggtttttatttcttattttgtttttcccttaaaaaaataaaataaaactaagtgacgactccaagtctttttcaaaaaatcgaattttcaccaaataaatctcgccatcgaatggggacgcacgtgaaaaataccgagtccacagtttgatttttaaaaaatattaaaaaaataagaaaataatattaaggaatgtgattttcttatatttaaatacaaaaaaaaaattgaggaaataaaagaccaaacaaaaaaagatgaaaaattataataaatttcattttcctattttccttattcatattttaattgttgtctctttcaatttgtagacccccaaattgggatatatctaaatcattttttgcaattagtttttggccaagtgtcgcgctcttaggcagccacgtgtcactcccggattggctgttgaagattcagatgggcttttgaggaaccaatagaagcttgacagagagaaaagaaaagggatgaaaagaccgtgagaagaaaaacggttggggggctctgaagctgcggggggaggcagagctttctgggctggcggctagagagagatggattcaggaggagcagagagctttttctgccatctggaagagtgagcagaggggggggggggggggggggggggtcattttgaggtggcgagcagcagcagaggggcaagggtcttcctggttttagggagagagttttttttcagctgcggaggaggagctctgggctggtcgttggaggatatttgaggagagacttttgggggagaaagagcagtaaggaagccaacccatctggaaaaagaagaatgtcctcaggtatgaatattatggatttttccacttcgtttcaacttatctgtttttcttctctatctttgttgactattggatgctattagttgaatgggaatagaagtccaatgccatatgtgcatctcagctgagctttaga

SEQ ID NO: 11805 - DNA, 3560 bp, Vitis vinifera
  Intron number 6 from transcript GSVIVT01025783001 (locus G SVIVG01025783001) derived from phytozome v7.0 (chr-ID chr8 ; pos 11904437 to 11907996 reverse strand)
gaaattggtaatttgaagtctttgtcttggcctttcatttgaaacatttctttcttctctttctgtttctggaaccttgctaagtaatttctgcttgcaattttcatagtaattcactgtttgacagtgtcaaactgctcatggcttacatataaaaatctatgttatttggttccagaattccaggccttggaaccggtgcatagtttataaccatgaaacactaaattttcacaaaatggctaatacgcataggaggaggaattgtttggcaaaatcagaattaatggagctatatgaagagataaaggaaggcgtagttcaagcttttcacaaattgttgtctgttctagaagagtgtagatctagcatcaatgggatgtttttcaaagcctaaatagagagtgctaacgacctgaaagactttagaccaattagcttggtggatggtttgtacaaacttctaactaaggtgttggaaaataagttgaagagatagtgggaaagttggtttttgaatttcagaatgcttttgtagaggcaaggggaagagggaacatggccttattgtgattattttgtgattatgggagaaataaaatagaatagacttagttaaatgtagttgttggagttgcaaccatggttattaaaaagttacaatacacaatatgatagaatgatgcgatacatttttatggaaatcaatatgtatcataatttgtatcttatcattagtatatcctctgatacattttatgatacatggtacaatatgtgatacaacgatacaatgatacatacacttgtaactatttttcatattttaaaaaaaaattaaagaactattgtattaattgcttaaaaagtacaagtgaaattagaaattgatcataaattggagagaaaggtaaattaatcttacatgaatagctacattcttgttgtcaaaagtcatgttggaagtcaagtaaatttatccttataatgaatattggagaattcatttgaaggatttgaatattgacattaaaaatgatggtaattagtgaataaaaacttttacataatatattagtttttttccctggtgaggaaggaatgatgacaaacatgaaaagttggaattttgtggattttgtgatgaacctatatattaaactcatattttgttaaattgaactctcaaaacttaggtattcaatgtgtgcatatttttgctgtttattttacactatataaaacttatgatacatgatataaaaaaatagaaaaacaatacatgatatattttatgaattagcaactatggttgcaattgaaaaatattttttgaactccttatttgtgtggtcaagaagatccataggaatggaaactattcttaggaagttaattaatgtattgggctgtccttaaggcttaggaagtccttgcctttttcttttttgttttttctttgggtgattcatgtgaacctccagtgttcccgggatgggaataaatggcaatttataattctttttttttttttttgatagacgaaaacaaattgaattgataaaactccaaaatagggagtacaccttacttatacaggcagtatacaaagagagccaaaaaacaaggctacaaaaagaaagaaaaaaccttgagagctaaaaagctagccatcatgccaatcacccaaaaaattcaaaaaagagggaagagagggtctacatccaaaaactgttgagaccactctagaagagcctaaaaaaagaggttcctcaagtaggggtctgacatatcttcctctttgaacgttcttcagttttgctctccccaaatacaccaaaaaagacaaataggcgccaatctccaaactactctcctcttcttccttagccccttaactttccatttcaaaagcagatttctcactgaggccgggaacactcacgccagtacaaaaaaaaatagcagcaaagtccataactcccttgtcctaccacaatgaatcaaaatgtggtctgccgactcctcattgtctttacaaaggttgcacctgttgaccatggaccatcccctcttcattaacatgtctattgttaaaaattttccccaaactgcttcccaagcaaaaaaacgagttctaagaggggcatacgaaccccaaatctctttggctagaaataaaaggttattctcagcccttaaagacctataatatgatttgacattaaactttcccctcatctcggtcttccaaactaaggaatcctcccgaacctttactgaagaaatatgttccaaaaaacaagtttcctcctcctattcccaatcttggaaggatcttctaaagtgcacctcccaacacccgcctccacctccttgtcgcccccaaaggtcagccactacagcagaattatgggttgcaattctgaataatatagggaaaagatccttcagcttagaatccccaactcaaatgtccctccaaatctcgtgagtctaccatttccaatactgatactagttctaagaaggaaatcctcccaacctaatgtctttccaaaggcccatcccataagaattcctcacctctctagtggtccaaccctcttcctcctctccaaattttccaacaatgactttcctccaaaaactctccctttctagaggaaatctccaaagccattttcctagaaaagcttgattgaaaacctccaaatgccttggccccaaccctccatgcttcttatctttacaaataaccgaccaacttaccaagttaccaacttatcagcggtttataattctttagcctagtatttttacctagcaatgggaggataaaaatgttggatgtgaatgtcatatgaaagctaacttaggaattgaggttaaatgcattgtttcttcttctgttatcaaaagcaaatacctacttaggctaagggtgaatttgacaagaaactaacaaatgaaaggaggaaagggatacattggtattgttgtttttgttgtgattgtgtcatttttctccttatccattctatgtttcttttctttccattcatgaataattccttgtccttccctatgatctcccaacctattcctagtaaacttctgtttcccacaaagaaactttgagaatatatataaataatatgaaactggtttgttaaagaagtaatgaaggataagggttgtctacaaaatcttcttccgtgtattgatttattctttacctgaaaagtaaaaaaatggtgaagtataaggtggtatctacataaactagtatcatagttgacataacagaatagtttatggacttctttaataaatgtcaagtaaaatagaaatatttagaaccatatacaaagtaagaaaattagatgaatcaataatatttgtgttgcccacatgagtggctcaaatgcttactagttgaatgagattgttacattttgtctaatacagaatctatctttgttttctccaaatattgtatgcaggtctgataaaaaaacattatttgtgtgcaggtgtcccatctcctgggcaacgat

SEQ ID NO: 11806 - DNA, 6018 bp, Vitis vinifera
  Intron number 5 from transcript GSVIVT01024777001 (locus G SVIVG01024777001) derived from phytozome v7.0 (chr-ID chr6 ; pos 7037155 to 7043172)
tcggtcttaatttctggccatatattcttgaacaggtaatgagttagttcttagtatgtcaaacttttgtctgctttatctttgaaaatggtctctctacttcatgttgtagcttgatcaacttaccagatattatggttctttataaaagttaaaccttaattttgatctattgaattgtggatatgattaagagcctctttcaaaacaataaaaaactaataattgagatataatcatagttatttaaaacttaggctacctgataaaacacaacaatgcgataaaacatttttatgtaaaacatggtatgcatcttactattcattgaaatattttaactcttgtgatcttactatttttcataaagtagttataaattactccttacttcattcttctattataatatgatttacatatataagtaatttttttatatttatttttcaattttcattgtgtaaaaaaaaacttagaatacatggtattatgagatatatgatacacaaatgtagggaaaaaaaatacatgataaaactggggattttttagggtttttatatatgtataataaccaaatgtgggggaaaatgcatgatagagctaggctctatgattgaaaaatttgcatctctgtctgcttccaaacccaaatctctatttttcttaaagagaatacccttcctaagagtgaattttaggtatcggagaattctgtacgctgcttctagatgactttctcttggtgaatgcataaattggctaacaacacttaccacataggctatatccggtctagtaaaagagaagtatataagcctcccaactagccttggatacatacttcatactgcctcctttttatcattacctagcttgtgatttgcttcaatttgtgttttggctggcttacatcctagcatcccagtttcaataggaagattaataacatacttttgtgatataaaggtacctttctcgaatgagctaccttaatccccaaaaagtacttcaattttcctagatcttttatctcaaactttacaatgaggtgtctttttagttgttccatttcttccagatcatcaccaataactataatgtcatctacataaaaaattaaagcagtcacctttgctgaagacgagtgttaataaacaaggtatggtctccttaactctactgacacttcatcttcaacatagctttagtaaatcgtccaaactagcccctaggagattgcttgagtccataatgtgttcttaagttgttgcacatggttgttgtcgagattttcatccaatcctagtcctctaaatcaccatgtaagaaagtgttttgagatcaaactgctgcaaagaccaattaagattagctagccaatgacaataaaactcaaacatcattcattttacaactgaagcaaaggtttcttggtaatctagctcatatgtttgagtatagcccttggccaccaatctagatttaaatctttctagagttctagttgccttatatttcacaatgaactcctacttatacccaattggtctctccccttaggaagctcaacaacctcccatgtttgacttttttctagtgctctcatttcctcactcatatctttcctccagttctcatttctaagtacttattggacagtttttggaatatcaatgggatttaatttacataagagggctttatgagagggtgacaacctatcaaatgaaatgaagttggagataggatgttgagtagtgcatttttttattcctctcctaatggcgattgacaagtctaaatccttaaacataaaatgatcatcatggactaaatccttaaacataagatgatcatcatggataccatatgatcatcatgcataccatttgatcatcatggataccatcattttctagtatgttctcaccatttaaagaaggcaaattagaagggagcaatttagtacttgtcataggatccgagtcttggacttgctttgattcaagtcgtggttgtttctttcttgaatagacttgcaacagagcaataactggactaccaagtttctcacctttcatttgggacaaaagagtaggaattggtgtattaggagtgaacataggtttggattcagtaggtttaggcaggtcaagatcaaagaatgaacaattcttatcttttactataggctcctcttggggataaggttttgggaaaaaaggttgactttcaacataggttacatctatagaagtaaaaagaatttttttgatgataaatgataacatttgtaacctttctttgttgaagtgtaccccaaaaaaatacacttagtgctctaagatctagattgctgtgattttgtgcatagatgtgaacatctgagacacaatcgaacactttgggaggaatttggttgaaaccactaaactcaggaaagaattccaagaatgcctcataggagaaggatgatttaaaactcaagaaaatattttgtttataagggtgagcagctgttagtactgcttcccctcaataggagttaggcacattgttttgaaacaataaggctcttgtaatttccaaaaggtgcctattttttctctccactccctcattttatttgtggtgtatcactacaagatgagtaatgtataattccattttcttgaaaatatggggatagaattttattaaagtactctcgagcattgttagacgtcacattgtttatttaaacctcaaattgattattgatcattttgtgaaatataggaaacacactgctcatgcttgatttattttttaacaaattaagccaagtggctctagtgctgcaatcatcaatgaaagacacaaaccagcgagatccagaaacattaggaatacaagaaggaccctgcacatctttatgaatcaaagtgaatgggcaatatgatctattattaatcacaatggaaatgaggccctatgatgtttggccaactcacaaacttcacagtgaagcctattgatgtctaaactttcaaaaaacaatggaaacatttttttcaacaaagggaatggaggatgatctaatgtaagatgttgtagccaaatctagtctttatttgatgtggttttttcttaaaggtaagagagtggtagtttgttattggttccactactagcttcaagaaggtggagccctttctgttccctatcacatgcaatcttctttcctataacttggtcataaaacacacaatgagaaggaaaaaaatgtaacgttgcaatttagatcttttgtaatttgacagattgacaagaaattaattgataactttggcagatgtaaaacagacttcaagaatagagatagtggcagttttttttgtgccttgaccagccactttgatctttttattaccaggacaaggaatgtatgtgaaaaaattatgtgaagagtttgtcaaatggtctgtgtcaattacccaggagcttgagagacaatcttttgaatcacttagagcataagaatcactgtacttaactgagcgtgcccatgagcttgaagcacttggattttctaggaatgagaggggatttttgagtcgttcaatttcgtctttgttgaatccttcattttcttgtttgacatttttctcatgagaaaactcttcaaattgagccgcataagcttgttcaactaagctgtccagttcatgctttattctaaccacatgattggttctttccacgaagcttccagaaattctcctttgtgtgtcacaactttttgcagtcgttgcaccacaagccatctttgttgttgaaggtatggatgtttcagcttttccagattctgcaataagaccgatgctgttatttagcacccctcaagtggcagcctgcactccattgtttggtgaaagagatgacaggtgctgatccttctgcagagtgattatcacatcattgtctggcagccttcctctgctctgattatggagaaaacttcactcaatggtggtgaggattcccttccaaggacttgaaatccaatctgatcatattcaacattcagactagacaagacctaaaggattctctctctttccacaaatttctgtatcatagcagtgtcttcactgcacttcattttcaggttctgataatgatctaattccagccacaagtcctccatagtgttggaatattcaattgtagacatggttccctgtttggttgatgtgatttttgtcttagtttcataaatctaagtagcctcgctgatcttagagtatgttcgtcttatggcttcccaaatttctctagtcatggttaaaaacatgcaggtaccagttattgtcatttccaaagaattccaaagctatgatctgatcatgcagtcttcttcatcccaaatattaaatttaggattttcttggtcaggtgttggtctaataagatgactcagttttcctttgcccttgaggaagatttggaccaactgaaaccaaacaagatagtttctaccattcggctggaagcagcttggagattctggtattagcctgagtgtaattgttgagtgttcatgatttgaggggtggctgcttggctcattacttaagagatttctgatatggtgtgatagataaggatttgaaaaaataaataaatgaaagatcattcttcgtcagcagtaataagtgttgaacaattgcaaaaccctaccatgaagagccttcagctctgataccatgaggaaaaatgaattctgtatattgatttcaaagatgagtatatatatataagctacatggaagttagggaatttaatctgtagaatctgtcctgaagatcagaaagaaatatctcagaaaagaacatgaaccttcctaaaatacatcaattacatatcatcatgtaataaaaataatttgacctcctaaatgaatggaatacttaataaacttgccaacaacaataataagaatcttttttgcatatgaactggggattttttagggttttcagatctgtttctcttggattttgttgattttattggtaggtgttagctttgtcttggttctgttctcttttcttgcttcttggttcccattgcatacatcctatgcatttgtggagcaccccatcttgcttggtgtttttaatgaattctttttgcgtatcaaaaaataataagtaattatctaaggttctgattcttgtatcgatgggatttggttttgttttcttagtccttgtgattaaggcacttgggccttctgtttaactttctacttgtactagtgctctagaggtgcattttctttcaggtgaaaattggaataaacagaaacttgatgccagagttggctgtgcttactacttgaatcaatggacactacccattaccctcaagaatcaatgatctgggagatgagactcttagagcccatttgggagtgattttttagagagttagaagtgcttcctaatgtttgctagcgcttgcagaaattaggtgttctgtacacttttgaaaatcatttttaaaaacctggataacctcttaaaatgatctgggaggtgatccttccaattattatttttaaaaagcttataaattaaaagtcctttaatcaaaatcactccctaatgggttcttaatcgtctatactgttgtccaaaatttgtacctaaacaatcatatatagtaacatggaatctagggttttcaaacttcgtagtattgggctgggtaaccttgaatatagttgttaattcttgtcataatgcccatcgttatgtagacttgaactcgtattagcgtataggcatgtatctttgacacaacacatgagcatgtataaaatattattttgtatcaatgttcagttttttcatgtcttttagcaaacttaaggttctttatcaataatttcacctgattttattttattttattttctcatgttggcagttctttgacagaagcattttgtatagccatattgg

SEQ ID NO: 11807 - DNA, 10559 bp, Vitis vinifera
  Intron number 4 from transcript GSVIVT01018546001 (locus G SVIVG01018546001) derived from phytozome v7.0 (chr-ID chr1 6; pos 13550025 to 13560583 reverse strand)
cggtctccatcacccaactcaaggctttgttcgtatattactattccttaaaaactcaacatatgggaaaagggttcgttttgagtcacgaaaatgtttctaagaaaaatcattttcagttttgctgccaccaaaaaaaaaaaaagaatcattcaaccaactgctgatgaaaaccatgaactggctcatatctttcaaacgccatggtttaggctattcgatctggcaaatgattttttattctatacaaaattggccacgctcccaaatgttcattgattaagcctttcttaaagtataagtcactgcattgacaaaattatatcaattacttgatattgttattttgctctcagtttccgaaatgttcacttcttaaagtattaatactggtgaaggtgggttctgttaaagaaggagttcttctgaaccaagctagaattattcttttaaaggggatgagttcatgaacttggcactcaatataattgaccatctgccatgtacttagcattggacatcatttttgcgcattatcacctcttgggcaaatggccaatgtcatatgggtgctttgtattttaacttaattttgtgttattaggacatagtcgttgctgcaacagacacatcgtccaccacagtggagtgggcaatggcagaactgcttcaacacccacagacaatgcaaaaagcccaagaagaattggaaaaagtagtaggaaatgaaaacattgtagaagagtctcatctcttccaattgccctacttgggtgcagtcataaaggaaaccctccgtttgcatcccccgctgcccctcctagtcccacactctcctagtacgtcttgcatcatttccgggtacactatcccaaagggctcgcggatactcgtcaatgcatgggcaatgcaaagaaaccccgaggcctgggagcatccattggagtttataccagagaggttcttggaagatgctgctagtgccgactacaaaggcaacaatttcaactttttgccatttgggtcagggaggaggatttgtgctggcttacctctagctgaaaagatgctgctatatgttttggcttctcttttacattcctttgattggaaattacctgatgggaggacaagcgttgatttggaggagaggtttggaatcgttttgaagaaaactgagccacttctcgccattccaactgcaagattgtccaatttaggccattatgatccaagtgaaagaatattttaactatattagggcatatgtaatgtacttcggaatttctctaataaaagtttgtttctactctcataactagagagagagggagagcaatatacaaaccagaatccaatccgggttttaacaaatttttccaaacctgtctctagctcgtataagtttctctgaaacctcaccctattggctaggatgaacggatatcccaaaaaagctattaccattcctatttctgacagagctattcatagccccatgctctaaatctatgatctataagccccatataaagtaaccaaaatcaatgaactttcctttccctacttatttcaattaagatgttatagtatgtttatcacaataagactttttattggcatgtaaaagtaataagaaaggaatcattcaattagtaaatagaagattttttattttttttaacaaaaattcaactttaagttatgattatttttgtgaaaaacatgtttaaaatggataatcacaaaagtttagttgttattgcttaatagtttttaaagttatgtcagtatttgtaaataatttacaataaattatataactggattaagacaaggacatatttgaattcgtccttttgagttttaaaaaaatttcccaaaaccattcctaattactttaagcttctctcaaaccccgcctattagagacaagacaaataccaaaaaaatatagccattgccatctccatttttgacaaaatgattcatagctccttgctctaaacctatgatctataagccccatctcgtttacacttaaaaaaataaactctcccaagatctcttgtttgcatttttaattagccaatgaagaataagctagcataaagtgtaattttatgcaacatcaccattgtactctctcgttacgaaattttactaggaaaacttatcaaataagataggttggaggtgttaaagaaccgtaaagggtcacttaatataataagtatcctaaagggtaaggggaaaagtggaaaaaaaatcccccaaagaccatggaagaaaatatttgtcaaaaataccaaaaatgatcttcaattacataaagtaaataaataaataatcattataataataatatattggtgagatggaaagatgacaaaacataggactgcaacttgagcaggttgatggttaacccaaccctaatttgaattaagaaatgataaaccgaagtccaacccaacacaacctcatttctctaaactcaagttgagttcaggttggtcaggttagactcgagttaatgggattacataattcaaaatctatccttaatattcttaattttttaaaagaaaacttatatatttataataaaatttagatagtaaataagataataaaataatataataacaaatattaaaatataaaaagaaaataaatattattatataggataatatgtattataaatattataaaaatattgaatcaaatttgggttaaacttaagttatccaaaccccgacttgagaccaacccaaaatgagtttaggttgtaaaaacctaactcaagtccaacccaagtattgaaaatgatttttcaagtttgcgcaaatgttaaattgggtttgacttgggtcaaaccaacgtgtacaagttgtacccctattaaatcgtgattaaagttcttcctcaaagcaagcttgcattaaaacaattccatactcttccaatcttgtgctatttttttttttattgaaatattggattaattgttattatcttatttgaaactaaaggtaagctagctaagaaccttcctcacacacccatggtaatacccacactaatttcttattggatttttattattattattactattattattttagtatgagaaacaaagacgcttccttccttaaacttgcattattattattcttttatagtatgagggagcttcaatgtttttgttggatttcaatttttttgttgaaactcgaacataagtgaagaaccttcctcacgtatccttagtgacactcacactgatttcttattgggaattttttttctttttttttttggtatgggtatgagaaacaaagacgcttccatccacacacacacacagacaaagcatgattgaagccctctcctttaaagctacgtgtgtttgaataaacccaacaaagttcaaataggtccatgttatttacattttctatatatatatatatatatattttttgatgtggtatttaaaattttaaacacaaatattttgttgttgtaagaaacatggttttgttgtgtttaaaataatgctcgcaaagattttaagttcagtttcaatttctgttggtaggtagggtcaagttgttgagggggaaccccgcctctatagtaagtaaataaagcatagaaaaagtgcgctctatagctagctccaattgaagaggttgaggagaagagccgctaaagccctttttcactacgtaagcctcgggctagtgctttcaagcgaatagacaagtttggcatgtaccgaacctggcctcttttcctaagtcgacgagggagaagcttttcagttgattggcaatccaactgatgatagggacctaagcgcccattgtcttttatattagtagtccccttcttccgtcgcagcttacatgtgtccaatgctcttcgagactagaaatccacttttattaggttttctataacaatctaaatttttgaaaataaataaataaattgaggaaaatgtattttaaataatctatttttttataataaaataaaatttggataattttaaaattttatatttgatttttttcatttttattacatgtttatatttttttgactttgatttttttatattatcttttaatacattgagcggacaatgttaatatattgattgaagtcaaaatatgtgttctaataagatgtatatatatgatgtaatttatgcaatataaaaggttcaactaatccaaattaatttgatttttgttaaagccctaattaaggatctaacatatattttgagcttaagttcaagtttaagggaggaaaaagatgcaagttacaagagtccatttcaataaacgaagaaaaagaggtcaaatatgtctaagagagactcgagacttgagaaatatgatgaaagtcaatcaaaaaagacaagtcataagcatgaaacatgagtgatggattctatgaacatgtttggagaagatgaaatcacgtggaaacaagtctaaacaaaaatcaagaagggttgcaagatggttaaagattgaacgaaaccaactctgaatttgaattgaactttggagttcttaccaaggtcattttgggaaaaaataaataaaagtatttcaaagcttgagaatttaagaatccaaattaaatttccaacaattcacaaatcggattgaaataaagaagttacaaccaattgaatcaagttgtatagtagcagaatgtcaagttataatacatgttgaaaatttcgatcacaaggaatccaacaactatccaagtcaaaatgaagtcaaccatgtgtcaaaatgaatttgaccacatgtagaatttcaaaattccaacttgataaactagttatgagttttgcaacttcccatgtcgaaatccatgtcgagaatttctacaaataacttatttaatctaaaatcagctacaatccttctaattttgcaagttccgacacttctccaacccaaaatgggccccaagcatttggaaattacaattttattactttttaattattttagggagtttttggaaataagtggctaataggtgtcacatgttggattttcgcccaaattataaaaactcaacttttagatctttctaggagttcttgattttttttcttagagagaagaagataatttttgtttttcttctctattttcgttttctttaattttcaagaatagttctttattcttttttaatggattgtatatttgacaacacatccataaaaggttaaaaagtcatcttagagtgtaaaacatgaaaacctaatgttagagccaaaaggaaacaatgggtgcatgtgaaacttaataatgggttaaatgaatattaaggcattaacgtcaatattaaaataccctctagtgttagtttcaattgagagatggtacaattgcctattctttgatactaggaattgctagcaatttttaattcctagttatctaaggttttatcattaatatcctaaggcaaatatacaaaaggtggtagtagcttaaatccaagacttgaacccaaatttcatatttattcattaaacaggtaattcaaaatggaataaaatattaaaagtgaggatatgcaaccctaggttacaaaactcaagttgatcttgtttgaccatacattttgaatgtcacaatattaacaaaaatagataccattttttttttttaacctaaagccctaaatttgaagttggattgtggaaccccccaatcttgagttacttgaataagaaatcaattaattctcacattttaactaggcttatttagcaaaaccaaattgagttgaatcaattttatacattcttaatttagaagatcagataacaagtaatattttggacctagtttgacaaatcccatatatcaatccttggggaggatacccaaagtactacaaaagtcatggtgactttgtctctggttttctttactaaagttgctatataatttaggtttagtattttaaacaatggaaaatagtgatcaatgatatataaaaagatatttctaagactattaattttgctttaaattataaaaacaacacaaatgtgttatatttacaatataaatattcttacattatattacattacaacaagatctaatataaaaaatctgaattgttttataagactaacagttttatgtgattgtacaatataccttagcatgccttctaccataaatcaaccttaaaaaccaaacaaaatattaatttcaattcacaaggcttgtagcttcttttttttttttttttataaaaatcattaagcaacttcaaaagcattgaatgaatgatgctaacacactagtatgatgcatgagtaccaaatgtcaatagggtattaatagacatctctaaaactgttacttttgtcataaaaaataagtttaatacaaatactctacacttttaatataaatacaataacattatgatgtaacttaatttagaaagtttttaacttttttatgaattgatagttgtggattattgagctatactcattagtatgccttatgcatagtaaatacactttttaacaataggaaatattttcaattaatttttttttattattatcatgcatatgtatagtaatagaggtcatggtagacaattaaatattttatcttgatgagctattttgtggtgtttttttcaggcaagcttcttagatttggtgaattcatatcgggcattcaataatatagctatcatggcatcttcatgtgcatcatttaggattactggaaataatggaagaagaggtgaatatctaatatataataattgtatgtacaaaaaatgaatgaagaggtcagtcctattttaacaaaattaagttaatgtaatacactataaatatgtagttggagatctatgtactaaagttttgtatttaccttttgtgtgttgtatattgttaatggtaatatgttgtaaggtttttagcctatcaaattatagttacaatataaatctactaacattacaatgtaaaaatatagcaagtacgatgcattacaaatgaccaaatttcaagttattcaatattttctttcaaacaaacacttggttatagttgcatttccttgcaaaagtcattaaatagacaatacaaggaatagtagtcaatgaattgacatcaatatagagcaaccttaatcatcttaagtaaccaaaatttccaacaatatccaaacaatgaggtatgcataagttatcctaagtcataatcaactaggaaaatatgtatatataaaaaatttgtagcaagatagttaacacaaacttctagcttgcattcaatagtaactatacaatttttaaaaaaaataatatgactagcatctattaactatcaaattacatgaagaaaaacatgtcacaaatattaaaacaacctaattctttttttcctaagtatttgactttttggtatgataatcaatttatattaacttctttctctgaagatacaacaaattattggactacccaatgactaagagaacaataaggcaaaattttacaagcatataaatggagtacaacgaattcattaacatgcaaattattccaacattattcatcttcaaacaatcccaatgaaccctcaataaagcaccatagactttatgtgttctctatacactaataaatggtatcccaaacttcattactatcgaacattataagttgtgttagaagctttaccctatattttgtccttatcttatcccagaaattacaagaaaacatttcttggttattatcagttgatactttcccaaaaaatactcaattgtttcttaaaaaacctatatgtcttgtcaattcaaagtcgtacttcatttgtcttctaagattggtttatagcacaaagcatggtagagagcatagcacaataacccatcattttcagttttgtacaaaagttcaaaactttataaattaattcatgtattgtaatgtgagtgtacttatgttgtaatttgtgtagtgtatttttattgtatcaaacttttataattaaaataatggtgttagggatgcctttttacacctattggcactctagttatgtcctctaaaccatcctctatattcccacctcctacatcttcccctatccttgtctcatctctctaagtcctcttcactttctttatccctaccacctccacccttgactgctcaaacccatcctataataacttattcctacaacatcttcaaacccaaataggtcaaccttaccactaagcatcctcttcctgattctattgagcctagttgtgtatctcaggttactaaggatcctctttaacgttgtgcaatagaagatgagcttaatgctcttctacacaatcagacatgggatcctgtgccttctcatccttatcaaaatgttatgggttgcaaatgggtatttcacattaaaggaattttgatggtagtataactcattataaggctcgcttgattgcaaagggatttcatcaatgactaagacttgactaccatgaaacatttggcccagtggttaaacctaccaccattggcactatacaaagtatttctttggctcatggttggcctattcatcaacttgatgttaatgatgcctttttacatggcactttaactgaagaagtatttatgtagcaaactccttgctttatagacaccacacatccttcttctatttgccaacttcgtaagaggctctacaatcttaaacaagcccctcatttgtggtacaatgagattaaggagttcatgctttcctatgggtttgggaactcttgggctgatacttctttctttgtttgtaatgctttgggtaacacaacatatttttttatgtatgttgatgacttactgttacaagaaatcatgatgacttcattcagtcgtttttacatattctttctatgaagttctctatcaaagacttgggtgcactccattatttccttggcactgaagctatctctacacccattggttttttcctgacatagcacagatatattcttgatttgtttactcaaaccaatttatgtggagccaaagaagttagcattccaatcaccttgtctccaccactaactgagaatggtatggatctttttccactaatgcaacctattacaaaagttttttagtgcattacaatatctatccttaacttgatcgatcaaatatctcttatacaatcaacaagcttgcacagttcatgcattagcccatgggcctgcactagtaaattattaagcatctactatgatatcccaaaggcaccatgtatcatagcctctttctcaaaatgaaatcaacctcttgccctcatttcattttttgatgttggctaggctagcaataagggtgatttctcttccaccactaccttcattgtttactttggtggtaatgcaatttcctagtgctcttataaacaaaaatctatagcccactcctctacaacggctgagtattgtgcccttaattgtttcccccgtcgctcaagctctatgggttcgttctcttctagttgaagttggtgtctcactacctcacatatctaccatctactatgacaatattggtgccacccacgtcggtcaatctggtatttcattatagaatgaaacacattgtccttgatattcagtttgttcatgatcatgttactaaaggggttctctgtgtcgttgcatctatttccaccaaagatcttagcagatgccctcactaaaccacttccccaccaacaattttctattctctaatccaagattggtatttccaatagaattaccatcttacgggggcatgatagaacacatcccactaatatctctcattacccttttcaatatatagagaccagtgcaatcccatatactgtggctgcatatcaccatatataattctatcctattaagaactttagtcagcattatcaaacccatatgatagggctgtatatttgtaccattcccttactatgtacaaattaataaagagaattcattcaatctggttgttgcatccattacccatctaattcatcctatttggtaattttccctttttattacccaacgcagtatgaacacaagtgtacgtaattttaagcaagtcttgattaggtgaacaatttcatatactatcatttagcctgattagctagcattgctcaagcaaaaatatatgcatggtcatcactgccatacacattctcaattacctttataatcactaaaacaatatatttccttatattttacaattgcaacaaggtgattgacacatatttcaggcttgcatggttccacagtaaactggggatagaataaatgtggcaaaacacacagatagatgttaactaaatcccaatattcgggagatcgaataaactaacatttacaatgaaaatgaagaaggaaaaaagagattaaaaataatttctttattaggac

SEQ ID NO: 11808 - DNA, 8935 bp, Vitis vinifera
  Intron number 8 from transcript GSVIVT01009087001 (locus G SVIVG01009087001) derived from phytozome v7.0 (chr-ID chr1 8; pos 4906235 to 4915169)
aatttcagaggcgcccaaaccctagagatcacgtaagtttacgtgctcagctcatgtgctttggtttataatatttccttaaaatcggagctatgcaatggttccattttatcatagctttcctttcttcatatttcttttctgataatcgtttttttattgtaactttaccttcttcatcctttgcgtctgatagttatagccttgtttgttgtagtatgcttagggttgaaaatattctaggtaaattgcaaaaatattaataaaagaagtttcaggattccaattttcttaaggaacttggacttttttcaaggattaatggggctgtgtatcttgctctattttatatttgtaacatcaaaccctttccaccaaaaaaaaaaaagaaaaaaaaaggaaagaaagaagtaatataagtccctttttaggcaatgatttagtttgttgattagcaatcaagatttataatgaatggaaacatggaaaaacttaagcatcctcttattgccaacatttgtctctcctatacaacttcccacgagcatggtggcatggaatgctaattggtttctttatttcttattttccttttttatttatttattggtaatatgggtgttataaagtgcatagaattttataattaatacctttcttgaaaggttattattatttaacagtattattatatagaaaatgagaattagaatactttctgaagagaattttatatatttcagtaaaataaaaaataatggaaataaatcggtgaaataggttgtgagggtgggttacttctgtcattagtcgggtttaggtttaagatttcaaactcgtgtaattgtgtaaacctgtgtaataagtgggttggctttgggttcagtacatgggtgttactattagtactttgctttaaactcaacagattgcccccacacttgataagtggtactgaacgactttttgaaaaatatgggatttaaggcaaacccatcagtctctggcatacattatcgaacttcagttttgattccttggctttttaagaggattgatagaaaacttcttttgaatagtttttgaaaaaatggtgcctctctactaccaatcgaaaaatgggtattgctcaaataccatttgaataataactgaaagtccaataaaaaacatccagatggggggtgaatgggtgatttaaaaattttaagaaatatttattaattataaccaactttttaccttaagagatattagagatgtccaaaataaatgaatggttataactagaatctttaggtatataaaaatatgatttttaacgtttaggataccctataatttgttaagaggtaatataattgttaatatctgaaatatctattgaggtatgttaggaataataaaatcatccagaataatcaacctaacaaactcaataacaacctaacaaatcaatctatccaacatcctcaaaattaatcccaacaattcaattaaactatataaataaaatatctacaagaataaatagatatgtatcttttaggaaaactctgtaagatgttaggaataatcaatctaacctattatagggaattcaaacaaaatataaaaaataaaagaatatagaaaatgagccacaagattttttatgtggaaaacccctgcaaattgtggaaataaaaaaccatgaggtctaagacctactaatttaaatccactattcgaaatctagttacatggatttacccagcctctctaccttaaagattactctccaatacctacaacttgatccacgtccgtgatgcaacaactctttgttactccttagtagatcatttggctactttgaaggaattacgatcttcaaccaacaattcaaagattcaaatccttgaatgatagatggggaatggtgtgcaattgagctttttctcaaggagtctctttcttaagaatgagaggtctctaaaatccaagatttctacaatctccaatctcttagctcaaatctctaaccctcaaagggttacaagagaagtctatataggcataagctaaaagagtcccggtatcttaagtttccaaattagagtttgagtgaaattcattcaaaatccgtttctaaactcagtaggactgacatgaccatttttgagtggcccccgcttcttttgaaaaatcattttaaaacatttgaagtccaaaaataataccgaaccttttatacatcaaagaagccctatatgccacaagccaaacttttttagacatacatgcaatttcctgattggacgaacaaccacccttgatcttcaatggagagcaagtctaacatctaaagagacttctacggccaaaaattaattggaacaaaattgccaacatataaacaagactcaatgttctaacagttttaatttgaaacttaatgtgtatttttttttaataggtaaaacttaatgtgtattgttaacttctactgttatttacaaagttgtagaggtggtattagcaatagaaagttgaaactcaatataagtgtttccaaataggataaccatctaaggctagcatgtctctatgctcaaatccactaagaaaaaaaccgttatataactgggagttttcagggaaaaaaaaggaacaagaagcaaccttggcccctaaaatgaaataaaatattttaattggaatttttatcaatcttttctaataaatttaatgttggtggtctcaaattttgattttcttttttaaatttcatatttattttatgaaatgaatgagagggttattaatttttggaatttttaaatttaattaaataaataatttaattatatggttatattcagttatatatcttaatttttgataaattttaatattatgattattttcaagcggtcggaaagattaaaaccgctttagggttaggaagtgttttttttttttttttgttgtgtcaagtcacaaaaacgattcccattattaagctacacttattttagaaggtgacaagtacacatgagtcagagaggacatgaattttggaggtcctctatctccaagtgcgtgaggatacgatgaaagttaagattccaagaaaaaggggaagagatgcggacctttctgtctcagtcaagtttgctttggatggatgtggacctctacggttgaccgtagtttatggcccaaacagtcccttacttaggaaggatttttgggtggagcttttagacatttttggcctatctttctcgttatagtgtgtgggcggtgattttaatgtcataaggagaagttcagaaaaattgggaggttcttgtttaacttcaagcatgaaagactttgatggttttataagagaatgtgaattgcttgatccacctttacggaatgcaccattcacttggtcaaacatgcaagagtctcccgtgtgtaagagattggatcgatttctttactcaaatgagtgggagcacttttttcctcaaagccttcaagaagttcttcctagatggatattggatcattgacctatagttttgaataccaatccgttcaagtggggcctcacaccttttaggtttgagaatatgtggttgcaacatcctagtttcaaggagtgctttagaagttggtggagaggttttcaaggaaatgggtgggaaggtcacaagttcatgaggaaattacaatttgttaaggccaaattgaaagagtggaataagctttcttttggagagctaaatgaaaggaaaaaaagtatcctcaatgaaatagctaactttgatgccattgagcaagaagaggttttcacttctgaacatttagttcaaagagctttaagaaaaaaggagttagaggaattaattttgagggaagaaattcattggagacaaaaagttagggtgaaatgggttaaggaaggggattgtaatttaaagttttttcataaagtggctaatggtaggcaaaatgggaaatttatcaagatgttggagaatgaaagaggcttagtgttgaataattccgaaagcatcacagaggagattttactttactttgaaaagctctactcgagtcttactggaagtcttggagagttgaaagcttagattgatcccctatatctgaagagagtccgtctcggttggactctccttttactgaagaagagatttctaaggtcatttttcagttggatagggataaagtgtcgaggcctgatggctttaccattgcagtgtttcaaaattgttgagaagtgatcaaggaggatttagtgagagtgtttgcagagtttcacagaagtggaattatcaatcaaagcactaatgcttccttcatagttttgttgcccaaaaaaaacatgacagagaaaatctcagactttagacatattagcttgatcactagtctctacaagataatagtcaaagtgctatcagggcgtctaagaggggtactacacgaaactatccattctactcaaggtgcttttgttcaagggagacaaatattggacgcaattcttatagtcaatgagatagtggatgagaaaagaagatcaggagagaaatgagtagtcttcaaaattgactttgaaaaggcttacgaccatgtgagttgggattttttggatcatgtgttggagaagaaggggtttagtcctagatggaggaaattgatgaaagactgtttgtccacggtatcttttgcagtcttagtgaatggaaacactaaagggtgggtcaaggcttctagaggcttaagacaagacgatcctttatccatttttttgtttactttagtcgcagatgtactgagcaggatgttattgagagtaaaggaaagaaattcgttggagggtttcagggtgggtaggaacagaacaagggtgtcccatttgcaatttgcagacgatactattttattttctaacacttgtgaggaagtattgcagactctcaagagtttattgctagtgtttggacatatttctgggcttaaagttaactttgacaaaagtaatatttatggcattaatcttgaacagaatcaactttctaagttggccgagctgcttgattgcaaagcttctgtttggcttatactgtacttgggtcttcctttgggacttgtgaggaagtattgcagactctcaagagtttattgctagtgtttggacatatttctgggcttaaagttaaccttgacaaaagtaatatttatggcatcaatcttgaacagaatcaactttctaagttggtcgagctgcttgattgcaaagcttctgtttggcctatactgtacctgagtcttcctttgggagggaatcccaaggcttgtggcttttgggatccagtgattgtgaggatcttgaggagattagatgggcggcaaaaagtttatttatcttttggaggtaggataactcttatccaatcttgtctcacccacatgcctagctacttcctttctttggttaagatacccgcttcagtggctggaaaaattgagagattgcaaagggattttttatggtcgggggttgggaaaggtaaaagagatcatcttgttagttgggatgtagtgtgtaatctgaaggcaaaaaagggggattgggatttgggaagatttctctaacgaatctcgctctcttagggaaatggttgtggaggtaccctagggagggttcagctctgtggcattaggttattttaagcatttatggatcacacttcaatggttgggatgccaacactatagtcagatggtcaaattgttgtccttggaaggctattgcacaagtctttcaagagttttccaagtttactcggtttgtggtaggagatggggaaagaattcggttatgggaagacatttggtggggtgtccaacctttgggatcccaatatccaagactatttaggtagtcacggataaaaatattcttatatcttcaattcttgattctactcatcccttctcttggaactttaatttcctcctgagatagaagatttagaaggcctcatgcggtcacttgattgtttgcatttatcaccttcggttttagatgcgagatcctggtctttatctacttcagggctttttacggtcaaatctttctttcttgccttatcccaattttctggttctcctccagttattcctactaagctcgtttggaattctcaagtccctttcaaagtcaagtcctttgtttggttagtagcacacaagaaagtaaatactaatgacttgctacaattgagaagactctacaaagctcttagtcctgatatttgtaagttgtgcatgaatcatggagaatcagcagatcaccttttcttacattactctttgacgatggcgttatggcatagattatttcagttagccaagacgaattgggttcccccgaggagcatttccgacatgttgtccattatatataatggttttggtttatctaagagagggagagttttgtggcaagctgcgtgcaccgctttaatctgggttgtatgacgagaaagaaatgcgaggatttttgaggataaagcaaggtattcagagaatctttgggattctattcatttccttgcttctctttgggctttttgttccaaggtttttaaggggatttcccttaatgtgttataacttaattgactagcagtgtgtaattccaaagggttggtctaatctagagaggttgtttgtttttacattgtattttcttatttttgtattcttgtagtttagtttttctttggtgggaggattcctcatccttcttttgtacttcttttttggatcaatatattcctttgtcatttcctatcaaataaaaagaaaaaagggaagagatgctgatgattgatgaaataggagaatttctgattgttacaactttgaaaaattttgaaattgggagcttagaggttgtgaggatatatcttttgtagaacaagactcaaggctgaagactaatagtatatttcatacatatctagaggcacatacttacatttgtatgtgcaatttataaaattgagtttgaaaatataaattaatatttgtaatccatcagtttttgatatgttgctacatgatttcattcaaatacaagtgaaatatatcttatgatatggaggtttggagcaatctaattgatgtaggacaaccctaggatggttgcctacactcaagggtaggtgggctagggttttatttttagggtgtaaggagaggaacaaagaaaaattttatggtagagaaaattataggataagaaatagagagaaagaagaaacaatgaagaaaagatggaaaaccttagagtctcactaaagccttctaggagtctcacctagaagaaaatcaatggagtctcaccattgagggttgtaaccttgtaatgaaagaaagtataatattattcatcaaattcatccctttgatttacattgattagcctatttataggtttctctaagaaatccaaagtctactaggactctaataacctattatgattctaattctaattataacatccaaagtctactaagactctaataacctatcatgactcaaattctaattatattataactcaactagctaatcctaattagacttcaacaaataccaatccgtattcaattctaattaatattaatcctacttaaagtttacttaggtattccctttcttccttgaataaactttaaaaggctttcccccatcactaatccttgacaaatgcttgtccttgagccttagttcagaaagaagacagatttggtaacagcagatcagtgtcatgtcaataccctggtattactgggttgcattgttgggatgatccattctactccaaattctttgcttcagatatcttcgttaaaaagctcatctttgtacaagaatcagactagtaaagtatgattgaacatatctaatatgaaaattcccttttacaacaagtacatgttttttttttgtgataattaaaagacaaagtaaatgccacatggatgtactatggttaaacaaaaatttggtaaataatagaagaatccaactggtaaatcatgattaaacatatctaatattacaatttacttggtgataactagctggttttttgtttgacaattaaataacagagtaattgccacatggatgtactattgtcataccaaccgacaactggatgtgctgcatgactacatctgaataccattctaaatatgcacactattgttgcatcataaaccccttgtaagatttttccctgtctgtggtgctgcttgtttattcttcacaccactagttggaagattgaaggctgaaccttttttccatcaaataattatttgacagtttgaacttatgaaatatattactactattaactggagaggtcaaatttctccctccttggtgtttaaactccttttcactgtgaaattctatagatgggcaggtccggtttgagtgttcattgattggaatgaacttccttttactcttgcaatagagaaaatgaagaagatgaaatagtagttacacaacagcaggcctcatggtttactttttcaactgttctgcaaataaccttacatttctctctctacactctctctctctctctctctctctctctcttatagttccacatgtcacactctctcccttattaaattaatttccaatatttcatccatgcatatattaccctcatccatctagcatttttcatatttttttctttttatggcatatagcattatctcatgtcatagctttctaagttgccttatttggtattcatatacattatgatatgttttcatttctgaatcccaaagattaacacgtggggatattcaacaataaatttctt

SEQ ID NO: 11809 - DNA, 8293 bp, Vitis vinifera
  Intron number 5 from transcript GSVIVT01026406001 (locus G SVIVG01026406001) derived from phytozome v7.0 (chr-ID chr4 ; pos 15703249 to 15711541 reverse strand)
cttagcttccttgtagcgtctaaagaggaaaatatgtgtgacaccacccctctcccaagtcttcctccggccgatagtggccatgaaaagggcggagacagctcagaacacacctctgatcatgaggatgaaggcagcgattgcagcaagagcgggtcacaggaggggagtgaagaggagagcgaagaggaacaccagcacgatcataacaggccgtcccgggatggaagtgagcagggtgaccacgacagtggagatgagtgtcatagcgctgtgacgggatccaatgaatggggctcaaattcaagccataacagcaacagcttatgatcacatactgccattaaaatttttccatatttaaactgcgtttgcagtgattttaaaaaacgtttttattatttttaacacttaaataacacaaatttttaagtgttaaaaatgttagaaacacttcataaaaccactgtcaaatggattcttagttccatttgtcatatatttgtcaagtataccaattttatctttctttttcttttcttttctgtttttgtttttcatcggggcatgatacttcagtaggaaagaagcatcgaatttctcgtttgtttagtggtacaaattaagccatggatggaagcaagagtactctgagggagttctcttcttctaagctcttagtgtatgcttaagattttaattagggtttttttttttgttctttctttagtcaaacacatgcatttttggttgaataaacttgtaagtttgataagcaaatgactattatttcatgagctgatggtggaattcatacccaaggtagaaaccatgcatatatatggttacattcataataatcttattaaagatatgtgcattgtattaatatagcaaaccatgcaaaatcctatggaaaatatgagatgggtttgtgtagacccctatttttaaaccaagtgtaatggtttgatgatattattttattattacctttttacttttataagttgaaacaaaggggcatttcataaatcacccggggagtagaatttattcatttttttagtgaaggaaggggggcgggggggggggggggggggggacgacacctcccatgaacccagctgcattggacgcgtagcaacaggggggtgatggctggccaagagggtggttgaagacgcgtagcaacaggggggtgatggctggccaagagggtgattgaagaggccatgcttgctgaggggtgaataggagagcgggtagtggcttgctaaggaagacagaaataagaaagaagagtgagggacgttgggtgtaggaggttgggtcacagaggagctgagatctagggggtggggaaaggaaggaagaaacacgctggggaagcaccttgaaggagggtgacacaggaatcagtactaagaggggagcggggtgaagcttgaaaaagttctattgcttagactcctcaggtgagtttgctggatattctcttgttcaccttcagtttctatgcctattgtcttcttcttttgctatttaaggttttggtgtgcacatttgattattgctaacatagtttgcacatgagttttgttgatttgtttagcttgttcaatatgctctttattattgttttagtcactgttcttttttagcattatttaaacccaacaaagctcttttgcacttggctttatttggagatttgtttgtcgtttttttttcctgtttcaatttggttgcctccctcccaccatcctaagtcccttggaacgaaacgtgaaatgtagctttcacaggttctttttttttttttgtttcttttcttcatgctctgttctcttgccattctcctctgttttctgtgggttttttttggggtgcatagcattgtgtgtatcaccgacagatgaggttagagattggctactggacatttaattaagttaaaaaagggagatatggtgttacatggattcgatggtgtattgggcagcttgccgaggacgatttcattttatttttttgagagagcaaaggctggactgaaactgggggataagcagattgatgaagatgttgaggagatgatggaaaggccgtgaggtgacgatttgtttgaatttaataccaaagaaaaaaatgagtcccgaggatgctggaggacatgtcataatgtaggctacaaaagctagtgtggtggaaaatacattaaaggaaatggtctcaaggggtttttagtggaccctgccactagaagttcatttattagatatcatggcttttctttggctctctgacggaaatgttattctttgaatttgttgaccaccatgaattgctactggaccacttgcacttaaaaatgaccctagaaaaatgattattattattattattaatctttttaatttatttttttgttgggaaaacaacaccacaaacctttagtgggcaaacacgtgcccttagttatttatttattgtttttttatcctcacatgcaaactttttatttttggcaaattctttttaaaatgattttcaagattctagctttttaaaaaatcttatttccattccaatttttaattaatttattcaaaattccatttttttttaagtttaattctcaaaactttaactttctgaactttaattatttttaaatttaattttccaaactttcattttcaaataaattttcgaaacctaattttttatttaatttttcaaaactccaatttttaagtttaatttttttttttaaaaaaaaaactttgacttcccaaactttaattattttcaaatttaattttaatttctatctttaaataattcttcaaattttcgatttccagaattccaatctccacatatatttatttaatcatcattattttcgttattactattaccttatttatttatttttttaaattccatctttaattaactcttccaaattccgaattccaaatttaattcccaattttacaaaattccaactttaacatttatttatttattatcattattgttattatatttattattatcatcattttatttatttatttatttaaaaaaaattccactttcaaataatttttttcaaaattccgttttccaaatttaattttcaatctcaaaaaattccactatccacgttcattcgtttaaatattatttttgctattattattattatcattattccatatttatttatttatttcttaaaaaaaaatccaatcattaaagttcaattcttcaaaaatctaacttccaaatttaatttttaatctaaaaaattccattattcacgtccattcatttaaatattattttcattattattatcattatttcatttatttatttgtttgttttctttaaaaatttcaatcattaaagctcaattctttaaaaatctaacttccaaatctaatttccaatctcaaaaactccaccattcacattcatttgtttaatgattattttagttattattattattccattcatttacttattcacatattcatgtatttaaaatctcatctctaaataatccttcgaatttccaatctctaaattcaatttccaatttctaaaattctaactttcacatgtatttatcaaatcgttattatttttgttattctattcatttatttattcattcgttcatttatttaaaatttcatctttaaataattctttaaatttctaatccctaagttcaattcccaatttccaaaattctaactttcgcaattatttatccaatcattattattttgtcattattattattccattcatttatttattcacttattcatttatttccaaaaattccgcctttgaatgattttcaagatttccagtttttttataatttaattttcatactttctacttctcaactaattttcaattctgatctctttcaaaatttaatttccaaagtcacaattttcgtaatttaatatttttttctaaaaatcccaaactctcaaataatttccaaaattccaatttctttcaaatttaatttctaaaattatcattcttacatttaattcctaaaaatccaattttcaaacaatctctaagactccaattttcaaataaatttcaaaatccatttttccctcgagcagttttaatttctatttggtgacgcatgtgatatgttttgtgctcttcattgtacactgaccccatttttatgatagcgcattgctcgttcgtggcccaggtactcatccactcccattctagtcattctctatgcatgttctgattcccatatgtgcacagtcgatttgagtatccgttgattttcttattgatcgtcacgttagcttcattttattagtagagacccgactttaaggacttagaggggtgctatagtctttaccgtaccttcttgataagtaacctgacccccgagcccaatccggtttttcacagatcaccttttccaaaataaggagtcacacttagggttttttttcttactttgtttacctttttaaaaataaaacaaaaataagtggcgactccaagtcattttttttaataaataaaatcattttcaaataaaaaaaatcgagttcaccatcaattggaaaacgtatgagccgaaatgcggggtccacagtttaataggtggaattaagtatgagaatggagtttaatcataatacatgtgagagagatggattaagatcttaacaaaaatgaaatttagtttatttatattttcgttctaataactctttgaaacatattaatgaatggaaattgaatgaaggtcacggttttcattctttatttcaatatttctaacataatggatgcatttgatacacaggaataagaatagaaataggatgaaagttgaggtgaattagaggaatcaaagtcatagtgagagccggagttgtgatttttatggtaatgattttttttttattattcttattctcattctcaaaaaaataataataatagtaataatttaaacttgatgaatgggacaaaatttagggtctatttgtgaacattttttaaaactattaccaaaaaacggtttttgagaataattttcaaaaatatttttctaaggtattttaaaacaaaaatttgtttgaaaaattgaaatatttttaactttttttttttttaggtttccaaatatttttttaaaaaaattaatttgataggtaatgctttattttcaattatttatgataaaaaataagatttctaagttaccttctgaaatgttcaagaatcttgatggttgtttcactgatcagttttctcgcctcaaataatgaatggaactacgaatacaagaaccattttttctcataatacaagagctttaaccttcgttttcaaggataaaaataggaaaaactttgataaataactttttttttctttagaaaaaagaatgtatgtttttttttttatttaaagagaaaagaaaacaacatgttttccaggagagacaattctcttgagaaagaaaaaaaaacattttattttttattttttatttaataatggcaaggtagttttaaaactcctagaaactactctccttatttctcccatttattggatgggatgaaattagcgcacccaaacccaactccaacaatttgttatattatttttattttatttgattgccaaaaatgcttttgtatttttttatatatagtgggtgggtacttgttttgaaattggaaaaagcttgaatacatgatcaaaagtatgactcaaaggtcaatttcatatttaaatttaagtattttataatttgtgatcggttcaacttcagttttttattgcaggctatccagtttacttattcatatcacccggccatttgagtgggtgacataagaatgacaccagcaattcgtacctaaatctcaaatatcttaagacctaataagttgattttataattcatcttaagtcgtattatatttactgaaattacacatttgaacatttcaatttataacattagtttgacctaatcaacttgaaacccacttaatttgatgatttgaaagattaatgtctctacaagcttaaactaataaacatgattacttttagcccttaattagaatacttaagacggcatggttgaaaatcctcaaacaagagattgaatttcaaactaggccggcctttattatccgtaatattaatattcaacatagattcatcttctacttcaacaatttaattaaatctacatctacatccacatccactatcaatttttgttttctttggtacatgtatggttggtaaagattttgaatatatataattatgagaaatttaacaatccttttatttatttattttggataactgagtaatattttataaccccacaacaagagtaaatttaggtattggataatactttattttataatacccttttgtctttttattgacataaatcaagttatctagtaaaatgatgatgatgcatagggaatagccgggataactcaactgatagagcagaggattgaaaatcctcatatcactagttcaaatccaattcctggcatatgattaatttgtttgagtatttcttctaaaaattcattgatatttagataaatcaacatatatattcattaactatttagatcatgatatatttggatgtgtgatattttaaaatagtattatgttttttttttaaaatgtttttaaaaaattctaatactatttgaccgtttttctcttaaaacaatttttaaaaacaaagtgaaatatataacaatatttaaagaacaagtaggaattatttttactagttttcaaaaacaaaaggaaaacatgggccttggccatgtttttttaaacttgtttttaaaaaccatttttaagttaaaataatttttgaaaacatgatcaaacaagccctaaatttttaagagttttattattattttttattttaaataaaagaaattgctattttttctcttttaaaaatagaaaaagaaattgtatccaaacatatctttttatccttctaattattaaaaaaaaaaaacccaattttttattatgtatagaaatattatatataaaaaaaagtttaaaaccaataaaactaaacttcatatgtgagtcccattcaataattaaaaactcctaaaatactccaataatgtaataaaaaattgtgcctttggtgttcatataacaatgacctttctcaaagagaagggtttatcaacactggcacatagaaacggtcaaaagctttatagttatcatacatgggatgtttgaatattgatagaggggaagctctaaagtaaatatgtagcatgattatatggagaataggacatctccctccaaatgcaaacagacaacgaagaacatttccactgcttcaccttcttctgcccagtagtgtccaatgcatcctcctctagacgcggtcgccctctttgccaaatgtgttttttctgctgttccattccatgtcgctttctttcacattttataacaaagagtaatacacaactgtcttttacgaagtcctatctttgttcccttcttggtttgatgctctgaggttctacaactcaaaacttcaatcatttacaacccgggttttcacagttttaaagttttctaagtgcagcacatgagttttgtgctaaacaaactgtctttgtttgccttcttgtattgatggtctttgggacaccatagctcaaaacttccaagatatatttctcattccttttttagtcagtatcaagggctcttaagtcaggtaccagaatttttaagttgtccaagtgctgcatggatatttaaggggattatgatcttgtgacaccttgttctatatcttcaacaagagatgaatggcaatgtgataatagtggcagttgatgcaagcaaagagatcacagactatgcactcgaatgggcagtacgcaacctgatcaaagccatggattctttgattcttctcgctgttgttccttcatgtggacgtcctctggctagccgaagccagacccatcagtttctttcttgtaggtttccatttctcctttctgcttggtttggacagttttgttagccatgtcttccatgttttgattctttttgttgcttcaggtctgctaaagaaactgggtcttaggcaggaggagagttcaacatctgatcaggcgggccttgttaatag

SEQ ID NO: 11810 - DNA, 2673 bp, Vitis vinifera
  Intron number 4 from transcript GSVIVT01004128001 (locus G SVIVG01004128001) derived from phytozome v7.0 (chr-ID chrU n; pos 15115185 to 15117857 reverse strand)
gctgtaataaccaatctctagatttacctggtgagtaatacatgactgtgttaactggtttaggatttggtagtttgtatgcaacatctttcatttgcttgcaaccatagtatatttcaggctactcatgaaaccctgcccatagttatacataatcagctcagagtttcccatgcttcccccaatccaacctctttttgcaattagaaggccattgaaatgccctttactattatatatggttgctttcccaatttctcaatgtgatagatgtgtctcttaccatgcaccctctcttaaactccttccatggaatacaaccatcaaatttatactcttgttcatgaaagtatgggtgatattagctctttcctattctcattaggaaagtgtagaaaattctcattacctttacctctgctattgctcttatctcaagtgctaccatcttacaccctgtgtccaaaaatgtcatacagtgctttgtattttcatcactctgttgttgttcctgtcagtgtacttgtggagatttctgaggataagcatgagacagcaaataattgcatcataaccagggttgaggtgattggaactagtgatggtaatgaggtgtgctttgatgtaggagggccctttaaggcaaagaactaggctatttttatcaaataaggtaagggttaagtaggttttgggcttgggactagatgtaatgtgtggagggtgaagagcgggacatggaactggtgaagggatggccaaaaaggggaaagaattgaacaaagaaagaaaaaaggttgcaaattccctggaacattgcaccatacaatggggggaaggatcctcagctggcttatgatgttaccattggtttcttatttctccatcccacgctcttttgagttgtaatgaaggaggtggcatctgaggtgaaggtggaggcattcctaagccacaatcaggtagcattttcattacgtaagttcagcatcaaaattcaaataaacctcatagcatttcttggtctaaagttttgacttcaagaggtcctggatagtggtgttcacctctcagagccacctttaaggttcccagcatggtgaggctggcttgctaaaacccatgagatatgatggcaaaaatcaaacttagggggtggcattgcctattttgcctattcccttcgaaccgatggaagctgactgggtgacagggccatggccaaggccaatgggttctctcagtgcattcataccccatccctgtgaacctaggaccttggggctgtaggttgttcagttgttgtattggcaagtcatgccttgtacagcatggtttttgttgaggttgatagctatgcatacctcagcgagcccttgttaagggtgatagctatgcacaccttagtgagccctggagtttcaactacttgcactagattactgctaacgcctcaatgttcgggtactgaactcgtgtatgtgagggaaaccaattcccatgttatgtgttaaacttcatgttacatattttgttcatgtggtgtctctggtcagttaatgtgttgagcccataatggactatttgcaaaacctttagggtgttgcccagttgcttatgttccaagtaacctagtagctaacttagcttgcaattttccactttcttcctcttaatcgttgcttctcttatttccatcttttaattagtttgtttttttctctccactttctcgcataccttttttccaccacatttgtatattgtttaatttcaagaattctaggaaagtattcctgtatcagtttgacatcagggcaacatggttataattatcgttgtatttgtgaagtttgtggttttggccctaggtgagttggtggtttcgatgcatgtcattagtctttctaagcagccaataaaagaagttattaatcagtctagattagctttagctactctctggtagttctttttggtggacaacacgagttgttgttttctattttgtgttggtggttgcagtccatgttgcttgcttggctcttctacttaaactgttgcctgcatgcctttttaattctgctttactgaaatttgaggacgtctttcctaacttcatagaaaatcaacttttgatgtgaaattgaaaagaattataggattgccatgctggaaatttcatatatttacttattttttttattttatcatgttgaaaaccgcattttcagttggcggattgatgtataggtttaaactggaaacccatattgtattgtagttatcagtgtaaaacaactacaattgaatagttatcccataggatttatgtcataaatttgttttatttgaattaaaatttatccttattctacacaacttatccttatctttttttttttcttttttttttttaatgatttttcagttttttaacctaaatacaattagagatggtgttacgataagaataaatttacaggataaatttatatgatttatttatggaataaaatttattgaatatgaaaactacaaaaaaatttaaatgtaaaaatatcaaaaagcactggattagaaaaataaaaaaggcgggctagatccttcaaaattttcagctaatttatatgtatatatatttatttttactatgtttcagaaagacctgtg

SEQ ID NO: 11811 - DNA, 913 bp, Vitis vinifera
  Intron number 5 from transcript GSVIVT01016071001 (locus G SVIVG01016071001) derived from phytozome v7.0 (chr-ID chr9 ; pos 18334614 to 18335526 reverse strand)
ctgggatcttcataaaagaacaagttcaggtacatgtggggtgatcagtttctactcatcatgcatctcttcttcatggtcatctttatcttgaccctcggtgaaggccataagaaaaattttatgtatttttattaaagttatgtttggttctcagaaaatttgaggaaaaatgtaaagaaaataaaataaaaaggaaaaggaaaggaaaagtaaagaaaaataaaaaatggagttaaaaccaacaaattatttttatttgcaacttcaaactcaatttatttattgtaatacatcaatataaagattaaataatttgaaaatgtataagtttttaactaattttaattagattttattttctttgaaatttttcataggactatcaaatataagaaaataatttttctcagtatttttatttctttccttaatattttctaagaatcaaatataacctaatgaaatttcaatatttttctctaagaacacaaaatagtatttttttttgaaaaaaaaaattgatttgtatagtcggcttcccaaaagtaaaacctaggtatttttggttttattttgagagattttaactaagaattattttaatgcatgaccttgaaagtgttaaagaaacatgatatatattgcaaatccaaattctgtaaatttaaacttccaggaaattattaataatttcacatggcatcagagttccatatggaggaggccatatatttgagttgtctgcctgcaactctgtgtatctctccacgtgtgggtatcagactacacatgaggggggagtgttaaaaaaacactgtataagttataagtttaaacttttaggaaaattggtagtttaatagaaaggagagtggagttatactcgtattcttataatttgcaggtaaaa

SEQ ID NO: 11812 - DNA, 5987 bp, Vitis vinifera
  Intron number 4 from transcript GSVIVT01015912001 (locus G SVIVG01015912001) derived from phytozome v7.0 (chr-ID chr3 ; pos 19313011 to 19318997 reverse strand)
gcaggaattggtcgtttgtggggtttcatctcaaggtactgatttttgtattgaattatttttacagaaaatatccatatgttcttattcactactaaatagtatatttggagaagtttatttttcctattgcatcatcggcattggcaaataattacatctggatcagaaatccattacgtttattattgaaaattttatcataatgcctgcttattttttaaataattgatctaaaacttccttctctatgatgaacaaaagcaaaaggagaatggaaatttgcagtgtccttgcctttgcaggcttattgacaataaatgaaaagcattacctatgttataacttatgaatttctttttatttggttttctttttctatatagatctgaggataccctcaaaaaatcctattaaaaacctgcacttaccaatctccctaagctttccttgttggtagtacactatttgccttcttcacattttttgctagagctttatttatttatttttgtattttttataggaaagacaaaaagatgtgaaaagaaaaaaaaaaaaaatgcaggaagtctgagatttgcaaagcaaacaacagaaagtaaaaggtaaaggaagcctaagaaaggagacttccaacaagaggctcttcacccttctaaatgatccattagaaggaagcctaaatgacttagagggaaggcagtcttatccaaactccttagacaaaaagattcccctttttctgcttcctggtttgccaacctacactgccatgcaaaaaagtatcaaggcttctagaaaggttaaaaaacttacagatccacaagtcatatcttgttccactaaggccctcttgtattctaaattgccctagaaagggctatcgtcaagtcctcttccataaggttagtaaccctcaacaatggcacctttttcaaggattctagtgcagctaagatctccgccttagtttctatgagaaataatgctctctttgggaaatggctttggaggttccctagagaaaggagtggtctttggcataaggttattgcgagtatatatgggacacatcctaatggatgggacgccaacatggtggttagatggtcacacaggcgtccatggaaggctgttgctcaagttttccaggttttttccccttttgtccgcctaatggtgggcaatggggagagaattcgtttttgggaagatctttggtggggtaaccaaactttgtgttctcaatttgctgatttttacaaagttatttttgtgaaaaacttcactatctcaaatgtccttggcaattcctttccactgtcttggaattttaactttcgccgcaatcttacggatttagaaattgatctccttcagagattaatgtcctcccttagttctgtgcttttctctccttctatggtagattcaagagcgtggtctttgtctttgtcaggattgttttcagtgaaattttttttcttggccttgtcaaaagtctcaaatcctatcttgttccttccggccaagttcttgtggagttcaaaagccccttcaaaggttaaggccctcgcttggttagtagcacatgggaaggtaaacaccaatgataaactgcaattgagaagaccctacaaatccctctgtcctcaatggtgcattctttgcaaaggaagtggagggtcgattgaccacctttttcttcattgtcctgttaccattggactttggcacaagttgttcaatctagcagggttggtttgggtccctccaaggagtgttgaggacatgatggttattacttttaaaggcttggggaactcattaagaggcaagacactttggcaaatcgcttgccttaccttgatttggttggtgtggcaagagagaaacaatatgatatttgaggataaagggagaacggaagatatgttatgggatttgattcaattctattattctctttgggcttcttgtactgaagcttttagaggagttcctctaagtgttttacaactcaactggattgcggtttacgcctcaaaagtttgaagtttgttggagtttctctttgttcttagagttctattgttgggagttttctcctttgttcagtttgtgtaggaaggacctctcatccttcccttgctttcttctctttcttttgtatcttttctttctcctgtatcttttcttctattaatatattcttcttcgtttttgataaaaaaaaaaaaaaaaatctctgccttagttgctatcctatacagttgacttacgaagtgctctaacaagcccacatttatattctttgaactaaattctaatactctcctgacctaggcatccaattaacatctaaaagagttgggtttaaggcaacctataagttaggcccttaccctttctctgacgcaaaaagcaagtttctcgtctttggtcaaactagaagatgctaatgggagtagtaacaaactctttagcaacaaccacccaaaaacaagtgagataaccaaaaatattttacagattgtcaacaatcctcacctctatctagatttttttgcaaaaccctggaaaccaatgttgtggtagaaatatttgttagacgatttttccccaattttttttggaaattttcaattttctgattttatttccattttttaccaagattttcttgccaaagccacctttttattgggggtcaaagcggctttgaccagtcaaagcggcattgactagtcaatgccggggtcaactgatcaaagcctcaaagagttggaaggggagggagcctgggaatcgaatctagatctccagcatgcagcaaagagatggtggccaattgggctactttgcctcctgttgtatatattgatatatttttatataaaccttatttcacttagacagtctctttaataaaatcaagtttaattattttatttctcaaatttcatttaacatattattaaaaatataaaagcatcataacaatcttattaatgagtctcttttatatattttgtgtattatttataaatgaaattattaacatttttaaacataatatatatatatatatatatatatatatatcattatttattttatattatgaatattaaataaatcatcattttagtattgaatgtattttcaagttctatttgtttttttgataggtattttcatgttctacttgttattaccgaatgtcataaattatattttttgttattaaaataattatattttaattattaacactattaaaataatatatatatttatcatttcatagagtttttttccaataatttctatgaggtttgattaatttccttctcattaatatttttcattaaaatttctatcaatatttcatgatatttccataaaatccaaccattgatattttcgcgataaccgattttttatccttgctcatgaggcaccaacaaatgaaaagccctatttccaaggtaataagacaatatatgaaaaatgacctgacaaaaagatatatagaggtgagggtctatgaaacaaagaggttagtgctctcaccataaatcttcttgaaatgaatttttaatctacatgagaacaatcatacttcctaatatcgactttggtatccattgatgagtttaagatagaggcctcattaaaggcttgaggttgaaattgttttcatgatatcaagtgatgctgcctataagattgagagaatccatgaaaagttttctttgatggatgtcgagggagagaagaaagatcattttactaggctggaagtaggcttgtaagcagaagaatgatgaaatttgggtctagggagggtctttgtgaggaaaagaggaattctaagttagtgactttgtgggtttcttagggagagtagatcattgtggcatagttttattggaagcatatttgaaggatgcgctctttgtgcacaatacatctgttgggcataatagctttgtagggtctctattttgaagtatatgatcattattaacttttttatgagccattaaccatgtgatatttttcattcttgggaaagcattaaatctaaatcattttactcaatgagaaaaatgttaactatcttcttggaagcaacaaaagaaggattttgaatggaaagagctcaacctttccaaaatcagtggaaggggatagaatgacagtcctaagagaacaaaggcacaatgccaatcctagggttggtagctcattaaggtttattcaaatgtcaaggtgcctagatgaagaatgactggaaaggaagacaagaatgaaattgtggaatcactctattttgaaaaagcatataatcaagaatggatattctgatgataatcttacaaaattagacctatcaaaaagtaatcttacaaaattagattctctaggaaacaaaattctctgcagtctactatagaaagtaaatatggattgcactccaatgggtgggacatcaacttcgagtaggcttgatatgtggaagagcctctctctctctctcacacgcatccacaactcattttctaataagagtctttaaagatagtcttgcactgttctctctcatcttatttcttcttcttccactctctcatgcctgactctctcactctctctctttgtgtgtgtgtgtgtgtgtgtataaaagggaaaagaaaaactttataggattatgtgttgctcagcctgctgcgtgatggagaattccattctcatgctagcctttgactatgcatatatatatatatatatatatatatatatatatatatatatatataaaagtaggtaaaataagagaatatattaaaagcactaggaaggggcacatcaacataaacatgaactatatgaaaagcgtccaaaggccagtaagaaaaggaagagaaaaacaagggacaaacaaccaaactaaatcacaaccctaacaacccagaaaaccaaactgtcccccgcctctcttgtcccaactgctcacaacaccaaaaaaaaacccttttctaggcttaaacaccaacaaaaccaacaattgagatgcccttgattcctcacacatgagagttggatccccactacaactccccctagccctagctatcattggagagcttttgtaattaaccaaatactccaattttccgatctccctcctgaaattagaagacaagtttagcttcccccccgattacattgacaccagtgctctcctttcttccatcttcctcaaaagggggagataatctccttttcaaaaaccacaattgccatccctatgtagatactaaaattaaccaacttactaaagaggccatcagaaggatgctcttcccctaccgaccagcttgaaccatcttgaagcttcatcctgagcagtctgtctccctctcccaaagacccatcggaaagccccacatttcactgagattgcttctccagtcacaattgtttctaagggctgattcaaaggcctactaccatcatctggtgacctagctgcataaacagaagggaaagaagaagagtaaatcccttcccaaagcaaagtggctggccctgccttcaaaagttgcagctgccaggagagtgtcttcaactcccaaaactttcctcttcaatttgatttgttttatagaggggcttgttatcctcttaacttattaagtttctgtttagcaccttggattcttgcttattctttaatcactatttgtggtatgtgctgcataagattgttgtatcatattacctatcaaaaaaaaaaaaaaaacagatcattgtgttatagtgtacttgattgatgaaaatgtgatttcttcatgtagttgattgatgtttacaatgtaaataatgcatttgaattgttgtttatgtatctttctttgtttttccatgcattctgatgaacataatgttccttaaacatgttctgcaggggtagg

SEQ ID NO: 11813 - DNA, 11112 bp, Vitis vinifera
  Intron number 2 from transcript GSVIVT01020252001 (locus G SVIVG01020252001) derived from phytozome v7.0 (chr-ID chr1 9; pos 22237872 to 22248983)
ggtggagcttcgtcttccttttggggtaatcgcaggtgagtttccatttaacaatttgtttggctgttgagaaaaaatttgggctaaatgttgttttgcattgttcacgagctgtccaagctttttgattttttttttttttaaacataagatgctatttcgtaatctgattacgatttgcaagcaaaggtggtatttttctggctggctcaaaaatcgtgggtttagggtttttgaaatttaattccaatggcacaataagatgctatttggtaatctgaccacgatttccaggcaaatgtggtatttttgagcctggctcaaaaatcgtgggttagggtttgtgaaatttaattccaatggcacaataagatgctatttggtaatctgatcacgatttgcaggcaaaggtggtattttcagcctggctcaaaaatcgtgggtttagggtttgtgaaatttaattcaaatggcacaaaagcaaagagacccctagatccagaaaacagagggagggaaaaaaaacacaactttccctatatattagatgagtgtctcccaactcccatcccactctaagagagaacttatcgccaaacaggtcccttttcttttattttcctttattttctggttattttcgactgtctgtgaccttttaactttctctttttagtgtaagttttgtagaatgtgaaacttatttctgattctggtgttttgcaccttgtattataacctttcgattgataagattatgcgagtatttgtgtgactttttcaatgtttttatggtactcggattgcatagttaagtttcaattaggttttaaattttctatttcagaatggacatttgaatttctgatagagctcttaaattggcctgaaatacctcttttacctagacctttactagattccaatgtttttcatggtgtattttatatggaggtgaaaatggatttccattctctgaattttattttttccaattttttctaataatttgttggagtagttttattgtgattattgtagagagcatgtgtattattttttaattttttatttttcttcatgatttccttttatgctatgctggaaaattttgcatgatgatgctgagaaaagaatgcttgattatttttttgttctaatttttcctacgtccaagttgcattggacttaagtgaagatgaaaaacaacatcttcagaatttggaagatgaagaaggcaggtattaatagatgttatcttcacttttggcttattctgtaatttactgtaagtatttgtgaaattcttctttcactgttagaagtaccttgagccgtctattaatggttgtgttagaaagggtgtcataaacttaccttatgtttggttcttggaaagtaataagaaaaggaaaggaaaaaatgctagtgaaaatggttttctcatgtttgggtaccatgcgaaagatgaagaaaaaaaaaaaccaaagaaaagggttggggtggtggtggtgtccattttccttaacaaaaaatgaggaaagttagtggaaattacattctttagcaatttaattttctttccttcaacttttcaatggacaatcaaataaaagaaaacttttattattttttcttatatttctctgctctattttttttccttaaaactttccagaaacaaaacataggcttagcttatatggttagaagtcgaatatagctgtaacagttatgatattgagaagctacagattgctgatctagtgtggtggttccaaacatttattcatgttatggatttgttaaagtttgtgttcaaaaatatttcatgcttcatagttgttctatcctgtttgtatttctcgaatctagccacctttcataaatttcattttcatgttagtgaaacatatttcttgtgcttgtatatctattattccatccattgttagacaaaagtatatggcatccagtattttggtactgtattaatggaatactataattaaaataccaacactaacttgtttaagtatttaactcttctatcatgctttgatatttttttctcctgtttaatgtcattgccttcattagttctggtctcttgtatccccttgacatttatgctattttgggataaattgaatggtggaaagtggtataggacttgttagaatgtaccaagatatttgtggatacctgagctctcaaaactttcctgaggttagaagggagtaagattttagaatctttcgagtttaagcttgattcctaagggcctaaaggctaatgaaagagaggaactctgttaatggaatttaaattactcaatcttatccctggaggtgtcttccaaaaagtctcatgagcaacaaactgtggctgctcaagatgtagacaggtgggcttatcaagcgacatgtctcctcttcaatgttcttaatcgcttaagtcatgtgaactaatgaccccaatatttgtatatgcagtttcactatattgtgtcaacaattcttaaattctccaaaaaaataaaaataaattcaaatatccatctttgggtaattttgcattattaataataggtcactgacccttttcctaatgggtaatgaggtctctaagtaaaaactggggactttacacaggctaccctgttgtttacaacatagccccccacctctccccctccccctccattttttttttcctttctttttcttatgatacaatatcgggaaaactgtgttttggcccgcccatttgggcctaatagctttttcataacccaactttccataacccaaaatatgtctactgttgcccaaaaaattatccttttcatgcactatgtactgttttataatttcatttccaaaattacccctccacatccatgtcagcagccatctccctctccatgtcacgggttgtgcttttaataaataaacacaaaaatcttaaacaagttagcaaaacccacgcaacacccgactctgaaatttggggaaaccaggttagggcaaaaggagagaaagtcacagagagtccttagcttctttctcttctctctcttttctctctgttgtgtgaatttctcagtgcaaaatcgaaagcttgtaagctgtaatcgattcacgcgtgtctccatactactgattcgcaaatttcttcagataaagcccacgcaacacttgactctgaaatttggggaacccaggttagggcaaaaggagagaaagtcacagagagtccttagcttcgctctcttctctctcttttctctctgttgtgtgaatttctcaatgaaaaatcgaaagcttgtaagctgtaatcgattcacgcgtgtcgccgtactactgatccgcaaatttcttcagataaagcgatttcatctccaggttcttgccttcatttagagatttccactctgttttgagctctcttacactattcaagttagattcgctttctagtccttcttttagcttctgtttggttgctcagaaaactgaggtaaatgaggaaaatatgaggcgaaacttatatgattatttttttttgtattgttgttggtttctttgcaatgaaagagagcaaatgtttaggcgcagctgtaaatctcgagctttgttctttattcccgttttttttcttccggcgaccacacgaacgaacgataaatatgtacatttttgtgtattctttacttggtctcctgattactatttttgtttggtaatttttttcattgatttcatgcatctggaactattcagtgcacgtaatttaggtttctggcctaatttttgggatttaggttctcttgagattgacaattaattagtgtttttatttttaattgcaatttagcacccgaggaaagctgaatttctgaacttctgttgtgtgattagatgcttagtttgtgacatgactgattttctcgaatacctatgtaatttctgctctgtgggatggttgattttgtttgaccttgattgaatttttaaactcttttttcgctcttggatttggttcttgaggtaagataaagttgtgggtatgtttttattttatttgtttttgtgttcttttaataaaagcttgctgttttatgttgggtgtttgtttattaatgtttttttagcactttgtgtggattgattgattgtaatcctaattttctgtgcttcttcttattttttttgtttttttttttctgggttttttggtttaatttgttcaagggttttgtttaaaggtggtaaggagcagattatataagcctataagcatgtattcaaagctggttggattgaggaaagctgaacttctgaacttctgctgtgtgattagatgcttagtttgtgacatgactgattttctcgaatatctatgtaacttctggtctgtgggatggttgattttgtttgaccttgattgaatttttaaactctttttagttaaatgttaatggaaactgatgcaaaccctaatgagtaggtgtggcaatatgagctcttgggaattaggacatgtttgggagacaaagttggagaattcaagaacagatgccagaggcagtataagctatttgaaccaaaacccacctctcctgccacctagagagctgttttttattttttatctttaaattaagtttataatttgtttttcctttttttaatgcatagagcttcacatcaaacaacaaataaggttttcttactttgtgccaaatggagggtccttagcttctctctcttttctctctgttgtgtgaatttctcagtgaaaaatcgaaagcttgggttcttatccatcttaatttttattaaatgaaaaccgtgggttgggttcaatcactgctaccattggactatgatactctttgataagatatatttattttaaatttgttaaggttcatcattacaaaaatacaattttaattatttaatttgaaattatatgatgtaattttattcagatttgtttatattagctacgagattatttcttgctggttcttgcttctcaaaagttgtcttaaatgcttattatgttgccacttgtcataacccttgatacttggttcaagtagcaaagtgttggggtgggatgctggtaggtttccaatttcattttcaggggaggaaaaaattgttacctatataaaatgtttattttgttgtgatacttatttacaaacataagtgactttaacttcttcctgttaaaacatacaagaagaaacctatgttatttacaataagcattaatgatttttagctttttcattatgtattgtatgtcagctttgaaatttctgccctgtcccttcttcttttcccattctcaacttctcattgttggattacagatatatatggactgcttgcaaaaggcaagattccaacattcatagattacttgggaattgttgttgaggtatttgctttttcctatgttgctgcttatttgttctctgtatgtgtgtctatgtctctgtctatctttttcttggtagaacatcaagcgaatctagggtaaaacgataattattgtgatgtttctgcaatcatcttttctttattaccgtggaactattattagctgttatgtacatgttatgttcactacgacactaacttcactttccgagaccatgtaatcatcactatgtttgtggcattgttgttgagaatatatttaggttggagatttttttgactaattggcatacgataacaagtatgcttttgtttctagtccacaccctttccatgttttaaattgatttctaaaccttgtaacacaaaattaaagaattttttaattaatttctaactcttgtagcttaagtgttttatatttttcttaattttttttaaaattataataaaatataataattaatagttgctttatctcttttttaattttaaaataaaatttaaagataaatacaataattaatattatattaaatttaaagataaagaaaaattaatagaataaaaatataaagataaatatcaaaatcaatatcttaaaaaatctaaagataaatgataataattaatatacaaattcaatttttgatatgagaaaaaaattaaatgtgaattatattttatcaatatctaatctattatatttttttttacaatattaaaataaaagacttataataaatacgttcttcatgtataattagcaataatatcaaagtaagataagcttaatatcttcttaaaatagaaaaattataataaatatgttttcaattccaattaaccatgtaatattatagataacttaaaacttaccttactatgcttatatttaatgttaatttttaattaatgccgtatccaaatacttgcgcttatagttgagatccttctcagctgaatctttgagttctagactcctaagattttgggatgcaaaggatccgacacctagacgtgtacccgcaaccaccacccttacctaaacccacccttacccgcaaaccgtcctttggctctgttttgatctctatggttctcttgtttttcttttctatatttcttttcagaaattaaattttctgctactatttatttatttatcttttctctctttggatagttcttaagccttttatctatagttattgatttggtcattggaagcttgctaaaacagaaagacatcatagttgttagcaattctgttgtggtacaatttaggaattattattggattggttagaagctaggcactcgggcattttatggatattggtcatttttttttctctcctctgtaaacaaataactatgaagttaatcctctttaactgatactttctcttctagttgttgctggatagagattgttattgagacttgagagctttaatcttaattgatggagattttaataaaaattccctttgcgttttacagtatcttttgacgttgttgggctgtggaagcttgctaacttgtgaaacaataaacagagaacatttaacttagctcaccaaagctttaattatgactacttagggttggatacatggcttctttttcacatttcatctttatctatgaagaatttgttcagaagtttgggattttgtatttaaactgtagggatatcatggtttggttaaagatatctttctaggaaaatatttgtgtgtttttatataattaacttttctttcttgtctttctagaagagaagaaagtatatgggggtggggtagtgttatgattggaaattttttgtttagaataatcgaggtgttttcaattgttttttgttgcattttctactgttcaccaatcctatatagaatatcacatgcctgcactatctattagtaaatacagcttcaagttcatattggatacttaccacaatatgttgtagagactatattatatctgcataaaccttatgaattaattcaactagtctttgatccagctacttcacttgtactgctatatgaatccttcgttgccaaccaacttcatgtttgaatcaagccttcactgtcatgttgtttctggccacctctactcgcatgcttaatggtcaatagttgaacataatattttgagtgatagaatctgcatagttagggtatatgctgtaatttgattgagatttgtttatattagcttccagattctttcttgctggttcttgcttcttaaaagttgtcttcaatgcttattttggcctcccttttcatagcccttgaaacctggttggcgtagcaaagtgttggggtgggatcgttgtaggtttccattttaatttttaggagagggcaaaaatgttacctatataaaatgtttgttttgttgtcatatttatttccatacataagtgactttaacttcttcttgttcaaacataccagaaaagccctatgttatttacaataaacattaatccttcttagtttattcattatgtactatatctaagcttttccattcctctaatgtccttttttctcttcccattctcagcttctccttgttggactacatatatatacggactttttgaagaaaccaactttgtagcattcatagattacttgggaactgtttttgaggtattctctttttcttatgctccttctttcttctctgtgtgtctgtctccgtctctctctcattttcttgcgagaacatcatgcaaatgtagggaaaacccataattattgtgatgtttctgcaatcaacttttcttccaaactgtgcaactattatcatttgttaagttcactaagacaataacttatttgtttatagtcagccccattaatcactcactgtttacaacatatttttgctttgtttttgtttaccaaaattgctttcaatttcttaccttgaaaggatgaggtgattgaatattaactctatgaacgaatttgatgcattatacaaattgatttcgaacaaaactataatatgagatttattgagatctttgtgaagatacgatggacttttcactttcgaatcaaggtccatgtataaacacattaggcctaggtatacacctacaaagttaagatagaaagttatgtacatgagagtgagagtgagagtcataaactacttgcatcaaaataatgtccatcttcgatatgtgcgatcatttaactattaatgtcttgtccctggtaaaaggttcttttcgataactgttataggatgtaattatgtttttaggatgatgaggaatggaagtggaaagaaacatagaatatcggttggagatgaggacatgggaaatgtgggtagggaggaagccaacattcatattccttaagcaacttcatggcattagattatggatacatgtatatactaaggatttcaatatagaaaggggcccttcaatccatgctccctcgtttcctctttatcttatgtgtcactaagaaaaaaatcttagacgttcgattaccatcacatggcccgacgatgacccctttatggcctttctctccaccctctcttctcctctttccttcatcattatattcatacataatccctatttacttttgttgtcattttttttgtaacaagtttctatttaattaaagtgatggaagaggacatgttctgttacattcatgaaggcggtcagctagttaaatgtgttggagggtctgttcaatatcaaggtggtcgtagcgaatcgatggttgttagtcggcatatgtcacatagtgatttcgtttcaaaactgtgtgatgcattgcactttgaccagaattctatcaaattggaattcacggtcaagtttgagccatcatgtctactaccgttgcatgatgatgcaaccctacttaagatgtttcgattcaatgaaatgttttgtcacgtctatgtctcatcatcaagtgaagttgttgaaggctgtatagcaccgactagatactgataaccttcccaacatcacatccactatgtctattaacttttcttcaaatatatgtagatggatgaaatttttttttttcctttgtagtgccctttctcctattgttggttcgaattctacacacctacttccatccggtggcgatctgccaattaatatctgtaatgactctcttacaattgagttatatgggttttcccatagatgtgcggaagcaaatatactcgaatgtgactcaagaaagtcacagatgctattggatctgggtattggtgtgaaggatgccaaaagaatgatgatgagtgcagtaaaacaatttactgtaacctcccaaccaataccatgtttcggagctattttgaaacttgaacttgaatatatataaaagtaaaacaatttacttttcaatttaattatatatgtaaacatatttatataagaattataatatttcattttttcattcatttatatgtttaacaatagttaaataaataaatatttttataattatgattctttaaaattttttgttttaataattattgattttttaatataatttaattctagaatattataagataaaaaatctacggaatagaatgaagtaaaagtgattcaaatttaaatataatttctctatactatataaatgaataccattaaatccatatcgttaacatataaaaataaatttcactaagaagcaataaaaatgaccacacctaaattcactgaatcaaaaataaattcatatcaactttaataaatcaattattcaatttctaaacatattattaaatcatcaatttgtatttttaaatcggcccatattattaaatttcatatattaccactaatgtcatatacaatcacaattccactttttgaataatttattcaatgcctaaatatgttattaaatcgttaatttataccatatattaaatcccacacattatcacaattatcatggagaattccaaaattagttattcaactcttaaatattattaaatcattacttttataattatcattcttcaaaaaagtttgttttaaataattattgattttttaatgtaatttaattctataatattataagataaaaacataccatgtcataataaattaaaaatgattcaatataagaataatctctatatcatacaaacataattattgatctcttcatataaacatgtcatcaaattattacttttaaaattacgattcttttttataaaaaaagttttattttaaataattattgattttctaatgctataattttattcatattataaaatataccatataaatatagtttagattattcatattattaccattaaatcttatgctacatataaaatttttattttactgtaaaccaattcaatattataaaataaaaaaattacataatataggaaattaaatcccatctcatacggttagtcataccatccatataagtccatataaatgcaattttataccttaccaatttgagttcccacggtcccacccgcgcccacgacatcacctgcggttgcaactgtgcaagacatacgccggggagggagagcaatccaactgcgggggttgctgacgtcg

SEQ ID NO: 11814 - DNA, 9965 bp, Vitis vinifera
  Intron number 14 from transcript GSVIVT01010319001 (locus GSVIVG01010319001) derived from phytozome v7.0 (chr-ID chr 1; pos 19421042 to 19431006 reverse strand)
tggtatattcactttcatcttactcatgctggcggtggaatcagaaatcatattttgacttccttcttatatgaagttattatggaactactaagtcattattcttgattgtttattccaacaaccccaaccctgtgtgcgcacacacacatttaatgattctagtatatcatatattaatatatataaccattcaggtttatattatggtctatttatttactataattttggaatttcatgagtaacaacattgtggaataactgaggtaatggcctcaagtgaatgccatcagccacaaccccaatctcatcacttagacatcaacgaacttcttgccagcctggtttctacttttttcgaacacttagagccagatctttgagcagttccagtctctcaagtcggcaaagaacaatatttctcatcactctcctgttcttatgataccaccataagatatatggctctagacctcatagtaatactccttttttgggggataaccctaatggtagggttcacatgggctatattcccttagctgaggtagagatgctgttgcacaaagaacaagagaaattcaagttgctgccttacccaattttgatactcgcccaccataccctgttgagtttagctgggcagttccatcccactggctattcaatctttacctttgttctcttcaatgtattgtcaagtaatcctcatgaacatatatttaattgtgaacacccatttacattcaaccaatttttttccctttggtaattcaactatttctcaagtttggtttttctcaagagctaacatctccttttctatggctttcttccaattctcacttttaggtgcttcttgaactatttgaggaattttagtaggagttaattgggtaaggaaggctctatgtgatggaggataggttttcaaatgaaatgaaattggaagttgggtcttgagtgcattttctggtagctttccttagggcaatttgtaaatggagattaggaaacacttctgaatatttgatctaaacaaattgatcataagtttttggtgagagcaatttgaagtaggaaaaatgacactggaaacaaaattagtggagtttgtgtgttcattatctgtctcgagtttagactcttgggcttgcattcaattaggttggcacgatttccgcctagaataaacctatagtggcatggcaattacattaacttcccccttgatccctttttgatgaggcttcttgatcaggtgataaagagttagaacctataggtgagaccttaggtgcaggtggcatggattcagagagtctagcaaattaggcaaaccataagagagaaacttatcttcatctaagctctccccctgaagattaagtattaggaaaagataattaatttttagtaaaagtgacatccatagttgtaagatttttgagaagtaagatgataacatctataatcctttttggttgaagagtatcccacaaacacacatttagatctcaaggatcaagtttgttgcgatttggaggatatatatggataaatggcacacaaccaaagactttgggaggaagtttactggaactgttgaaatatagaaaaaaatttgagtgtccaatggagttttattttcaagcacttttgaggctagtcggttaaatcaaatgagttatggttaggacaacctctccccaatatgatttagacatatttttttgaaaaaataaggctcaagtgatttctaatatatgcttatttttctgttcaaccataacattttgttgtggggaattagtacatggaaattggtgtataaccccattttttttaaagaaaggagatagcacctgagtaaagtactctttcccattattagacctaatgacttattttaactctgaattgtgtgcttaccattttgtgaaagataagaaacacaaaactaacatctgatttgtttttcatgaggaataaccaattcaccgtagtacagtcattgataaaggacacaaatcgcattgctctagaaagacttaggattcaagaggaaccccaattatcagtatgaattaacaagaaagggaatgctgattttgtgtttcttaaataaaatggaacacgatgatgtttagctaataaacaaacctcacaatgaaaactattaacatctaatttattgaataataaaggaaacatttttttaagcaaaggaaaagatggatgctctagaagaagatgatgcaaccatatttagacttttatttaatgagaatttttctgaaaaatgagagagtggcatatgattaccattgttagaactagatccaagcaggtatagacccttctgttccttagcatgctcaatcgtcctcctcatggttcagtcccggatcacaaaatgtgatgggaaaaagttgacggtacaatttgaagttttagtaatttgatgattgataagacgttaactgaaagttttagaacttgtaacatggattttcatgtgaaagctgaagttaaagaatttttccttggtctaccatggttgctagtgtgtcatcagcaacttcaatttttttatccctaaaaaatggattataagaagaaaaacggtgtgaagaataggtcgtatgatcaatagcacttgagtcaagaatccaagtacttggaaaatagtcctttggaacaccaagaacatgagaaatgggatacttacctaattaggcgagagagcatgaagtagtagacttacccattgaagtcaaaatgccatgaagcctttcaatctcttctctgtttaatctaccaacatctagatcattaaaagctgagatttctagttgagaattctctttagattgagcaatataggcataaccactcttttgtctagattgtgcatattgatttccatttcctctaccaaatcattgcaactttccatggagtttccaacaagtcttcttggtatacctcggttttttgcaatggacacactataaaccatctttgttgactagtgatcttgacactttatttcctccataattgttgtttgatagtgtggagtagtgattaaaatatcgagtatcggagcatctcgacacgatatatgtaagggaaatattggttccatgatattttgtcaatttattgtgaatttcacatatttttctagatttattagcattttctcaatttatcgccgatatatcgcgatattttgggctgtcaacgtggtcaacatgcctgtgtggtcaaacttttaacaatggcttcatttatgtcacgggggctcgaaccccagccaaaaggtttggccggcagtaagccaaccactggggcaagtttgccccttgatatataaactgcaccaaatatatataaactcaaattcatcatataaacataatttaaaaaaaatgttttaaagaacaaattaattataattattttataattaaatgaaaaattttcatctatttgaataccaaaaatataaaaattatcgtgataattttattcatagtgtttttaatatcattaatatattaattaagtatgaaaaattatacatatatcattatttattttatataatttaatacaattaaattaaatgaattataattttaatattaaatgtatttttaaattagacatattataatcaaatatcacaatattattatcgaataatatttgatataatttaataataaatgtatacttatgaaactcatattttttttattagtacatacaatattattatcaaatatgataaattatattatacatatatcaatttattgaacaaaacaattttaaaatatctattatatttctaagtttaattttaagtgttttttcttatatttctataatttttttttttatcaattttaggttcatcgatattttatgtcaaaatatcggccgatatatctccgatatatctgtaaaatgaaagtaccgatatattcgtaattacctatattttcatccttggtgtggagtttgacttcatagtgacaagatctgagccttttgttgttggagtgttaagtataacactctttcctttttctattcttataatggagaagagttcatttaggggaggtatatcttcctttccaaggacctgaaccttgacttgatcatattccacattaagacccgctaagaaatcaaatatcctttccctttcaacatatttgagcatatggcaacatcttctctacacttcattttaatattctgatagtaatctaattccaaccataagcttttcatgatattgtagtatttagtaatagaaaaagtaccttacttggtagttccaatcttagtctttattttgtagatgtggtcaacatttctcactttggattatatttgtctgatatcccttgatatctctagtcatcgtcaagaccatgcatgccttactgatctcctgttgcattgaattctataaccattcgtcaagtcttcttcatcccatacaatgaatgttggatcttcttcacttggacatgtctaattagatgactcaattttcctttcccgttcaaaaatgttcgcactagttgagaccacatcaagtaattgtggtctttgagtttgaatagattttatggatttgatatgctgcaaaaggattattgctagttaggttaggagcaaagtttgatgatttgatgatttttgatttgttagacatattttttttttgatagataagcacaaatatattaatgggcaaaaggccataaagcatatagggagtatacatagcagcctagaacaagaatgcaaaacacaagcaacctcacccccccttaagtggccgttagccactccaaaaagcctaagagcgaagaggactcctctccagtatacaccctaggccaactctacaaattacataactctacaaattacatacaaaagaatttttgagtttctgtatagctaaagatccccctctaaaagctaatctattcctttccttccataccgtccaaaaaatacacaacgggatggaattccagatctttttctttttttctccacaaaagagcccctccaactaaataacgcctctttaattgactctgggaacacccactgaaccctaacaagggcaaggacgatctcttagagggtccttaccactatatagtgtaaaagaatgtgatttacattttcctcttcacaaccacacaaaaaacaacggttagggagctgccacccccgtttttgaagcctatccaaagtgagaatcttcccccacgtggcttcccaagcaaaaaaagcaattttggttgagaccttatcctcccaaatgcatttaatcgggaaggcgcagacattgggaacaaccaacaaattataagcatccttaaccccaaaaatgccatgaccccctcctttccataacactgagtcctcctctgaagatatcctgaagtccctcagcatattaagcaagtctcttatcaagtccaactcccaatcattaaaatttctataaaatctgagattccaacctccttgaccaaggcttgagtcccacacttcattgaccgttgcattcttatggaccgccacggcaaatagctgggggaaagtttgggacagcgtcgcgttgccacaccactgattagtccaaaatttaactctagtccccttccccaccttaaactttatgctatcccagcatcagtttgccttcttcataatctccttccaaacccccactccaaaagtcctgcgggcgtccttagtcctccacccaaagccttcttgaccatatttcaccccaatcaccatcttccaaagattgtccttttcaaaggcaaatctccagatccatttacctagcaaggctttgttcaagggatcaatcttccgaatgcctaggccacccttctccttttgtgtgcacaccacctcccaattaattaagtgaacttttctctccaatctaccccctccccaaagaaagtctctttgtaatttttcgagcctttttgcaacactcttgggcattcgaaagagggacagattgtaaataggcatgctggcgagtgtgctcttaattagggtgatacgcccacccttagatatatattgtcttttccattgggctaatcttctcctcattttctcttccaccccatcccacatagaaatagctttgtgatgggctccaaggggcagccccaagtaaacagtgggcagagaccccactttgcacccaagctccactgccatttcctcaatctcttcaatctcaccaaccggaattaagatgctcttagctaggttaattcttagaccggaagacgcctcaaactaagccagaatctagcttaaagcggttagttgctctttcctagtttcgcaaaaaatgattgtatcgttagcaaaaagaaggtgggagacaatcagctccactccccctctcccctgaagtctacagccagacaagaagcccccatcaaccgcccttcttataagagtgcttaacacttccatgcccaagacgaagagatacggagaaagaggatctccttgccgcagccccttggaattcgggaagaagcctgcaggcacctcattgaccaggactgaaaatttggcagttgagatgcaccaccaaatccactccatccaccgagacccaaagcccattttaagcaaaaccttcatgagaaaattccagttgatgctgtcataggctttttcgatgtccaatttgcaaatcagccctttctcttttcttttgtgccagaagtcaatcacctcattggcaataagcgaagcatccaaaatctgtttgcccctcacaaaggcattttgatccccagaaaccacctttttctaaaaccttcttcagcctattcgcaagcactttagccaaaagcttgtacaatccccctaatagactgattggctggaaatcccccaggtctttagcacctcctttcttagggatgaggaccaagaaggtggacatattggaacaaattgattttttttttagtaaatcttagagagggaaaaattttatgaggctatacatgctaaaaaaattcaaaggaaggagacgaacattaacaagttttgctattggcaatgaaggtcgtacaagtgtagtgaaattctcagggattaaggctgagaataggataaacttagggtgcaaaagagagcccttgctatgataccatgaaataaattctgttctacttgaattgtgttagaatgcaatatgtacatcctatttatacacaattagggattagatttccctagaatatctcccataaatcaaggatcatattcacctaccacctgtcatcctataatctctcccataaatcagattctaccaaagaaagaaaggaaagaaataaatacgaaatcatttggaatctaccaacattttctatgtttctttcctaagaatatttttcactatgggaacattaataaagggtaatttagaaaccatctttttaataacaagtaatttgattcccaaaattcatgtgttcaaaaggaaggtgccataaccattttttattatcaatcatagaaaaaaatcaaggtaaatttcaaaattaatttttaatggagataaatgattttctacctttgcaattaatgctttctgatcacattagggatataattttcgggccatccctttgtttgatggaaatgcatcctttcccttgactaatattgttatatcattcctacctataaaaaataatgatatatcattcctaaacttcacctttgagctaaaaggctcgcatatgattactattgcttgtctccaaaccaaaatgacttacttctattttctctattatagtacacattaataataagatatctgcatatttgcctttgtcttctgcgacattagcttgaaaattcctccaagttgattgtctagctctatatttagacttgtaatagccatacttttggaattataagattagatatgagatttataattcatttgagttgaatcattagctcttcctattcttgggcttgatctaatatttccccatccttgatgctgcaaactttgatctgtcttaactgatttagtattatcatgagacttcttttttcattttaacgatttagtaaactttacaatgcttcttccacctcaatcttagacctttcaactaaacattgttagtgggcttataatgaatcccttaattgatcccacatcaagatcttttgattcttcaatagttgtcacttgtcaccttataatcaagatttgaagaattttgtccataacttggagatccgaaacattcttaccattagctttcatatgaataataagagctaatgttcacaaaaaataattaaaaaactctctctgatttctcctttgaagaagctcaaattaccctttcaaagtttgtagctgaattttgtactcctttgcaattcttgatcatgatgtctcatgcaccttttgcaatacttgttttttcagtcttctcaaaaataggtgggtctatcaattggtagatgcgaggatgagtcttaaaatccttctttctagaatttgtcaaattttctctttgtgcatttgtgaattgcttgatcaattgtacctcatatccttgatctataactcttcaaacatcttgacactaaaataatatttgcatctacatcctctaaaattcaaaattattaatttttttatcagacttcggaaactgaggttggatcatatttttgttggttatttgtatctttaatctttgataccacatgtgaccaaccaaaaaaataaatttccagcactagtattggggcaatacagaaaataacctcaaccaaaaaataagaaatgaaaaaagaaaagaaaaatatggaaaggaaaaacaaatagttgcaattgtataatatggccatgctgctttctggaatgtgttaggcatcatatacaagggaataccatgtcaatggtcaattttgttgattgcttaggagccaagtagatgtgggcaggttttgtgtcttctttttgtgtggaaccctctgtataccacctgtgtactttggtgcaccttagccctatcctttggtattgtctttatttttttattattactattttctgtgtgcttatcagaatatatatatatggccctgctgctttttattattcttcaataaaaaactgtaaaagtcaatcctaataaaactatcacctaataggtgcgtctattaaattaatactattgaaactaaactaaggaaacaaagcttggtttaattaggactcatacaatactcaatacaaagacatacaaaaatgatacatgataaaatttacgagcaacatttgtttgtctgatccttatcaagtttctccctttttttttctctgttaaattcttattttttctgttcaagattgatttaatagttaattcttactaacattacttatattattggtaagacaaggtaataaagtctattcaattattctcaggattatgctgcagagttagaagccagatctcctattctttcatcttgcttcaagccttcacttattctctttaaaactttgtatatcctacagtaaagttaaagctattcttttaacatgaaatcttcaggcataaccatataacttggttattttatgtgatctcatcaaatttatgagtagaatccttagtctgcttttctttgattattatatgttaatttaaaattattaccttgacaatttatagaggttgtgttggcagcagaatataaatattgtaatatttactacagtttaatgttgaaaaataacatgatcttttgtcaattatgatcttttaggtccaacatatctgcaatcgtgcatcatttgctag

SEQ ID NO: 11815 - DNA, 2141 bp, Vitis vinifera
  Intron number 7 from transcript GSVIVT01019855001 (locus G SVIVG01019855001) derived from phytozome v7.0 (chr-ID chr2 ; pos 3858759 to 3860899 reverse strand)
ttttgtgcacaagatttgctagtaaattgcaataggtgagttttgtttaacacctccatgtttgttttattttcttaaaacatgatttcctaaggttatattcttcatataaatcggcttgctacctcatacatgcatatgttatatttgtaattgcgttaagccatgggtaactctcttaactgtttttaatttcatttgagggcctttagtggaggaaatgttatagaggcttcagcttccttcatgttaatggctgctgtcataaaccaggaataagcatctaaaagttaaaaggataaattagaaaattcactcctctgctttcaccctgtttcaatgtagttcctaaaccttttttgaagcaatgtcaaccttgaattttccccaatgtgtcaaatagattcttatgtcagggatttctgttactatggatggagaagcacacatgcttgttatctgggcaccggcatgataggttctgtttagtgaaaagaggaaggaaaaagagtaatgaagatgaaaaagtccaaaaggggagacttcgttttgcagagaaggaaaggttaacagttgaaggtttatgaggttttgttcttttaattatagaggattgaagattgaaggttggaacaaaccacaaaaaaattgaagattgaagtcttcagattgaatggtgcctagggcctattaaaactccaaaaataataccatttactaattaatccaatgaaaaactctattttgaaaacctaatttaatcataaaccctaaaaattattgacagtaaaattagatggaattcttccaatatcagtcatacaatcaactttttacatacaaattaaccagctcattctaaaatccaaacccacatatgagttaataacgattgttcaaacacagtataacaaaaaaacccacccacatatggagttaataacaattgttcaaactcagtgtaacaaaaaacccagaaatttcagtaccgttgcatatattgatatattcatgacttgatttcaaacctagagaccgatatcctctgtcaatatgatttctgtgatttccttgtttgtaggtagagttgtaagtagtttgtttagggcttctagtgatggtgtctcctcaaccttcagctttacggttttttattttattttttctttttaccaaacactattaaatataaaactataattttgcttaaattgcatgtggtgccgagatgacaagcatgtgtacttctccatccattctaatggaaatcctgaatagatggatctatttaacatttgggaatagtttgagggtgacattacttcaaaaaaaggtttaggaactaaattgaaccatggtacaggggcgaatttcgcaatttacccaaattaaaattgtgaacaactttgggtgcactttgctgctacatggtccaacaaacttatattacaggatagcaacgtattttattcctcatggctgtttgaaaggagccgctgcttggatagaggagctgccaaaccatgttcaaaggctgtcaaggggatatttttggttaaacaaaagccataaaaaagggattttccccaaaagacagaacatagaaaagcatatgctatttcaagaaatcttacgatgatcttacgcatattgcaaaatcctcattacaaatgctgtataaaaaacagaaggaactcgtttaaaatgccatgtgaaataccatagaataatttcattttcataggtagtctgaaatgttcccacatgtacgaataaaccctctatgcaatctgcttgaattttttgctttgattcccttgtctatgggtctctatgtgatcactggatcacctggttctcatgaaaagacaaggttatgccaacagatcatagcaggaaatcttcttaaagtcagaatttataattagtttgaatttggattatacaagtttttagtggaagacttgtctaaaatgtatggctgggctggtgacattgggtcagagtttgctaatatcatactttatcttcttaaggagaaaaaggcaagaccatattaatacagttaaaacttgatctggacttttaccaagtattttgttgtaggtttctgagagctgggcatcagcttgcaagaaatt

SEQ ID NO: 11816 - DNA, 3572 bp, Vitis vinifera
  Intron number 2 from transcript GSVIVT01000122001 (locus G SVIVG01000122001) derived from phytozome v7.0 (chr-ID chr7 ; pos 15428151 to 15431722 reverse strand)
aattcaccgtctccacatacagcgatacgggagtggtagggattgaatctctaacgatctatctccgtgttttttttttttcttttctaaatattgttttgaagatgcctagaccaatagtttagggtttgacggacaattatgacggtagctttggatcgcattgggatcgactatttttgcgtagactgtgcatttaatttcaataaactgtaatggcaggagttatgatttaacttttagctgaatttgaaagaaggtgtgttagtgcttttagtctcgataagatcttgtgacctttaacctgtttcctgtgtaaatgttttattctcatttattaggaatcgtcattcttgtaagaattgatgatacatttgcttaggttggagtggtcgctgtttttggcttatggttgatttcgaggtatgatgttgatttggaaaatcaggttgtatatgcattcttataatgatggattgtatagacattggaagaatcaagaattagtatagaggctttagtggaagttgaaagtggaatagattgtatgaatattcaattatttaatttatttttgtgtttatgtgatgtcactcaattggattcttaaattatttagctttacaaagtttgatgttgtgtataagtaatcaagtttgaaggctatctgatgatgtgttttcatttaaaaataaactagagtttgacaagcctgtttgattaaaatgacaagtcgaaggtgcaattttttttttttctttcctatttttttttttgggttaatgcctaagcatgacagagtgtataggttgaagcctttttcttgatttgaaaaagggctgtctggtttcatccaatgtgcaacagggttaaagtgaaccatgttgaaattgtgcacttgagaaacttattaattatttgagaaaatgaacatgtgcctttttgtggcttggtcattacaaaacaaagaagtttcccctctgcaataaacctgagcctacaatactggattgttttgatatggaagatggaggggaatatgattgtgctctttataacattcttttgtagtgaaggagaaaatatgtcgggggaactgaatcactgtgccataatttaccactaccatcctataggtttagggaataaggaaatgttgaatagatcaactgacattgtcaaggaaattttgtgatgtagttttgagaagcatgctatgatacccggactctccaattgcaccttgtgtaattgtgtcaacccaatgtgagtgtgagaaccttgttggatactcctactttgcttcagatgtgactatttggttttgatcgatttatttttccatttcaacttccttagcaaggataaaagagaaaaggagagtttttatcaaagatatctttatttttttattgatttctagttgattttgttttcccgttattatgttgtagccaagtgtttacatccatcattgagatacatcttagctaagtctccatatcctaaaatttgtaggtgtgaaggattagacacctagacatttgccgatacttggcactaataggttacaaaaaattactattattattatttggtaatattaggagtataaaggaagggatagggctaagcaacacattagtattatcattgtaatttttcttggtttgatttgctatagagaaataaagatggcctcccttccaaacccttgagatgaaaccatgttgcccataacaatggagtgggatgaacagatggacaatgcttctaactaatgtttgagttaatttttagtttcccaactaaagaggattttataagacaactatagaaccatactctttatggcattggaaatgatcgtaactggatgttaatgaaatggacaagttgaccgcttgttgagataatgcaatcatatacatcagaatgccagatttgtagttgtaaagctatcaaggaaccagaaagcacattctgatccattgcaattggacatgacagctgtaggatttgttgctgaatattcttgggatgcagttggttttttctagagtcaattagggagcttctgttgtgctgaaagattcaaggcttggataagtggatgaggaaggcttagtgagtggcacccctttgcctattttggtgcatttggagagagcataatgatcaaacttttagtgaaaaagagcattcggatcaaaagccaatttcatcaagttccttttaaagtaatctaggtccttgctagggttgactattatatgttgctagacttcatttgtagtctaaattgtggatagatggacatagttttgctgtttgttggaggggtatgtgttttcttctttctttggtcccttttatataccaccgtatagaaatggtgcttccccttttgtttggtgccttctatatgactttatgtttatccatgaaagcagaagtaaaaaaaagtcccatagttgtaaggaattatggaattgagtagttggtatatgctatcaggacataggagaagagtgggtatataaaaaatgtgctttttttcttgttattcattgggaaacctttttggaactctgttgttatgtagtgagatttgagatggattctctataggaaagaaatatgtggcttttgatatggcaatgtaattattttccctgcaggaattttgatattcctttgttacaaaatctttaggccacatttgtagcatgccagagtttcaaaattgtgtgtttaggatctgtgcaagacaggcatggttgcaggtgtctacaaggcagttgtgtttattaatggtgaaatgttccagacatgttaataaataatctaccactgagattgagcaagaaaccttgaagttcaatttgtacgttccagacatgtttattcttttgtatgtaatctttggtcttgggtcatggtttctttagttttgagcccttcttctcttataagttttttagactagttaggctctaagcaagggaagttggtgtgttgctttcctttccccttaggggtgtgtctttgggcttgtttgtatactccttgtatacttggagggcactgtttttggtgcttcctcttttcgtttaatatacttcctttttatctatcaaaaaaaaaagaagaaagaaaccttgaagttcaatttgtacaccctgctcaatagactaagtgatttttttgatgaagctctaattccaaatcagtgcacatgtagccatttccattttccatagtgtacaatagttttgttctttcttagtgcaaatattagttatactactatttcacctgtagttatttgtaccatttatcacacctaatggtatttattaatctctaatatacaaaatttaacttttggtccttaaatttggtattaatggttttgggctcatgcttgcttcctgacaacatttggtggctgttgtgattgtcatctatttgtattttttatcctgtgcaatgtgaactgggagcaacaactgaatgccaactactgttctttaggccatcacatcaactgcagtgaagaaaggaggact

SEQ ID NO: 11817 - DNA, 12787 bp, Vitis vinifera
  Intron number 2 from transcript GSVIVT01031639001 (locus G SVIVG01031639001) derived from phytozome v7.0 (chr-ID chr5 ; pos 19424364 to 19437150 reverse strand)
ccagaaattggtggcaaaaggtactgctattttgataatttaacatcttacatttcaggttgatagaaattgttcatcagatatggaaattaatattgccccattatctactttagtatttgatttacatacttccttcatgtgatattatttgcagtcctttctattgcacaatatgttttcctatgtgttcctttacgtgtaagtgtctttaagattaccagtttgatattttacaattagtaattctactgtttgtgcctgtaaaaagaccaaaaaaaaaaatgtaattccactgtttgtaattgtgttgtttggatctacggtgatactgtcatgacgtctattttttttttttcctgaattaaaaaaaaaaaaaggaatccttgtcactgaaaacattttaagcctggatgatgtgatatattctgatgcatttttttttacatatttgatatcctacttattctgctataacccttaattataaactacatcacatttcagttctcttgatttaactaaatatgcttgaagttatcaccaataccagaaaagtgtcatgcaacatccctggaaggtctgaggagtcggaaaataaagtcaaattttctgtaaaaggaatgatgttgatatacagaaaatctagtggttgaaaaaatcattcaaaatcataaaccatgctttctcaatttgaggggaagtgttggacagaaggattgttctgtgatatatggaaggatttacttgatagtcatctgtgcaaacacaacaggttctttctacttttatgagtcaacttaatttactgtagttaatttatttttaaattttcttattggctataattgccctgtaaggttcattatattaaatgggaaacaacaattttatcaagcaaaagcaagatatcattgtaataaatctctggatcctttcttcatggaaaaataccgttgtcaacttgatgccagacctgaatggttccttatcaaccattttccaaacacacaacatccaacagaaatctttccaatggagcatgtcactttgtggaaaacaataggaagaacagtagtggtctttgacaaagatgacatacttggcagatggtattaggtgtagcccccttattgatgagcataaacttgtgttgatatatctaaagagcttttgcttgaagaacttcagagtcaataataaccagcaaggggacagaagtagaggaccttttcacatctgggacctaatatcataaaccatcagcaggtcactgacctgcaccaaaaagaaccaagttattcttgaagcagatatgtaacatttaaggttctggcacttgtaactttcttgatgtgggccaggaaaaggattcatgagaatagagctaaccatgtgatgcaagaacattgaagaggcttatcaaatccaagtaggctcacttgctagcttagcctggataattagtttgtatagactttcatattttatttttttatttgctccatttccttgtgtttaatatagttttacaaactgttgaaataatgccaaagttaggactttaatttaggaataaaaaaggagagatcatttaggatatttccttatgatttagtttcctaattttaggagagaattaaactagattgattgtttcttattcagtcatttgtgtatatatatgtgtatggtgtgtaccgattcattatcaataaaggagttcagaaattcttcatggtatcagagccagttttctgaaaccctaatcccttctggccacctcttattcaggccatcactcattccggccaaatctttctggccatatctcaatccgatcatctctctctctctctctctcattccggccatcagtccctgttctcagagccaagggagaaaacactttccagtcagtcgaatagtcgtcagaaaacactcaccgccggcaacttttccggcgaatttttccggcgaactttccggcgacgatttttttctacaccgcaaggagcgcctggaggagatctccaatttgtcccaaagcaccggaaccagaaacccatccacgcgccgcccacacgcatttttccggccggcgactgcatctcacgcgtcggcgcgtgagggcgcgtgagccactttccggcgacgcgcttcctcctccaggctcgcctgaagccgaccagccacccttcctacctgtttgtgcaatccgagccctgcacgtgcctcttttggggttcttttgcttccgcgggccctctgatcagattttccggcgtccttcggctattttttctcaactccagtccctgcacgtgccttgaaaagtgttcttctacctttccggtccatgacaaaatacggaatggcatcatcacaagtatccagcgtcacgtcaccagaatcagggggcagatctgaaattccaaaccttggtggcaatgattcctctcctattctcatcacaggacacaaattaaatggccataactatttacagtggtcacaatctgtgttgctgttcatttgcggtaaaggaaaggatgagtacctcactggagaagcagtcatgccagaaactacagaaccgggtttcaggaagtggaagattgaaaacagcatgatcatgtcatggcttatcaattccatgaacaatgacataggcgaaaatttcttgctgtttgggactgcaaaggacatatgggatgcagccaaagaaacttactcaagttctgaaaatacttcagaactgtttcaggttgaatcagctctacatgacttccgccaaggagagcagtcagttactcagtattacaacacactcacaaggtattggcagcaacttgacttatttgagactcactcatggaaatgttcggatgatgcagcaacatacaggcaaattgtggaacaaaagagactgttcaagttcttcctaggactaaacagggaattggatgatgttagaggccgaatcatgggcattaaacccctgccaagtctcagggaggctttttcagaggttagacgtgaagaaagtagaaagaaagtgatgatgggatcaaaagagcaacctgccccaacattggatgcctctgcccttgcggctcggtcatttaatagtagtggtggagatcgtcagaaacgggataggccttggtgtgattattgtaagaaaccaggccattataaggagacttgctggaagcttcatggcaaacctgctgattggaaaccaaagccacggtttgacagagatggcagagcacacgtggctgccaactctgagagcacctctgttcccgagccgagtccattcaacaaagagcagatggagatgctacagaaattattaagccaagttggcagtagcagtactaccggtgtagccttcactgctaatcgaggaggaatgaggccgtggatagtagacacaggtgcttctgatcacatgacaggagatgctgccattcttcaaaattacaagccaagtaatggtcattcatccgtccatattgctgatggttcaaagtcaaaaattgccgggacaggttctataaaacttactaaagacttatatcttgactctgtcctccatgttccaaacttggattgcaatcttttgtccattagcaaattggctcatgatctccaatgtgttactaaattctatccaaacttgtgtgtttttcaggacttgaaatcggggaagatgattggcagtgctgaactgtgttccgggctctacctcctttcatgtggccaattctccaaccaagtctctcaagcaagttgcgtacagtctcagagtatgtcagagtctttcaattctgtgtcaaattttaaggtcaataaagatagtgagattataatgttacactatcgccttggtcatcctagctttgtttaccttgcaaaattgtttcccagattatttatcaataaaaatccagcatcttatcactgtgaaatttgtcagtttgcaaagcatactcgaacagtatatcctcaaatcccatacaaaccttcgactgttttctctctagtacatagtgatgtgtggggtccctcccggataaaaaatatttctggcactcgatggtttgtgacattcgttgatgatcatactcgggtaacatgggttttccttatgaaagaaaagtcagaggtcgggcacatttttcaaaccttcaatcgtatggttcaaaatcaattcaattccaaaatacaagtcctcaagtcagataatgcaaaggaatactttactagtagtctcagtacttatcttcaaaatcatggcattatccacataagttcttgcgttgacaccccacaacaaaatggggtggccgaacgcaagaatagacatctcttggaggttgcccggtgccttatgttttcctctaatgttccaaactatttctggggggaagctattctcacagctacctatttgattaaccgtatgccatccagagtgcttacctttcaatccccacgtcaacttttcttaaaacagtttcctcacacccatgccgcctcttctgatttaccactcaaagtatttggttgtacggcattcgttcatgtgtatcctcaaaatcgtagcaaatttgctcctcgagcaaataagtgcatttttctagggtattctccaacccaaaaagggtacaaatgctattctccaaccaacaaaagattttacaccaccatggacgtctctttctttgaacatgtcttcttctatcccaaatctcatgttcagggggagagcatgaatgaacatcaagtttgggagtcttttcttgatggtgtaccttcttttcactcagagtcaccaaatccttcccaattcgcgcccactgagttgtccacacccatgccgccatcagttcagccagcccagcacacaaatgttccttctcccgtgaccatccagtctcccatgcctattcaacctatagccccacaacttgctaatgagaacttacaagtttacatcaggaggaggaaaagacaggaattagagcacggatcacagtcaacatgtggccaatatattgactccaattcaagtcttcctgaagagaacataggtgaggatagggctggagaggtgttaattcccagcattgatgattctactttgccaattgcattgaggaagggtgttaggagatgtacagatcatccaattgggaattatgttacgtatgaagggttatcaccatcttacagagcatttgctacttctcttgatgatactcaggttcccaacacaatacaagaggcattaaaaatttcagaatggaagaaggcagtacaagatgagattgatgcacttgagaagaatgggacgtggactatcacagatttgccggttgggaagaggcctgtggggtgcaagtggattttcaccataaaatacaaagcagatggatcagtcgaaagattcaaggctcgtttggtagctagagggtttacacaatcctatgggatagactatcaggagacttttgctcctgttgcaaaactgaacactatcaggatccttctctcattggctgtcaatcaagattggtgcttgcaacaactggacataaaaaatgcgtttctaaatggggacctagaagaggaagtctacatggaaataccacctggtttcgaagaaagtatggcaaagaatcaggtttgcaaactccaaaaatcattgtacggccttaaacaatctcctcgagcctggtttgatagattcacaaaagcagtcctgaagctgggctacaaacaaggtcaggctgatcatactctatttgtcaagaaatctcatgccgggaaattggccatattgatagtctatgtcgatgatattattctatctggaaatgatatgggggagttacagaatttgaagaagtatttgtcagaagagtttgaagttaaagaccttggaaatttgaaatatttccttggtatggaagtggctagatcaaggaaaggaatcgtagtctctcaaagaaaatacatactcgatcttcttaaggagaccggtatgcttggatgcaaaccaattgatactcctatggagagtcagaagaaacttggtatcgagaaagaaagtacactggtagacagggggagatatcagcggcttgtcgggcgcttgatttatctctcacacactcggccagatattggctttgcagtgagtgctgtaagtcaattcatgcacagccccactgaggaacacatggaagcagtctacaggattcttagatatttaaaaatgacaccagggaaaggcctattcttcagaaagacagagaaccgtgacactgaagtatactcagatgcggattgggcaggaaacatcattgacaggcggtccacttccggatattgttcttttgtctggggaaatcttgttacctggaggagtaagaagcaatcagttgtagccagaagtagtgcagaagctgagtacagagctcttgcacagggaatctgtgaagggatttggataaaaagggttcttagtgaactgggacaaacgagttcatctccaattctgatgatgtgtgataatcaggcagctataagcatagcaaagaaccccgtgcatcatgacaggaccaagcatgttgagattgacagacactttatcacagagaaggtgactagtgagacggtcaaattaaactatgttcctaccaagcaccaaaccgcagacatcctcaccaaagctttacctaggcctaacttcgaagacttaacttgcaagctgggattatatgatatatattctccagcttgagggggagtgttgaaataatgccaaagttaggactttaatttaggaataaaaaaggagagatcatttaggatatttccttatgatttagtttcctaattttaggagagaattaaactagattgattgtttcttattcagtcatttgtgtatatatatgtgtatggtgtgtaccgattcattatcaataaaggagttcagaaattcttcacaaacaattgcttttcttggataggcaaatagaaaaaaatattaaacaaagcctaacaaaaagggagggcatcctatgtccacaggggatagacaagagacaccaaaagaaaagaaaagaaaagacaaggaaagaaaagaaaaccacctagccaaaaaataggaaagctaaaatcaatgagccatagactatcaatgaaatccaataatgtacaattttccatctctaatgtggtatcatggacggatttgatgaatatctccttcaattttttatcaatagcttttcctcattgaaaattcaaccattacctcccatatgcaccaaaactagcaaaggggagccatttgccacaccttcctctgctgcttatccaagccttgaatcttcatcctaactagaacactttgatatatacacgataacatattttactgctgtctactccaatcacaacggattaaaatgtgatttgctaagtcttcattagcttttcacagactatatctgttcaatatcatccatcctttccttatgaagagatcaatggttaatatcttcactcataccgtctcaaaggcaaaaagataggtccttagaggagcataagtaccctaaactttctaatttcctaacctccaaaatttttctcatatcatgctatcaaccaattcactagatgcatctttcttcgttctaaaggacgcccccactccaataatagtaaaacgtataaataaattctgcatgcgttttttctagtctgattttaacattcttaggaatttcaaacagggacatgcaatatagtggaaggctcaagagcactcaacaaatattgcttcttctaagaggccaatctcattttaaacttctccttaatcaagtcccactctgcacaagtcttataagacatttcgaaaggcaatcttaggtatgtggtaggtaggtatccaaccctacaaccaaacaaggaaactggtctatccactccagctcaccagaaggaattaccttgcttttacagtttgattttcaagcctggtacaaagttaaagcatatcaacactatttctagtatttcaccacctctcactagcctcacaaaagtaaactgtaatatgtaaataagagatgagagactttcatcccttcttcccctttttccccttaccttaaagccactgataaactccgctgccttgttcttgaaatgagatgagtaagtgcttctataatcaaaacaaaaagatgaggagaatcaaatcaccttgcctgaagcttaagaactctgtgatcatactaatcactagaatccacatccttaatctagatatacaaaaaatgaatgcatgtatccatatataaactattatttgggttctactttataacaagttatgtaacttttcttttcttgtcttttcctttccatttttttaagttgtttgaggggctaggattataaagctttaaggaaactagagggtctagcttgtagagttgttgtggccctcatagaaataattctgcaaaggattttgttaatagttctttcctaatctagctacagagaattgtttctggcttgcaaacctagaatcgattgtctttgagttcaaacttaaattgcatcacaatgtcttgctatttccttatttaattgctgaaaatccattagaacgttttcattacacatgttactaaaggtggactgtagatttaatgtcctttggtgcatcgaatttgtattagagcccaaatcctagatctagatcatgtttgaacttgatggagtttatggggaaaaaaaggaaataatttttttttggcaatggataggaatttttaccttatttgcttattctaaagttgggatttacttgttgagtctatgaagctttgcttcttatgctcaacccataatgtcctccaaacagaagagactccttcctatatgaatagcaactggatgggtgagagagagttcttggttgctagcagtctaagatagttaaaacgaggcatataattggagatttattgtgagccatacaaatgcttctgactcgaactagtgaagggccataagagattcctgaaggcaattgtgacctcttgagtatacttgagtagtcttaaggatgagaaacttataagcgtaaaaaacccttctcatgatgttaggcatggagataatctagagtgaggtaaattgaaagatgttcttattgcatgcacttgacttggacgggggaggcatcaaagtcaaaaatggtttttggaaagatgtatgatcaagattgtttgaacacttaactataatgaacattccttgggtaatccatgtcaaattagtattggtgggcttctagtaatggcacaagcacaatgatgagggcattttctaaagctatttggtgtcatatctatgttccatgagttcgggtacaagtgtcaagtgcgggacctgtttgagtatgatctcacacccatacctttatcatgttgtgttatctgaagaaaagtgtgagttctcaacaaggatctcacacccatacccttgtcatgttgtgttgacacaggtaagttgggggaagttgaagattttcaggtatcaaagtgcagtgttgaccatagaggtgtatatcctagctttactggaagggttgagagaggctgtttcttgggagcctcaagcttgtttagaaatgaaattcctttatctgtaatacggtttttgttgcttattaaaaaaaaggataaagaaaaaagcaaatccaaaagtgatttttcttgactgatgtgtattaaaggtaacaaggagcctatagattgtcttcttctatgaaattaccttttttggcctgttgggataatttgggtggcctgcagggggcagactctgatattgtagatcttcctcaaaggattgtatgaaggagaaagggctggttgtcttggtttatgcctgctttgcaatatttgggttatctgtggaaggaaaaactggatttttgaggtgagagtttcctctgttacattttaagcttctgtatgggccagctgttgaatttcattggtgtcctttaagctacatcatggccaattaaattttaacgtgctctagtgaatcagggaaaatccaatagctggagtttggagtcctccagaaattttattttgttgattggcaaagtgagagtcggcaacattctttttaatctcttgtaaactcacagaatttaatggggtgtgattttgtttccaaaccttagcttagagctttactagggagtttgaagaaagtgataatgaaagaactcctagggtgagtggtggagggtggatgccggtgtttttatttattgggcaaagtaggtatctttaggttcttgatgctatatatatgaaatggggaagtttagaggtattttacaaagctttttgtgcataacccatatgcatagctaggagaggatcttataagagattatatggctttggagaatttattaaatttctccttttgtttttttttccttagtttcatcatcaggtttcaaagtgtaaataccaaatacgatataatgcactaactcggtgctgaatcggtaagacttggatgactcgattgaaattccgagttaacttgaccgagattccgagttaacttagccaacttagttaggttattgaaaaaatttacaatcagtacagattcccttttctttcccatcacaataaaaataaaaatattttcaaagaaatcaaagattcctctacaaaagaaaacacctgtgattttgaaactcaatctttcaacgcatcaatgagaacatcaacgaagaagaagtaaaaacaaattgaaaccaattggtaaccctttcggaagcctttaaaagtggaaattagcataggatgagggtacatgattgaatttacttacgtaaccataaatcgagcattgttggagtgtagcctacactatgtaggtgctttggtacgtcggtggtggtgattggacactgacaaggaaaccttcacagtcatcttcctctagtcgtgggtgtgtggtatcatgtgactgtgtatggatggatttggtggagggcttgaagcagtagttgtggtgtgtgggtggaaggcttgaacttgaagcttaaattggtaaagttgaaaatttatttggatgttgtgtatggtgaaagttgaaattggtaaataattaatttttatggatttataattttatatgaattgtgtgtgtatgttggaagctgaaattggtaaaattttaatttatatggatttataattttatatggatggtatgtgcatggtggaagctgaaattggtaaaccattaattcatacggatttataattttatatggatggtatgaccttacaaaatctgagacaattttgttttaataatttttttgagcttatttaattgtacctatttttctaataatttacgtaatatttttataattttttgaactttctaattatcttattttgtttatcgtccgatactgagttgatacattgagaccgatatgtcttgggaccctccgagtcggtgatcgatactacaactttgaaccatgttcttcatagcctattttctgtgattttgcatcttgttggcttaaggacctctccttgaaacccttcagtggtaatcctttttggaattcataattgttgaattaccaattttcttaaaagctagctgttaggaattgggtccataaaatatatcatgctcagacattgtcctacatggagagacaaaaggcagacaggcagacaactaattcataagttttgtgatcaaatataattatacaaataaatagatgaaaggaggattcaaactcaagagttcctgttaaccagatctttgatactctgttgagttaccaacctttttaaaagcttgaattattaggacttggacccataatgtacattatactctaccactaatgaagtcttttttttttctttttcttttttttttttaaaaaaaggaaaacatgcaactcttggatcattcttacttatttacatttgtgttcaatgatgacatataaataggccaagctggtggaactgtttcatttgtgtcatatcagctttctgttctgtcatctagctctatggtgaaattctggtttatgccagatgtgtcttagttattattgtagctttggcctcatgctgagttaatcatactaggcaaaacctattgccaatgttacacacccccagtacattgctgcctagggagattgctgctcaagtgagctgagacatgagatctttcctaaactttgcctgaatctcctataactaaatggcacatggactctactactagaccacaaggtcgctggcagatgcatcacagttgcatctgttttggggtttttctctttccataacatttggcctatggttgtttatgggtttaaatgtactattttcctcattttccatgatttaaacttactgttgagctagcaagcctacaagggaacaaagtaatgtgaatttatgcctgttttgttcttaccagtactgttgtgagatggtatttttgctatttgcagtttttattggaatgttacgttttctgcatgcctcaagttcaagccattattttctatacttgtatttttacattcttgaatctcttcattgatgaagcttgaagttgtacgtgagcttttagttggaaatct

SEQ ID NO: 11818 - DNA, 9816 bp, Vitis vinifera
  Intron number 5 from transcript GSVIVT01034499001 (locus G SVIVG01034499001) derived from phytozome v7.0 (chr-ID chr1 8; pos 20267456 to 20277271 reverse strand)
gttaaggctccaaagtgtaagttctttgaactcgaagggtttaaggacaaaacctttatagggagttggttatatgtttccactacacttagatgcttcttaattttgctgattcaccaaccatatgaaaccttaattcttgaattcttattgatataagctgtaggaactcacagtgttatccaagacaatcatttgggttgcctaggatatcaggtcaggcggggtagataagagtcgcctcttgaagacccaggcaaggcggctttaaagaagcaatgcctaggtaatcgcctcgggataaggcacaaggcatagaggcatcgcctttgaccgtgagttaagattaaacatgcttagattataatttcattcaatctaaaattggattaaacaaagtataagatgaaatatcatatcatcaatcataaagataataagatggagggctatcaatctagtcttgatggaagtgatgacaattttaatttcaattttgactatgatgatgatatccaaagcttctttagaatgttcaatctctttattttgttttttattatgttttttagatgtttgaaaaattagaatatacctttaaataagatgaatatttctaaacaatatgatgtttctttttatgtggagtataatatttagcactttgaataaatattactatttttttaatataagacattatgagggataaaaaattaattgtgttgactgttgaagacaacacttatattggttgagtattgaataggtaaatatatgtattttttttatcaccttactatagtcaagttgtcgccttgttttttgcctttcaccttaggctaaaaggaatggtatcaccttgacatcgccttttgcttttaacaacactaaacttagatgatgtttgcctcacatgtggcagagagtaacaaaacaagtgctagattgctttgccagtctactagaaatttcatattagttcttgcttggccatttcagtgttgcaggacgtttggatctctgaaataaagaagtcatttaaaatatatctgagagttgtatttgtaggaatattttgctgatttagtaaaaaataaaacataacttatctgattctagttcatcaaacaactagtgacaagaaaagttcaggaactgtaatagctgttgtgattacacttttatagctcaaaaatacttttggtatgacaagcattttctgcaagtggacattatcagggagcagaactacttgtcaagtgcaacagaatattgacatcataaaaataaagctggttcattatgtgtaacattgcatacatccagaaactggaaatactcaaagtagaggactaagattaaacataatgaactcactctctcagaacaaatcattctaattgtaaaaatactgttgaaagagagagagagaaaggagaaaaaccttaattctcattcatgtaatttctacttacaattgagagatatatatatacaaggctaggagtcctaactaccatacatgtgacctatattaacaaggaaagataatatactataaatacattatattcaacactccccctcaagctggagcatatacgtcatatgcaccaagcttgttacaaatatatttaatcctaggacctctgagagatttagtgaagatgtctgctagttgatcatttgaattgacaaaacttgtagcaacacatcctgatgcgatcttctctctaatgaaatgatagtcaacttcaatatgcttggtcctttcatgaaagactggattggatgcaatatgtaatgcggcctggttatcacagatgagtttcatctgttcatcatttccaaatctcaactcctgaagaagatgtctcaaccatatgagttcacaagttgccaaagccatagctcgatactcggcttcagcgctagatctggccactacatcttgtttcttactcttccaagatattagattacctccaataaaaccacagtaccctgaagtggaacgtctatctgtgggtgagccagcccaatctgcatctgtgtaaccaacaacttgagtatgacctctgttctcgtacaatacaccttggcctggtgtacttttgatatatcgaagaatacggattacggcatcccgatggctatcacatggtgactgtaggaattgactaacaacactcataggaaatgaaatgtctggacgagtaatggtgagatagttcaatttacctacgagccgtcgatatctcccggggtctactaaaggctccccctgtcctggtacaagtttgacattcggatccataggtgtgtctaccggtttacagtctaacataccggtttcttccaggatgtctaaagcatacttcctttgggaaaggaccacaccagaactggattgagctatctcaattcccaagaaatacttgagtttccccaagtctttggtctgaaagtgggtaaaaagatgttgctttagtttctgaataccatcctgatcactgcctgtaatgacgatgtcgtccacataaacaaccagataaatacactgccccaaggagttatgatgataaaaaactgaatggtctgctgtactgcgaagcatgccaaactcttgaacaacagaactaaaacggctaaaccatgctcgaggagattgtttcaagccatatagagaacgacgtaacctgcacactaaaccagactccccctgagcaacaaaaccaggaggttgctccatataaacttcctcggcaagatcaccatgaaggaagacatttttaatatccaactgataaagaggctaagaacacatagcagccatggagagaagcaagcggacagaagcaatcttggcaacaggtgagaatgtgtcaccataatcagaaccataaacttgagtatagcctttagcaactaagcgggccttaaggcgatcaacctgaccatcaggaccaaccttaactgcatagacccaacgacaaccaactgtagatttaccagagggtaaaacaacaagatcccaagtgccattagagtgcaaagcagccatttcatccaccattgcctgtcgccagcctggatgggaaagagcttcatgggtgctctttggaagagaaacagaggatatagcagaaacaaaagcagaatagggtgaagataatcgatgataactcaaaaaattgtaaataggatgaggattacgagtagagcgagtacctttccgaacaacaatgggtaagtcattaggagaaggcagagccggggcaggtgaagccgaagggataggaagtgagtcagcaggtgcctcaggaaaagggagaggagcaacgacacgagggcgacgatgataaacctgaagtggtcgagggggcatagcatcaggtggggagacaatgggaatgggcaagacttcagaaacaggaagagactcagaagtggtggaaaagaatggtgagtcctcaaagaaggagacatcagcggagataaagtatcgatgagtctcaagggaataacaacgataacccttctgaagtctggaatatcccaagaagaggcacttcatggctttggcggaaagcttgtcctgtccaggagtgagaatatgaacaaagcaagtacaaccaaagacacgaggaggaaggaaataaagtggttggtcagggaaaagaagggagtgaggaatctgatcgtgtaagacagaggagggcatacgattaaccaaataacaagcggtaagaacagcgtccccccaaaaacgaaaaggaacgtgactatggaggaggagagtacgagctgtctcaacaagatgtcgattcttgcgttcagctaccccattttgttgaggagtatgagcacaagaagactgatgaagaatcccatgatgagacataaacgaagtaaattgggttgaaaaatattccctggcattgtcactgcgtaacacacgaatagaaatattgaactgggtttggatttcagtataaaatatctggaaaatagagaataactcagctcgatttttcattaaaaataaccaagtacatcgagaatagtcatcaatgaaagtgacaaaatactgaaatcctaaagtagacgcagtccgacaaggaccccaaacatcagtgtggacaagctcaaaaggagactttgcccgattattcaaacgctttgggaacgagacacgagtatgtttcccaagctgacatgactcacacggaagcgacgacaaagtggaaaaacgaggaaccatcttctggaacttggagagactagggtgtcccagacgattgtgaatgaggagaggagcatcagtggaaatgcaaactgcaggagatgaatctgaggtgaggtgatagaggccttgagactcacgtcctatgccaatcgtcttccccgtactccggtcctgcaaggtcacaaatttatcagaaaaggtaatagaacaattaagagtacgagtgattttgctgatggaaataagattaaaaggacattcaggagtataaaggacagaagtgagaggtagagaaggcagaggaagggccaaaccaatacctttagccacagtttgagaaccattagctaaggtaacagtaggtaaatcagaggtagtagtaatagaggagaaaagatccttattaccagataggtgatcagatgctccagaatctagaatccagggtccaagagaagatgtgtgggtaaggcaggcagaggcattaccaggctgggcaacagaggcaatagaagcctgagatgtctgagatgcggaggagctcggaggctgaggcagcggagaatcagaggactgggccatatgggcagtgcgaggaggtcttccatgtaactgatagcaacaatcgcgagtgtggccaagtttattgcaataggtgcaatgaggacgttggcctctacctcgggtaccactgcgtcctcctcgagaggtagtttgagaaactaacacagaagaatctgaagcgctatcagatggcaaagtctgagtggacgagatacggaggaggcgagcaaacacatcatccaaggacgaaactgatgaactaccaagaatctgatcacgaataggctcaagatccggacggaggccaataagagtaaggaccatgaagaacttgtcaagctgtgtttgttgagccccaacatcaggagtaaagaggcatcacagtcaagaactgctccttaagagaggcaatctgaccaatataagtagatagatccaagtcctgttggctgagatggacaatagcagaagccaccttataaagacgctggatatcattcgtgtataatcctttggcctgagtccaaaatttaaaacaagttttataggcctgaagatgaagaagaatccggggatcaaccgattgccataatacactacataactgtgcatctatcttcctccactgtacgcggtcaacctcagggatatctgcctcttgggtaaccaagtgatcctcatatccttgacccataaaccaaagttcaatagaggcagaccaggaaagataattttcactgccaaccaatttctctgaggtaatcataggagatccagagataacagaggtaaagatctgatttttggtggtcatattcacgtatttggatcgaagagagccctaatacggcttcagattgcggcgtggcaccaccgaaaaagggagacggcctcagatcgcgacgtggtaccaccagaaaggtagaagaacacttcccaaggcacgtgcagggattggggtggagagaaagtagccggaacttcgccggaaaggctgtttggagggctgacggagacaaaaatccccaaaagaggtacgtgcagggctcggatgggagaaccaggtaggtagggatgctggtcggcggcaggcgaggctggaggaggaggcgcgtcgccggaaaaggcctcacgcgccctcacgcgccggcgcgtgagatgcagtcgccggccggaaaatggcgcgtggaccgcgcgtggatcctcttttgatgccggtgccttcacaaaagttggagatctcctccaggcgctccttctggtatggtcagtgtcggaaaaataggtcgccggaaaagttcgccggaaaatttcgccggcggtgagtggtttctaacgatgattcgactgaccggaaagtgttgggagatggggagggtgaccggaaagaaacacagtcaccggaaggtttcccggagttgatgacacgggaaacaggaaaaaattaggttttcttccttggctctgataccatgttgaaagagagagagagaaaggagaaaaaccttaattctcattcatgtaatttctacttacaattgagagatatatatatacaaggctaggagtcctaactaccatacatgtgacctatattaacaaggaaagataatatactataaatacattatattcaacaaatactttagaaggtaaggtaatcaattttattttattttccttcaatgagtattactaattgaaatcttgttcacacaattgctgaggtggcatggttggagtaagaaaaggtgaaaagaataagaaacatagggcatgtttgggaacattttcaaaaatagttctcaagaaaccttttttgagaataattctcaaaaataattcttaattgctttttaggaacaaaattctgtttgggaactctaatatgaaaaatagttttcttgacttattttccatggaagtactatgcacttatgtataatgcaaaagttttaaaagtattctctatattttcatttgttgttcaaaacactgtacacaaaacagctgaaaacatttaaaatttggtcttaataatagtctcttttcggaacaaattctcaaaaaactgttttttgtcaaaagtttgccaaacatgttttcttagttagaaaactattttttgttccaaagaatggaactattttcaagaataatttccaaagacagccatacaaattttgttttccccaaccaccacttactacctaatacgatagtaaaataggtggtaaagaagggagaccaactttggttttaaaattactttgtcaagtttgccaatttactacgtatccttgtttgtcattccaagaaaaatgagttcaagacttgagaagatacaaagagacttcttagggtggtcatcataaaatagaccaaatcttgttaattggtgtagtgtttgtatggagaagaaaagtgaaggtcttggtattagaaatctagttgacaaatgcaattgggtggtcacaatggaatggttgaagctctttggaaaagggttatagcaaggaagtttggggaagaagaaaggggatggagctcatttgtggcaagggaggcaaggagtgggcttgtggagggtaattagaaaaggatgggatgctgttaaaagcaaatcttttttcatagggatggaaggagggtaaagttctgaaaggattagtgtggtgactcaactttttccctccctttttgctatagccattgtaaaggattcttgggtagcagatatgcgaaagcagtcaatggaaaggtgatgttagagccattgttttgtaagacacctacatgactagagctcaaaaggcttggagaatttttcttaagattgtaagtgaaagtggtaagcaagaatgctagggatagggtggcttggctagaattgaagagcagtatgtttcaataaaatccttgtgcacctattgaatgtcgagaagacataacacccctctgaaagatgttatttagaacccttgagtacgaacaaaagtgagattttttacatgggaagcaacttggggcaagatcctcaccatagatcatttgaaaaagagttagaccatggtgaacgaatgcttcttatgtaaagattagggaaaattaataaaccacctattgcttcattattccaaaacaagaatcttgtcgttgttcgagtagaatgggtgatgccaactcaagttaaaggagccctcttaagtgacaggggtcctttgtgggaaagagaagaaagaaaacatgtagggttgcctccttatgtgttttttagactatttggaaggagagaaataataggtccttcaaggacatggagcaaatgaagcactgaatctttcttctgtttattttctgggtagggatgaagccataatgtcaatggtagacttagtcgattggttgggtgttgtgtaagtgatagggtcattgtctttttgcattttgttttaatcttgcctttcagtgccctagtttatgacgagtgtactccagtgcacacttcttgattagcctgttaatgtatcttttcttgtttacttatcaaaaagctattttgttaaatctaaattaacattttatttgaatttattcacccataacatgtctatgtatcatataaactagtaattagctgtcatggatagagcatttgtgtgtttctgtttccaaaaattaaaataaagatcctacacttagaaacttcaaagctaaaatttaataaatattttcctcatttcatcgaacgattttttgaaatgctttagatttcaatgttgaaatattgtaagtaaaaagtattttatgaaaaaaaacagaaaatagtgttcatgctagtaattgattcaacttaggaagtctttatagaaaagctggtttggtctctgaattgcaaaagaaaaaattccatagtttctcagatatgaagcaaggaatccttaaaaatagtattgagctaatctattcattatttagagttgatacatgtcacattatcctttacattgtaattgttgctcacatatattgcatttatggtcatttgtattacatctagtatatactgacttgatgtatcttagcaattctttgtgcactatatatacttattgatcttgtgtttgggggtcatggactggattaattccaagtacgccaacacttacaacttcaagaaccttcaagtagctctagataaaagtgcaaattagtgaccagcaaaagaagggaacactggaagagagttagggtgactgctaggtgaaattaactagaaatttatacaatgctttatagatctcagtaggtgtcttaaccaaacaaggttgcccctatttataattggaagaatctagaacatagtttcctaggttctctgagaaaccttcttctagatttctagattattcttacagggtttttaccattttggggggttttataccatttcagaagattctctacaattctggacaattctaaaacgggtaactgcttctatcaaagttaaggtgaacaagttggtagcagatttgagcaggctgtgacattatagacaactaatgaaaggtccactgaattgaattaggtccatggatatcaaaaacatgcagattcttgattttcattggttcctttaaattgcattggtatatcaaagatttcatatcaatgggaatcaatcaaacattagaaggtgaaatcttgttcaagaccataaacaattggaaaagttcttccatttctttgacagctactttaaaacattaaagtagctggtttagggttaacaaagaaaattttcctttatctgcaagtcatcctagtcccttttatttttcatttccctttaactaaatgatctttgtagaaatagggggaaaagaaggattaactgagtacagtttttaaactctctcttcctagtatacatacatatttgtgtgtatctagcagctatcatggaactaattggagttcagttcttttatctccag

SEQ ID NO: 11819 - DNA, 2725 bp, Vitis vinifera
  Intron number 2 from transcript GSVIVT01034951001 (locus G SVIVG01034951001) derived from phytozome v7.0 (chr-ID chr5 ; pos 390458 to 393182)
tctaagtttcttattatcctggtcagccctatttctaccttcgctctttatgtgattatgaattattaagcttctggacattctgttttgtgtaagttaagagagcttttgggcaacccatagagtttaactactcaactgtattttgtgcatatattcttcttttaaatgcatgattttgaatggatgagtcgcaaaaagagaagtcatgtcacaaaagaatggccattcctgaaatcctaaagtttattctataccaccagttgtggtggtggttctcattttctcctatggcctgggctgtgtgatagatttgtacattaaaatgctaggcagaagtacaacacaatggtgtgtctagtatttgctaactataatggggaatgctgaagcgaaatgcccaatccactgttttagtttctctataagaatagtcagtttacctgaatttctggaatcagaaaatgaaatccaaggaaatagcttccttgcaaaatcctctgaagaactcatgtggagggtatcaccacccatgaggatcattagactttcatggctgttggcatagatctattaccttttgcataccacaaaacagactcttggattccattccagctcttggttcactttagccaatgtaaagcatgggctaccttgatttgggttcttaagtatttatagcaaagtccactaaatgttgactcaacctttagatgccttttgtaccttgtaactcgaatgcctatcttgaaagtaggaactttcagaacttattgggacaccgtattaatattatatgtattaattggtatacataagtaacataacatgaatttgaggctaaccatatagtcaaagtaagcaaggggcctttttaactttaccagtactgaagaagcttgcattcaaccacaatcagttcatgctgaagaacttagctgaacatttatcataaacattgaagaataatatcaaatcaaatgtaagtgtttgtgtttgtttgtgcttttgtgcgtgcgtgtgtctgatagaaagatagagaagagatggcactgccaaatgaaatatgcttgtgtgtgcatgtgtgattgagagaggtggacaaatagtttgtcttgattaggctgcatctgaaagctttatttttttattatttatattttattatgtccttttggccttttcatattatattcaacatcatcttgtgattataaattcaatagcaaattgctaaattttattttacatgtacacatatttttctttttgataaatattctatgcatgtagtttgtgttaaaatcattatcctgaccatttatctagtgttttgaacaccaaaaatgttgatggagtgcctaccatcatattgtctaggctgttggttgagctgcactaaaaaataattaggatgtattggcaccatcaattttatgaaccattgcatggactcaggtgctttccatgttatcagtgttgggtgtgaattcaagtaatctctaaatcttaggacatggagacacaagtgacctatttttttttttcttttcctttttttgttcttgttccataccttaggctaatctgaagtatcaatctaatacagaatgtccaacatgtgtacttcattcacttgtacccatgcaacaaagcaacatgttaccataatctatggcaacttagaatgaattaagaacttgttttctttatcttttttgaacacttctgttgggtacttatgtgatcaatagacatgttgaagacatattccatgttccaatgtttttcatagtggccaacaaagacacttcaagtacctactaacctaggatactgataaagtattcacttcaagtatcagtttcctaaacattgaatatgtcagtattccaaaatgtgggattcttttatgtttattttcccattttatagaagttaactgcagtcaaataaagtatgtaacaacataacatcgtattctacgctaaattgatttcatatgttctatcaggtctccattactttacatcagtagctttttagtagtgcccatatttatattgtatacattttatcatggatcaggtcttaagcttgtaatccttatttgttgacgtctggtatcatgttaaaattgtagtgagtttattatgtttttgaggtatagaactaatgtgatatattttgttcttcacatatcagataaaatgctcaaaaaatgtggcaagtgtatatttgattttctgctttcacaattgtattgcagtagtcatgtttagtttgctttgtctatccaaaatgatgataatgacaataacaacagcagcagcagcagcagcaacaacaacaacaacaataataataactcattatcctgaagtgcaataatttgaagcccttcatttctaatgtgctctctctcattactctaatgacgtgaaatggaaaataagtgtctgtaaatgccctggtccgttaacactctttatcaatgaagatgaactttttcttgtcttattttgtttgttctttatggatatctgtttgcacttccacatgtatttgtccttccttcactttttccttgaagcagggtgtgtttgaattatcatattattttgtaatttcctttgaagtcttcttataaattccttagattagaagttggttcttaaggtattgtttgaatctttgttatttccagatcgtatctgttttg

SEQ ID NO: 11820 - DNA, 21438 bp, Vitis vinifera
  Intron number 1 from transcript GSVIVT01011374001 (locus G SVIVG01011374001) derived from phytozome v7.0 (chr-ID chr1 4; pos 29102151 to 29123588)
acatacttgtgatgcaatattaagaaattatcataatattttacgatttgtctctactatatatgtagtcacctataaatgtcaattttaaaaatatttaatgatcaaagaaaattaagtgagatataattaaaaaaatctaaaaattttatttgcccattctaacataatagatattcatactactaattttattgagatgagatacctagttgatatagtgtccttgcttttacgtaaaattagacattagatttacttaaattattttcataatagtggcatatttataaaatatatgaaactaattaaattgaataattgagataactatgaatataagtaggacattaatgctccgcgttttattgaaatattatagaagaagcattatttcggtttcatatctaaagtttatttttttttttttccaactccaattggtgtatatagatccgattttgtagtgaaggccggcagccaataggatttccttcacagaaaagaatggacacatgaactacacagaaaccagaccaagaaatgagtgtggtgttctctcctgccttggctggaattcccacatcacaactgcccttcttcactccaaaaccaggttcttttctcttttcctgtttctcaattcccacaattctcattcatacttattgtaatttcccccttgttcagttttaatatgtccgtatcctaattgatcttcaatgctcttagtcaagtccaagagttgcagattgatttcttgggacgtcaattccattactaattgcagtaataatagtagctagagagctcaattgccgttcaattctcaggtcacaaggtcaaatattattattcttgtataagagaaaataattttaaatctttttgtttaaaaaaaaaaaaaattagttcggctttttcaaatatattcatcccacaacttcttatcctaagtttcccaaaaatatatgatagaatatttatcttatatattaaaaatatttaattacaaaggtcttttagtcttttttatatggaaataatatgaattgctttcttgaaacataaacttgcagcaagggaagtggttgtcatggtctacattttttcagagctgggtgttctgcattgaaaagaatcaggtagatgccaatacaagagacttgagccgtgtactgaaaaagagttgcttgacttggtgtgtttgtaagaaaaatggattattattattattattattattgcaatgtgaaaaatagatgtaccattacattaaaatgtaaatgtagattctaaaatttgtctttaatttatttttagattttgaacctaattttatccttaaatttcaatccaattacttgatttttattttcgatttacttgtaacatttaaatattaatttatattattttattttatttctatttcatattttattttatcttttattttctttttttcttttttctttttcccttcacttccctcttctcacttatcctcacgtacccacacttttacgggccttacctctcacgtcaggagacacgtctcctctcatctcttttcctttttttctctctccattttttcttcctttttcttcccctcattttttttttctttctttcccctcattttttccctctctttctcttcttcctctcgcccatcactctacccacacctccggcacggcaccatctcccctactcccccatctttctccatttttttttctctctcaacccaaacccactacactacaccacctattgcgccagtcaccgtggaccagtgggcgacgccacctccgacagccaacgaccacctcccaatcccctcatctcatctatcgtctcatcgctttttcatttttattttattttattttgttttattttcacaacatacagcatccaacaaccttccttcatctccaaaaaatgtgtaagtttatttatgtattttttttttttttttgctttgatttcaataataattgttagtaagatttgggattgttaattaacattaaacttggatccatttgttattggtgaaatttgttggatgatatttaatatgataatattgtggtatatttttgttacatttaggatttatatattaaattgggcttaatttattaaattaggtttggatgatgagatattaaatttttatacttaattgaatttattttattttattacattttgagcttcatgattatgtttgtatttaatttagaattttgaactaaggcttataacatgtaagatatttttgatgggctttatttatcaatttaggcccaattttattgacgaaatttattgaactaatttgatattgcttttgggcttattaaaaaactttgtacatttttaaaaatttattttgggctgatttttgttttgttgtgcccattcctcaatttatttgtttaataaaaattgttaagaaaattgatttttttaaaaataaaattgtccacaaggttaatttttaataaaattgttagaaaatgatttttaaataaatcctctttccttaattagaatgagattaaaagtaatttttcttaattggggttttaaataattttttttaatgagaataggatcagggtcattttcgtaaataaagtttgtaaagaaattaattattttgtaactaaaatcaaattgaaatacttttctaaataaagttgtaaaaatccattctttttttagtaaaagcaggtaaaaatcatttttattgtcaaattaatttttttttaaattcttttaataacagtaagtgtaaataactttctcaaaacaagaattgaatcaaatcacttcttgaaaataaattaaaacctttttgataaataaataaattaaaatcattaatttgaaattatttttaatggactccttcagaatttctagaaaaaccaatttttgaaatatcaatttttaaattagtttaataaattaatttgcttaattctcatgtcatttgttttgtacattcttatgatatgactttatcattatgtttatgtatatttatttgtgtgaccttaatcttgatattcataattaattaattaattatcacaatttcctcacactgtaggtatatgagtttagaggtatgttatgacttatcattatatcttctcgataggtaacttgaccttgaaggtaaacttagtttttgcagatatgtcttttccaaataaaaaatcatataaagttttctttcttattttatcttttttttaaaaataaattaaaataagtggtaaatccaatttttttttataaataaaaaataaaaaatttgacaaataaaaaataagtcttactgttggagtggggacacatgtggaaaacacgggtccatagtaaatttgaaaagacaatctccaaagttggctttaccattattattattatttttttaatttattaaagatcaattaaaaaaatataataaatttatagggcgctaatggatgaaatagtcaagtgtatttacaacaaatctcaagaggtccaaaatatgttttttttttaaataactgaaaaaaaaacaaatgaaaataaaataaaatataaaatataaacccttcatcactgatacaaaggacaaaaatttagaagaaaaatgtttcatcattaccttctctaattaaaaaaaaaaaaaaaaaaaaaaaaacctacatttgttttagccataataatcaaagaaaaaaaggtaaaagaggaaaatggaaggtaaaaaatgaaagtttccgatcaaaatatatatatatatatatatattttctaaattctcaatctaaacttgtgttaaaaatatttgtcaaagtagtatgtccatacaacatcaagtttcactttattattattattatttgttttaaaactataattattaaatgtgattttagttttaaaactatagtaatgagggtaaaaccaatattggtaactatagttttaaatttaaacctaaaaccatagttgataaccgtaatttttatattaaacaaaaaaagttaagtgaatgattacgttattacaaaggttagattggtaaatatttgggagaaaatctattttcattattttttttttcaaaagcacttgagaaatgatgtaaatatattaatttcatacgtgcacttagttattttttaaaatttataaaaatattaaggtaaggatattttgtaagttgaatacacgttcacacgttctcacttcatgatgtggtccaacactttgaccacgtcctccaccatctcacttccgctgcggttaaggagccagcaactgctcaacatggtggcaagaacaacgtggtatgatggaagccacgaatataaagattttaaaaggaaaaaatggtcccgaactcgtctgctattatcttcagaaacaccatctaaacaaagatagattagagtttggaaatcaagttttttgaaaccgactacaatgactggaggtaagtagactattcttagtctttttcagttttgattcatattgcaaatccattggaatcatatatatatatagcatgtaaacaacttacatttggtatcagagcacgttaaatcttacctctgttttgtattaattctgaatgaaaattcttgttattttgatctctctaaattatttaaacaatggctgcttgaggcgatccaaagggttggcgtaattctttcagaaaacgccattacaggcagccattcaggcgccgttttcgggtgcttcagcggtgctgttaaggcgccattggagacaccattgggagtgcattttggggctgcaaccagcgccattttcaggtgccataccagccccgttcaggcaccacttgcagcaccattgaaagtccattttttggtgctacaaccagtccattttcaggcgccataccagccccgttcaggcaccacttgcagcaccattgaaagtccattttttggtgctgcaaccagtccattttcaggcgccataccaaccccgttcaggcaccacatgcagcaccattgaaagtccattttttggggctgcaaccagtccatttcaggcgttataccagtgccgtttcaggcgtcttttcgcgccagcaagaggcgccctttgggagtgccgttcaggcgctattcgcatcggttggaattcaccagtgaggacttacttgctggtgatgttggtagccggaaggcactcatgaggctctttatgcctctgatgcaggtggctccatggcttgctggtgatgaagcaatccacaagggtggcggtaaattagaacctagagagagaatgggttctattaagtgttaggccatgtattaaatggaaatttgggccttggtataagaggctattgggctcattaagctcaatgcatgccaatagcccattttacaaaattatgggctttaagttttggttcattgaatgatggttaaaattgggccagtttaggccctttttggcccgatttgaatttttattttaattttattgggcatagaattgattgtgttttatttggatttaggcattcattcataatctgaaacctttaaattattattattatttttaaattatcatgtaaattttatacatgcaaaataaataattatatattgttttatatgtttgtagcctaaattaaagttgtagctcttaatgcatgcaattattgcctgaattggagttagatatattaaaattatatcatatagttttaatgtctagtgaaaccatatgattttttaaataattaaggaatagccatagcatccttaattatataaaaattatatattaagtaaataaggatcacattatggacattaattgtaattaattatataaatatggtgattttgccccatagggttttcattatgtttatataattaattaggataaaatattaaaattaatttttcctaatttacccacaggagttaggaagaattaatttaataggtttatcataaagattatagacataaaatatcaaactatattcataataaatttcataattcaataaaatagtttgataaagtctatcataaagataattaatttgattgaattaaagatttagcccacaggcaatttttaataaaattagattaaattttaagcatgttctacattggtaaagcatgactttatattaaagcctcaaaattttttaataagcttgtaatccttttgtgcagttttacctagcatatctgatattcgttgtgaggctcccgaacttagaggagataactttaagatatggaaggagataattcttcttcaattagggtgcatggacatagactatgccataaggaaagatgaaccacataagatcactgataccagcacacctgaagaaatactattgtacgaacactgggagaaatctaatcggttcagcgtgatgtacataaagacaaaaattagtgctggtatacgtggtttgatcgagcaacatgagaatgtccgcgaattgctcaaggctattgacgagcaattcgtcacttcagataaagccttggcaagcaccctaattatgaagttcacatccttgaagctcaccgctataagaggtgtgcgtgaacatatcatggagatgagggacattgtggctcaattgaagaaactcgaggtagaaatgtctgaatccttcttggtgcactttatccttaacactcttccacttcagtatggacctttcaaaatctcttacaacacacataaggataagtggtctatcaatgaattgatgatcatgtgtgttcaagaggaaggaaggttaatgatggaacaaggagaaagtgccatgctggtgacgcaaaggaaaggaaagaaaggaaaatctcaagctagtcaaaaagggaagcaacaaatttctcctaaatctgacattaagaaagacgaaaagtgttttttctgtaaaaagaaaggacacgtgaagaagaaatgtctgaaatttcagaattggcttgagaagaaaggtaaccctaccttatttgtttgttatgaatctaatatggttaatgtaaacaccaacacatggtggattgattctggatctacaatccacatttcaaattccttgcagggtatgcaaaacctaaggaagccagtgacaagtgagcaattcatcttatccggaaacaagatgggctcgcatgtggaagcaatagggacatgttatttaactttaaatagtggttttgttttagaattgcaaaagacctttatgtaccaagtttctcacgaaacttgatttcagtttctagacttgtaccgtttggatattcctttcatttttcagaaacatcttttagtttgatttataaatctgattgtgttgggaatggtatcttgtctgatggtctttattgtatattcttacaaaatgataccgctcataattcattacatgtccaaactggcattaagagatgtgttgtaaaagaggattcctctacattgtggcaccggagattaggtcatatctccatagatagaatcaaaagattggtgaatgatggggtacttagtactctagattttactgactttgagacttgtgtggactgcattaagggaaagcagaccaacaagtcaaagagaggtgctactaggagttctatcatactagagatcatacatattaatatatgtagtcttgacatggactctcatggtcagaaatacttcatctctttcatagatgatttctcacgatacatgtaactctacatacttcataataaaaatgaagctttagatgcctttaaagtcttcaaggcagaagtagagaaacaatatggtaaacaaattaagatcgtgagattagatagaggtggagaatattatgatagatacttggaagatggacaatcacctgggccatttgcgaagtttcttcaagagcatgggattgttgcccaatacaccatgcctggttctccagaccaaaatggtgtagcagaaagaagaaaccgaactttattggacatggtgaggagtatgcttagcagctcaaaacttcctaaattcttgtggactgaagcacttaagacaactgtgtatatattaaaccgagttccaaccaaggctgtcctaaaaacgccatttgagttattgaaaggttggaaaccgagtttgcgacatatgcgcgtttggggatgctcgtctgaagtgagaatttataatccacaagagaagaaactggacccaaggactattagtgggtatttcattggatatgctgaaaaatccaaggggtataggatttactgtccatctcacagcactaggattgtggaatcaagaaatgctaaatttcttgaatatgacttggtcagtgggagcgatcaatttagaaacatagtttctgatattgatcatacagagtctcaaccttccacttcaagcgatagattgtttattgttcataacacccctcaagtacaaacaggtgttgaatgaacaatcgatgaagttcaaccagtcattgaagttccacaagttgttgacaacattccagtagaccaagttgatcaggaattgcctaacacttctgaacaacaagttgaacctcatacttcctcggaagatattggtgcaaccttaagaaggtctgctcgaactaagaggtcagcaattcctagtgattatgtagtgtatctacaagaatctgactataatataggaaccgaaaatgatcccgaatcattttcacaagccatgagttgtaaagaatcagaattgtggtacaatgccatgaaggatgagatgagttccatgaagtgcaacgatgtttgggaccttgttgagttgcctaatggtgcaaaaaccattggttgtaaatgggtttttaagacaaagaaagactcattaggcaacattgagagatacaaggccagacttgttgcaaagggtttcactcataaagaaagaatcgattacacggaaaccttttctcctgtatataagaaagattctttacgcattatattggcattagtagcccactttgatttggaattgcaacaaatggatgtgaaaacaacatttattaatggagagctagagaaggaggtttacatgaaacaacctgaaggattcccctctagtgatggtgagcaattggtttgtaagtttaagaaatccatatacggtttaaaacaagcatcccgccaatggtatttaaaattccataacataatttcttcatttggttttgaagaaaatgttatggatcaatgcatataccttaaggtcagtgggagtaaagtttgttttcttgttttatacgtggatgacatcttacttgcaaccaatgataagggtttacttcatgaggtgaaacaattcctctctaaaaattttgacatgaaggatatgggtgaggcatcttatgtcattggcattaagatccatagagatagatttaaaggtatcttaggtttgtctcaagaaacctatatcaataaagttttagagagatttcggatgaagaattgttcacctagtgttttccctatagtgaagggtgataggttcaatctgaaccaatgcctgaaaaacgatcttgagagggaacaaatgaagaaaattccatatgcttctgtagtcggaagtttgatgtatgctcaggtctgcacaaggcctaacattgcatttgctgttggaatgttaggacgatatcagagtaacccaggtatagaccactggaaagctgcaaagaaagtgatgagatatcttcaaggaaccaaagattacaatcttatgtacagacgaacaagcaatttagaggtagttggctactcagattcagactttgctggctgtgttgattcatgtaaatcaacatctggatacatttttatattgggcggtggagctatatcttggaggagagttaagtagaccatgactgctacttctactatggaagctgagttcatatcttgttttgaggctacttcacatggtgtatggcttaagagtttcatttccgagcttagagttatggattcaatatctaggccattgagtatatattgcgacaattcagctgcagtctttatgacgaagaacaataaaagtggaagtcgaagcaaacacatcgacattaagtatctagccataagagaacgtgttaaagaaaagaaagtggttattgagcacattagcactgaattgatgatcgttgatcctttgactaagggcatgccaccattgaaattcaaggatcatgtagtgaacatgggacttagttcccttatgtagtttctattgtacaaactcttattatgatgttttctcatattgatgcgcattttttatttaattttgagaaaattcaacttcattggaccaagaatgaacatagggtttattcattaagtaatattgccacataaagtataatgttaagaaatgagtacactgtaatacatggaaggtaacactcgttaaatagaggacttatcgccatgattcatgtatttgttacttaatgggacaattgatggactgaattaggacattaggttaaaggtgtggaccaagtgggagaatgtaagctaaatacacgttcacacgttctcacttcatgatgtggtccaacactttgaccacgtcctccaccatctcactttcgttgcggttaaggagccagcaactgctcaacgtggtggcaagaacaacgtggtatgatggaagccacgaatataaagattttaaaaggaaaaaatggtcctgaactcgtctgctattatcttcagaaacaccatctaaacaaagagagattagagtttggaaatcaagttttttgaaaccgactacaatgactggaggtaagtagactattcttagtctttttcagttttgattcatattgcaaatccattggaatcatatatatatatatatatagcatgtaaacaacttacatattttagttattatgctttaaaaatagtaattatgcttcctatataaaataaaatatattttaatctttttattttgaaaataaacaatggtgttgtttttcaaatatttcaattctattacaccttgtcccaacttttccaaaaatacaacatagaagatagaaagagttttatctcatatatttaaaacatttaaattaggaaggttttttagataggaaataaaatcagattaggtgatgaataagtgaatataaattgctttttttttcatatgtaaacttggagcaagggaataggctgttattgtctagtttttctgtcgggttagaagacagctaggtggatggtcagcaagagaagcccgtggacaccaatatttttaatctatatttaatatatatatatatatatatatatatatatatatatatatatatatatatatatatatatatatatattgaaaataatttttgtattcagtactttattttgaattatttttcatatttatataaatatttttaaaagcacttatattgattctaaaaccaaaaataaaaataaaaaatatatccaaatgtaatcatagtaattatcataatgttttatttgaactttaaataattttaaaaaattcttaaaattttatttaacttttataatttgttatcgtctatattttgtttttgtcaagtcttcatctacatttatgtaacattctgtggtctatcaaagattctcaaatttttttatttcattctcattttaattgttttggtttgttttcatcaagtctttatctagtcttatgcaaggatgaaaatattgataattatggatatatcggtacttcgattttacggatatattgaaaatatatcgggcggatattttggaaaaaaatatcgataaggttaaaattgatcaaaatttataaacatacaagaaaacttcataaaaatgtaattagaagtataatagatattttaaagttgttttattaaagaatttgatatatgtataatatgatttatcatatttgataataataacgtatgcatcgataaaaatatgaattttataaatgtacatttattattaaattaaattaaatattatttcataataatattatgatatttgattataatatgtctaacttaaaaatatatattaatattaaaattatgatccatttaattcaattgtattaaatgatataaaataaattatgatatatgtataattttttaatatttaattaatttattaatgatattaaaaacactatgaagaaaattattgtgataatttttataatatcaaaacttaaaaaaatataaaataaaaactcttataaatgaaattaaaagcgtaatagacattttagtgttttttttttaataaattgatatacatatatatatatatatatatatatatatatatatatatatatatatatatatatatataatattgtacatgttaataaaaaatataaatttgataagtgtacattgattattaaattatataaaatattatttgatgataatattgtgatatgtgattataatatgtttaattttaaaatctatttaatattaaaattctgatatattataaataaattatgataaatgtataaatttttaatatattaataatattaaaaacactatgaataaaattatgatatatttttactaatcaattaaatgaaaatttttcattcaattataaaatagttataattaatttgttatttaaagtgttttttttaatattttatttatatcataacttttgatatatatttctttagtgcatattatatattaaagggcacgtttgccctagtggagctggggatgtatgttgaacgcagcaaaaaaaagctcaattttgagctttgatcgcattgactagtcgttgaccaccgatatatccatgctatatatcgtttcgccacccaccgatacaccgatatttcgacgatattttcttccttggtcttatgtaatattttgtagtcttccaaagaatcttgaaaatttttatcccattctcattttaattgtgttgttatgttttcatcaagtctttatctagtttaataataaatcaacatattcatactatgtaaataatacgtaatttaatttgttgactcattttgaagtcaactaatatgactttataacttaatttaagtcatttgttaattaattgattaatagatcaaagtctttaaaaaaaaaattaaagaaaaaaactatgaaaaatatagggaaaattggataagaagtcatttttttcatattagaaatgaaatttttttagtatatgtatcctttctctattcattatttattcaaatgcaacttctctatttatttttccaatttgataatagcattatgcgatcaaagaattgcatgagattgatacataatgcattgtgatatttgaatgacattattgatcttaactatgtcataatgaaatacttttttcttcaaatactaaaatttgacatcccttcttttttcatttttactctataatttcttataacttatcaatttataataatgatgataataataacaatgaaaataatagtaatgataataacagagaaatccttctaatttctttttaaaaattagaaggatttttatgcacataatcaatccattgtcaaagcaaattgaattatttcacaatgtggtgaagatcgataatgaatttattgagtatttttaaaagtcctaccttatctattttccaaagtatttaaaattttgtataaaataaaattatttaatcatgtataagaagagcactaaaaaatattggtgggagagtggaaatggtatcatggcacccaaacacccaatgacatacaagtgatgcttattaagtcatattttttaaaaaacaatattcttaaaattaaataatattgatgaactacaagtaatatcggttagtcatatgctgggatataaagtaaattcttattacctaacctgtatagcttccactgcgggagccaagttggatctaacaaatagagtttgtcaacattttcaatcacccaccggagatcaagcttatatcgcattacttaaaagggactcttgatcatggtctttgaacctctcgtaattaaaaaaatttcacattgtcttgcttatgtgatgcaaattgagtaggatgtccgattactaaggctatgtttggttctcagaaaatttgagggaaaatgcaagggaaagaaaatacgaagaaaaaatagaagaaaagaaaaagtgaaggaaaataaaaaatggattaaaagttgataagttatttttattttttacttcaaactcattttatttattttaactcattaatataaagattaaataattttaaaatacataagtttttaattagttttaattatatttgattttcttttatatttttcataagacaaccaaacatgaaaaaattattttcctttgcattttttttccttccttagtattttccgggaaccaaacataacctaaaagaagctccagaagctactgcatttttatggcgtcaattgtattttatgatcatctaagaaccaacctactgttgctcgatcaagtggtaaagctgaatatcggtccttggcctccaatacaacactcacttgcatttctttcttagttcatgaaatcggtatttctttttcaaatcctttataacatctttgtgacaacatgaaaaaaaaaaaattgagatattcatgctaataagagtgttaagttgcgatagtgataaaacatctttgattttatataaaattagacgtcacatttacttaatttttttaatagtagcatattttttttaaaatgatactatttaaattgaataatttaggtgaactatgaatacaagtacaacgttaatgctcctcattttattgaaatataatatatcattaacagttttgaatattcagcatgttagtcaaaagcctagcattgcctatctaacctcaattcaatcactttaggattggacttgggcttactttcagagtttaactctagcctatgagttgggccaagctcgttcagcattaaaccctaaaaagtagggatggcaacggggcgggttttttcaggcacccgccccgccccgccccgcccctaccctaatgggacggggttgaaatttaataaacaggtttttaacgggtatgagattttttttttaaacccggggcgggttcgggacgggttcgggtattgccccatcccgccccgccccaccccgtttacatataaaatcaattttaaaatttaatttaatttaaattttaaaattaattttattttactatttttaatatatagataataataataaaaaattaataaaataagttataaaaaatataataattttattatttataaatatatttattttaatgtaattaaaaattttaaaagcaaatttttaaaaaaattaaaaaaaaaaaaaaaaaaaaaaaaaaaaaaaaggaggctaaacgaggcgggtttgggaatttcccatacccgccccgccccgtttaattttttaaacgggacggggatgggaattatttttaataaacggggcggggttgggatgggggcaacggaatttctcatacccgccccgttgccattcctactaaaaaggggttgattttgttgacaccctcttagatttagtataaatatattaagttattattgattttaaacttcattaattagacaacactcttataaatatattttaaatataaaatttatcttttagagaataaattaatttatttttaaaagacacacctacataattttcttttataaaagatttctctaaaaaatatattttataaatataataaatttataaagtgctaattaatgaaatttaaaactaataacagttaaatatatttacaacaaatctcaagagatctcaatgaaattaaccctaaaaataaatatgatctaaatatgctttaaaaaaataaatgaaaaaaataaacgaaaataaaataaaatataaaatataaacccatcatcattgatatagaagacaaaaatttagaagaaaaatgattcatcattaacttctaaaataaaataaaattttttaaataaaaaaaaagccctacatttgtttcagtcatgataatcgaatgaaaaatgatgtaaatacattaatttcatgtgtgcacttagttattttagttattatgttttaaaaatatgaattatgctgcttatataaaataaaatacattttaatctttttgttttgaaaaaaacaaacggtcttgtttttcaaattttcaattctattacacggtctgccaatttttccaaaaatacgtacatagaagataagatagaaaaagtttttatgtcatatattaaaaatacttaaattaggaaggtcttttagataggacagaaaatcagattaatgtgatgaataattgaatataaattgttttcttcagacgtaaacttgcagcaagggaatagactgtcattgtctacattttttgttaggttagaagagagccaggtgagtggtcagcaagagaatcacgtagacaccaatattgcagattttagccgtggactgaaaaagactggcttgacttggtgtgtgtttctgggggggcggggagtcttcaaacgtaaacttgcagcaagggaatagactgtcattgtctacattttttgttaggttagaagagagccaggtggtggtcagcaagagaatcacgtagacaccaatattggagattttagccgtggactgaaaaacactggcttgacttggtgtgtgtttctggcgggggcgggggagtcttcagacgtaaacttgcagcaagggaatagactgtcattgtctacattttttgttaggttagaagagagccaggtgggtggtcagcaagagaatcatgtagacaccaatattggagattttagtcgtggactgaaaaacactggcttgacttggtgtgtgttgggagggggggggggggaagtttaaaaataaagcacttttattttttggaaacaagagaagtagtaccaaagtattttgtataaaaatacaaggtaaattcctatcttatgtatagttcctaattttaagaagaaaaaataaaaattatatctaaacataacctttgtaatgatcataaatgttttatttaaattttaaattaaatttcttttataaaatttcataatttgttatggtctacattttgtttttatcaaagtctctatctagttttattacttgtcattctttaaattcgattgagtcttccaagtcttctcattggccttctgcgtaaacgtggtgtaggcttggaagattcaatgaataaatccatcattgatacatcaatggttttttcttcaacttatttgacgggaagcctacctaacgtatggaatctggggtgggtgcagttgcttaatggatctgaattgcaagctcctagaaactatgccctagtgttcatacacattttgaacaccaaaccaaagagaaatattatatgcaagaggaaaatggacatttacttttagtgcagtccaccagaaattaagtcataaattacgtggacattaatattaatattatgtttacagcagtggtggtagttaccatcgccattcaagtggttggtataaatgtttcaatgcttcatgttagacatgcttataaaggtgaattcttttgaaaaggatgaactcaatatttgaccgagtaatggatattctttctacgaacaagttcaatgggggtgaattcttcgtaatatgcaacctgatattagttagatagtaagtggaaaatgaccaagggtcaaagaagtggaatattcttattggcgaaaagaaataacaagtgacaatttaatattgaattttaaatgaaaataaaataaaatataaacccatcatcgttgatatagaaggcaaaaatttagaagaaaaacgattcatcgttaccttcttaagaaaaaaagaaaaaagcccacatttgttttagttgtaataatcaaaaagaaaaaaaagacatcaaaaataatgaaaggtaaaaaatgatgtaaatacattaatttcatgtgtgtacttagttattttagttattatgttttaagaatattaatgatgctccctctataaaataaaatacattttaatctttttgttttgaaaaaaacaaatggtgttgtttttcaaatatttcaattctattacacattctgccaatttttccaaaaatacatgcattgaagataagatagaaagagttttatgtcatatattaaaaatatttaaattcagaaggtcttttagataggacaaaaaatcaaattaatgtgatgaataattggatataaattgttttctttagacctagacttgcaacaaggggattgacagtcattgtctaccgttttcattaggttgggagagagccaggtgggtagtcaggtcagcaaaagaatcatgaggacaccaataatcgaggctttagtcgtggaccccaaaaaagtagtttgacttggtggatgtttggtaaaacaatttaatagttgaaagtgatttaataatttaatttaagttattaagtaaattaaatatatttgataaaataatttaataatatgacttaaagtaaaagataattaacttatttttaattttgtatctttatttttcttttttattcttatttaccctaattaccttccacgatttcttttactatttcatgatcttcattgttaatcgatctcttttacccgaattataatatatgagaataaatatattaatttgatgatttagaataaattttaagttaattttattaaataatcttaatacttgaagtaaaaattaagtaataagttttaagttaacaatttaagtataatttaatttataatcaacttaaatcattaagtaataagtttaaattttactaaacacccccttagtgtgtgtttccgaagagaaaatagtctcttatattgattctacgagccaagaacaattgaaaacaagaaaagtagtaccaaagtattttgtataagaatacaaggtaaattcttgtcttatgcacaatttctaattttaaaaataaaaaatagaaagtatatataaatataacatttatatttaaaagcacttatattgattctaggagtcaaaaaacaaaacagattttggttttggaaacaagagtagtaccaaagtattttatacaagaatacaaagtcaattcctatcttatgtacaatttatattttttaaatgaaaaatagaaaatatatctacatgcaaccttaataattattataaatgttttatttgaacttcaaattttcttttacttcataatttaaaatttttccctaaaattttatttaatttttataatttattattgtttgtgttttgtttttttaaagtctttatctagttttatataatattatgtagtttttcaaagactcttggaaaattttatcttattctcattttgattgtattgtttcatttttctcaagtctttatctagttttataacgagttgacaaattcataccatgtaaatcatacataatttaatttgttgactcattatgaatgttttatttaacctttaaattttcctttaatcatttgcttgtgaagggtcatttttttcattttgttagacctatttggtttcataataagtcaacaatgtgtaaatcataagtaatttaatttgttaactcattatgaatattttatttgacctttaaattttattttaatcatttgtatttgtaaggatgattcttttaattttgtttgacttatcaagcctctcattttcacgtgaaatcttgtaaagttttccaaagccccttgaaaaattttgcttcattcttcattacttccacaaagttttccaaagctctgtggaaaatattgcttcattcatcattgtgaaaacttccaaaaagtttttcaaagctccttggaaaatattgccacattcatcgtaatgaaatcttccaaatatccattattgggaataaataacgtataaacttgattgagtaatcacattatttagaacctatttatgatctattttagttaaaagattcttaatttatagtattttttgttattagtgtttctactagaaaaactttttaagaaaaatccattagtatttatatgtaataaaaaatattttcataatgtttttagtaatgtattatatatttagatgtaataaaaattatttttataatttttttaataatgaattatatataacctaaaaaatataaaatctcctaccatatgattatccatgtgtcattctagatgattagctaaatttttaaaagcaaaaaacactttcatgtattatatacgaaacacttttgggcttgtttgaatcattttcaaacatattataaagattttttttatacatcgttggtactcatcattctttacatacggttgactcattgaagtcttcttcttggtctttatgaaaacatgatgtagcttggaaaaatctatgaataaatccaacattgatcaacgtcaatttttcttatgggaagcctacctaacgtggaatatggggtgtgtcgtttaattgaattcaattgcatgctcttggaaattattccctagactatattttttgtgttcatatggtgacatgttgaaaatgtatttcatttttatagaaagaaataatccatgcatacaaattttgaacacttaatcaaggagaaatattaaattgaagagaaaaatggcaccatactctcataagattcaatatattagttttttttatataagtaaataattaattaatcaaagacttcaaagaaaatatttctgtgaattatatatatatatatatatatatatatatatatatatatatatatatatatatatatataatttataaaggatttagataggaaagaaaaagaggtttaaaatgaataaacttgccttctttgtatatgttagaaaagagccagctgggtgacgagcatttgtgttcacatttacttttattgcagtccacttaaagtctacacaagaaattaaatcatgaatgacgtggacaataatattaatattattagagactttaggagtcgactgataaagagttgcttgacttggtgtgtttccaagaagggaagaggctctttcttagacaccaaccaatatttatatttatatttgcattataaaagtgtgtagtaaggtttaattgcacagaattaaag

SEQ ID NO: 11821 - DNA, 18936 bp, Vitis vinifera
  Intron number 3 from transcript GSVIVT01000468001 (locus G SVIVG01000468001) derived from phytozome v7.0 (chr-ID chr1 2; pos 8243072 to 8262007)
ttattttgatccacccatacctgcaaactatttcggtaattgcttagctccatgttcagcgacagtgaagagtttggaactgattacagaagatggcttcatagttgcaaccaatactataggaaaggcaattcaagaaagacttcgaaacaaagaaggaattctgaaagggttggagaaatggatgtcgaattataaatctttaaatccaaagagaatatttggagtcgctggattgccaaagttttcgtgttatgatatagattttgggttaggcagaccttgcaagggagaaatcatattgatagacgtgacaaaatccatatcactcaatgaaggcaaaaacaataaagaagatgttgagattgacttatcatttcccaagattaagatggatgtttttacctctatctttgttaatggtctcaagatttacgattagtaaaattgtaataagaaaataaactttgtttattctttttatatgggtgtggagtgcaattaagtttcaaatttgttattctccatctccttcttgtattgaagatgcaacattttacttcaaaatagtaatgttttttaaaaattgaccggatagcctaatttggtcgctggtctatttggttcaaacttgatttctcttctttcgttgatatttttaatggggcaaaatgagttcaaatggtgtgtaaaaatttgtcacatcttgggcccattttaaaccatgcatttaatattagacatgttgaaaaaccacttaatttgtttagtgaaaggaatttgattaatcatcaaaatggggtaaataaattttaaaattaaaaaaaaaaattatttcatatttacccttttgtaataatgacttttattattaataattttataataaaatgtgtatttttataaattaaattcattattataagttcctttacacgaaaaaaataaaaataaataaattcatatgatcatggcgaagatgccacattaccaaatttgatcaagacgtgatcaaattactttcaaatttaatcaaatgttataattggattaatctacttattaaatatgatatgtcatcgctcaaaataattattacttgtttgtttgtggatcgtgcatcaacgtcaaatccataggatactgtgattgattaaaaagaaaaaagaaaagaaaagaatatcattaccaatttgacttccgtattgtcatttaataaaaaaaaattcactcaaagacatgattgtatttaaaaattcattctcaaaattttaaaaagagaatctcttcattttaatcgttattaacatcatgttttaaaatttaaacatcgatgtcgttgagatgtgcaatcaaccaaggggcaagcatggtacccggaaacattaagttattaacaattatattttaaagaaaatcagaaaacaatttttctttattttttcttttagttttttcttaaccaattctactatcatgccaataattatataatcatgattacaagttggttgattgataacatgttatccacctcaaaatataaaaaggtttatcggaaccaaagatgaaaatatcggtaatcacggatatatcagtacttcgattttacggatatatcggagatatatcggcggatattttggaaaaaaatatcgataaggttaaaattgttaaaaactcatgaaaatgtaaaaaaaaccttataataatataattagaagtataatagacattttaaagttattttattgaaaattttgatatatgtataacatgatttatcatatttaataataatatcgtatgcatcgataaaaatatgaattttataagtatacttttattattaaattacacctaatattatgatatttgattataatatgtctaattttaaaatatatattagtattaaaatatgatctatttaattcaattgtattaaacaatataaaataaattatgatatatacattttcttccttgatcggaacttattattaggttaaaattttaagttattaataatattattaacattaattatccatgaataaatgtttaacttaaagaaaagtacatttggtaaaacttaatttttaatgacttaaaatgactttaagtcacactatgttgaagttgctaagtcataaattattaaattgaccatcaaagttatatttaattttaaattataatattaagttattttattaaatacatttaataatttaaattaaatcattcagtcattattaaacaccctattagccttagaatttgtttgataaaacttactttttaatgacttaagatgactttaagtcacattatgtttaagttattaagtcataagttattaaatcgatcatcaaaattatatttaattttaaattataatattaaattattttattaatatatttaataatttaaattaaatcattcagtcactattaaataccctattagccttaaaaattgtttcttaatagtcatagttaaaaattaaattttagagtatatgatataaagagatagacacacaaagaggcttcactttttacatgttaggcctcgtaaaattgaaatcttaaaaattgaattattttagaatttaaaattcacatcttaaacattgagtaaatgtatattagttaatagtattaattcaacacatattgacatttaattaataaaaaaaattcattgaaatacaaaattgtatttaaaaattcattttcaataatttttttattcattatcaagaaacagaaatcttcttcattttaatcactattgaaatcatgttttaaaatttaaacatcgatgtcattgagatgtgcaatcaaccaagtgacatggcacccggaaacattaagttattaataattatatttaaaagaaaataaaaaaactatatatatatatatatattttcttaatcaattccatccaccatgccaaggaaattcttttattttatgattatataattatgattgcaagttggttgattgatacgtattatcccctcaaaatataaaaaagcttattggaacttattataataatattattaacattaattatttattaataagagtttaacttaaaagaaaggaagtttgataaaatttaatatttaatgacttaagatgattttaagtcacattatgtttaagttgttaagtcataagttattaaattgatcatcaaagttatgtttaattttaaattgtaatattaagttattttattaaatatatttaataatttaaattaaattattaaatcattattagacatcctattagccttagaatttgtttcttattagcatagttaagaattaaattttagattatataatataaagaaatagccaaacaatattgctaaggatgcttcaatttttacatgttacatcttgtaaaattcacatattaaacattgaataaatttatattagttaatagtgttaattcaacatataggaataaatataaataaagataaagagattttaagaagctttaatgatcaatataatttctatgttcatagaacacactaatgctcaagaattgattaatcaaatgaaaataaaaagttataatggttaaggttgtcttctctttacacacatttttttttctaatgaaatcacaatccataagatgataaactataataagggtaaacttgtgattcaatacaaaaaaaaaaaaaaaaaaaaaaacaattatctaagggtgttacatccttgaacctctgcgaactgattaagaagctagacttttgacatcgtatgaatcatataattggattaattttctaaataaataagatatattactcgttgaattaactagattactacttggtacgattaaagagtgtgtttgattgtcattttgaaaactgtttttaacttaaaaagtgtttttgaaaataaaaaaagaggcattttacaaaatctagaaaccatttttaaaaatatgaaaaatcatttatgacattgaaaaatcacttgaactcattttaggtagtgattttaaaaagtgtttctaacaaataaaattgttttaagtattataaaaattaaaagtattttttaaaatcattatcaaataaatttttaataatgcttttaaaaatattttttttaaaatcacttttattaaaaacatttcaagccgaaacacccttcagtgtgggtcataccattcataacactaatgaaaaaaggttgttatttacttatttattaattgtatgtggagtgtacacgaggacaaatgaataggattccttcatgaaatggaatacaggaccatgacctttgagtgaagcccgataaaacggtagggcgattagaatgaaaaaagaggaaagaatcaatctcaatcttattttcaaaattgaattttatgaaagaaacatacatgaagaaaagattggatttaagaatctagttttatgagaaaaaaaacgctcacttagagacaagataaaatttaagaattcattccaaaactctcttcactttaatcatgttaaaaaaaatcaaatttttttcatcaaatgtcattgagatacttaatcaaccaggtggagcatggcacctgaaacattaagttattgataattatatataaaagaaatcatatgagataaaaaatatattctctctctcatacataatttgatggaactcctcaaccaccaccaatattattcaccaccaatattatttcctcattcacacataatttaatgcaccaccaatattaatggggaatttatgtaacaatacaccaatgggcaaaattttgccatttggaaactttactttttacttttcaaattcaatggattttgtggaaaataaaccacctttcatacactgtaatagtgatattgaggcccttccaaaaataccctcatgcactttgacataatcaattgctcagaaaagccatattccacttaagccaatgacatggctcatatgacatgtagacactccacatggcaatatttttttaaaaatatttactaaaatataatagtgagatttacccaaaatcttttcttctgcgttgaatcaaaaccctaaatcccttcttctctcttgaaccgaaccaaacccccaaatcccttcttctttcttgaaccaaaccccaaatcccttcttctctctttgaaccaaaccccccaaatccctttttctctcttgaaccaaaccctaactccaaaaacccatattttttcaccttctttcacaaccacaattcgcgaggggagcttgcagtgaaaacagagagaggtggtccgagctgagaggagttttcccatgtatgaatgtaatggatttatgagttaatttgggttgttatcgttgcttgttgagatatttgacagaaaattgggtaattttttaaaaatatcgccgagattttggtatcaatgggtatttttacccatttttcagaaaaataaataaatacgggaaatctcattgaagctagtgaggctgtaagtttgtaactgtaaaaaaataaaaataaaattataggctttaagttgtaggtcttaaaaagaggctttgatggaaataaaaggaaaagttgattaattaaagaaagagtgtagaggtccgctgccatttccagtaattgtagcacaacccagctctgtaatgtcacacgctttaaagtttaggtgtggttcagtggttggaaaaggtatcctcattacccccactccacttaccagtctagcccgcacacagatctagaatttgcgggcaaaggttgtgtttttcagcttggctcaaaaatcgtggatttagggtttgtaaaatttaaatccaatggcactaaagcaattagaaccctagaacagatccagaaaacacaaggagcaacaaaaataatagcatttttttttttttttttgttttccttgggagttttgcatagatttctcttggaaatcaaacgaggatgaattttcccggaaatcgaatgggggatggattttctagggaagcaaacgggggttgaaaagaaataataataacatgattagattagtacctgcgaggattgagagtggtagaggaaaatagggcatgatgctcgcttggagaggaaattcaacaaaagggcttcgtgatgcctcactcgggtggccgttttgttttttagatttagtagagaaataaaaaggaaacaaatcataagaacactattataaatcaaaattattaattattaattatccatatttattttggttaaatcaaattttcagtttttattagtaatattttataaattaaaattaatttgataagataaattattaataatattaattatttaaataaattaatgttaatagaaaattttgttaccacatatttttaatacaaatgtagaaattttttaaacattaaaacaatatggcttttatttatcaatataaaaaaacattatattttaatttacaaaaaaataaaaaattacatgaactgttatatatatacattatatatatatatatacaaaaactaacctcctcaattctggagcttattaattacaagaactttttttctcaaaactgattggttgacaaagaaaattccaatattatcttcatttatttaaaaataatttaaaatgcatgcactttttaatttatgatttaattattcccaaaaatagccctttacttgtcatgtcatcataatccttcgtattattttattatttgagaatttttttttctctagaaacattataaagtaagaatttgaaaaaagaatttattataatattagtaagttaaaaatagattcatattcttgataataaataaaccaataataaatttctatttattatataatattaataattgtttaatataataatgaataaaatttgttattagagcttttcaataataaatttgttataatattaaaataattatatattatgaagtttattatttattatttaataaacaaccttattactttttgaattggtaattatgattaaatatgatttgtttgacaatatttcctaaacttttagaaatctaaaataagaatcctataaggtgtttgtttctagatgaaaaaaaaatctaaaatagtaaaataataaggaaacatttatatggaggagtgtagttgtcaattgatttgaataacatcacaaataaaatgacattttttggaataattggataactcaatgcatgtatttcaaattatttttaaatagatgaagataatactaatttaaaatatttgggattctttttaccatatattttcttattagtgaatcaaatcccacttttccctaaactatattgatttggttagatgagtatgtaaatttgaggcataccatttgtttaattggctgacccactaaaatgcacattatctgtttttttttttttgggtagtgggtatcatagtgggtgaccctataaataaaaatttcacccttcttgataatcatattattgaaaggttgggggaaaccgatcttattgatttttcatttacatgatgtaacaaaatgtttcccatttctttgttaatatatgttatatttgtgtaataattatgatgaatgtatataggaacactatattcacgttcacatgtctttaacatttgattaatttattaatgaattatggttgtttaatgcagtgataatatgaacatatggtgtcgttgttctggccgtagattcctctctggaatccatttgctctcagaagtgaagaagaatgtaataagacactactacaaaaataatttatggtgtcactatttatggtgtcacttttaaaataatgacaccataaggtttataattaataaaggtgacacatcatattaaaaatcttcaattgaggtagttagatgatgttagttttatattaatagtgtcatttttcgggaagtgacatcatataaaataattttttttaaatattataacttaatgagcctacttgagcccacttttagaattaataataaggaccaatctataaaaagcccattgtttccacatgatacccacaatccaaaaaatctcagtatacaaaccctatatataataaaaatcataatcttcttctaccttttctctcacccatagtcaacacgctcacaatcgacattcttctctttgtggactcccaggtaagccaaaatttcttagatctatcatattttttcttttattaatgttattatattgattgtttcaacatttttgtattatggtttttatgaattatggctcgattacaacgaactgctggttcagaaattgacacatcttctaaagaatggttatgttcatttctaaatgtatgcacttgaactatttttgttcttctaacagcacgagcagttactttccaagggcatccttcaacaacacatattacagtcatatgcttaagacaattcctcttaaacttgtatctaaaacggcctcctactgacatgagatatattgcatcccgaatttatttgtagttgagaaggtatgcccactacccaatattgcactctcaaaacgacttgactctagtggaccaacatgtgattcaacacatctttgatgaaatcctcatgattgcattctaatatcaacatctcttgttgaatatgggactagtgagttagaccctacgattgttttgttcaagctgcattataacatctaatgaataaacataaatattaaaaaaaaaaatacatggaatcatttaagattagatatttttttatataacttacccttgtcctccattctcaatcgtttcatcgtcttcaactgttgatgctaaacatatatatacacgtgcacatcggtcactaaattgaaacatgtttgtcaagttttcatcatttttcaatggttgaagtgcatataaatcaaacgggagagtatatgaaaatgttggtcccactatattgatgttcattttcccacaaatccttgaaacaaaatcattatatgtcattgatcgttctaaactttgaccctctcgtctcccacccatatattccacattgccatgttcatcccttactagctctccttcaatgtgcagataacaataaattgtattactttgatccatttaaatgctactcgatcatgtgcagcccctgtttagaagcatgaacctttagtcaagttgaaacaattaactaatttcttaataacactacataaaccaacttacttataacaaaactgattatcacgcctatgaccatcatatattaatacatcgtttatctttgaaactttaaaaacaagcttcatttacatttcatagtctacaattaatggtgtaaatatagacatgcatagtgtatacttaacattaagtaatgcaattattctattttacttcgtagtaatttgctatgttatataaattagggagtgaacctctcaattcatgggccaaccattgttttggtaactcttcaagccaaattgtgctaatgtcacttttttcgggccaccccctcaaacaatgggtcgacctttattttgcccactgcccaaattaaaccacaacaatgttacaaccaagggccgacctccaaacaattgggtcagcctttattttgcccactgcccagattaaaccacaacaatgtttacaaccaagggctaacctctaaaaaaatgggtcaacctttattttgcccactgcccagattaaatcacaacaatgtttacaaccaagggccgacctccaaacaaatgggtcagcctttattttgtctattgtccagattaaaccacaacaatgtttacaattaagggcctacctccaaacaaatgggtcaacctttaattcacttactgcaacctcttacgaaaacaataatttcatccaaatgtcattaactgaattacggctagccccttcatccaagggtaaacccttactatgaccactacacacataaacaaaacaaatttcatatttgtggttgtgaccatcaattttgaacctaaggctccactactattttccctaattcccacataaattcatgtccactttactaaatttgttttattttcttcttcaattcaacccttattcattacaaattcaaaacttttattaagaaatttattaaaactttaatcccaatcatttttaaaatttatactcatctactcatgactaaacatgaattcttttcccatgcattagattcaccaattaacaactataaacaacattaaacaacaaattgtttgaacattcctaaaaattatattcccttcacatgcaatagtcatatttttcttttcttttccgtattcttcccaacaaccgcatacaacacaaacataacaattcagaaaataaaacaaaatcaatatagcttaccaccatctcattttcccatcatttatcaaattttaagccatatttcatttcaaataaaccctaaatgaattaaaatataaatttagatacaatattaatggacattgaacatgtagaaatatgcaatgtaatcaagtttaaatcacaaaattgcacaaatcacataactatgacattattcaaatctcaaagaatcaaaatgacaaatcaaaatataaagttattacaaaatttaataacatatatatatcacttggaaaaactcttgctttaaaagttaaatgcaactacaatatttttattcttggttatctcgttctctcaattgctttctttctccttcttcgatgtaaaagcaaaataggaagtacaaccaggagaaaaatgattgtcactcctgaaataagaagaaggaaatgggtttttttgtctacctggcctttgttaaggggttcgcacttggacttttgttttcagattgatgtttggtgggaaaatgaagatgtcattttccttatggtgatggaggagaaacaaaataagagatcaagtttggaggttcgtttggggttgatgggttatcgcaatttgagaacctagctaccagattttttatagatcctttcaccttgtgatggtttgtgcctatgaacgaacaagaaagaacatgggtttttggtgttagggtttagttgaagaaagaagaagacatttggggttaaatattttttaaaacatcaatccatgtggagtgtctagctggccgatgacatgtaactgagccatgtcattggcttaagtggacaacaagcaacttatccaactaggagagatgtcaaactataggagggtatttttggaagggtctcaacatcactattacagtggcatgaaatgttgtttattttccacaaaatgcactgaatttgaaaagtaaaaagtaaagtttccaaaaggcaaaattttgccccttggtgtatggttacataaattcccctttatttattcatttgatttagagtagttacttctttttttaaaaataaaataaaattctaagtagttgagacccaacaggatatcaaatggctttcaaaaaggactatacattacaaaggattggtctagggactaggttactcgatggaaaagtgttgggcaccaattaagctttgaaacatattgtgtataagcacatgttgtgtaaaacttgatacattgatagggcatggaccataaccctttttgtgagtcgtagaagatcagctaggattaattaaaaaaaagtgcccacactattgttggtaggaagtagaggttgatttcattcatatttaattttccccatacatatgttgccaaaaaaatttgaacctagcttgttggggtctttttgttaggcacgtgtatatcctacactatttaagtgtagcctattatcaaataaattttcaattatagtctttttttttctttttttgacattatagatacatcatggaggaggaaatagttgtctttcgaacttctaatttatcttctttgatgggaaaaagataccggtattcacaaaatatacaaaaaaagaaaaagtagaagggataaagagtctttagtctataagtgagtttgtattcatctttacatggatataaggtcttgaatagattagtaaaaaaaattctaattacaaaataaatatattcaagaacatagattattttatagtaagagttttattgaatcttattgctatgactactagtatcttctatgatttccatttttgttgtttgcatttcgaaaatttctaaaattaatttggtattggagcatattcctctagcttggcattcaattatatccttatatcttgtcgaaaattatttatcgttgtgataattgttgatattgtcaatgtgatctttattaatctcaaaatctcattacataattttcaagatttgaatgagatattaggttaattttttgtagtgatatacatgtttagagatttttaaataccaaattataagtccatttgagcgaactttggtgctttggataggcatatataataatgcagagaacttggttttggtgggctattgcaattaggttgtaaggaggttaatttagatttatgtttttggttgataaaaaacataaacattgcttattcccaactcgagttatttgggagtaagaaggtctctttgacatgtcatgatgttgggatgacgatgggcattccacatagtgaaagaaagttaattgttgagaagggaagtgttaaagctagtcaaatgccgagtttgcaagatatagagtcaatgatggttggcatcgatgatatggaggaatttaagcgggtcttcttgattttcgcttgtgcaaccttattggcacccacatctcatttggaaggtagtcactcattatggtatacaccccgagagcagttacttgggaacataaattggggagaatatgtcttagaattttttattcaagctatacatgaacataggaggaaggaaagtgtttagattaaaaggtgtttgatgtttctacaggtaactttttgtcttatttataagtatatgttcatgtattagatatttaataatggttatacactatgttggccatgatgttagcactaattatgtcttatataatgcaatagatattctacttttcaatatctaattttctagccatgtatgtggaacttaccactcctcgcattgctacatggaacgattttttggtcaagcaacgcatcaagttggagttggaaatgcttggaggatttggcaaagttgaggtataattagcttttagttatattaagatagttgattaccattgtaattagattattgggatgacaatttacatgttttgcaatgatagttggttagcacatcggtggagcaagatgaaatagaaaaaaataaggctcctgcaattgatgacccaattaacccagatgagaatgaagactttgatgtaatccttcatacctaatgactatgaataataacttatattaaggcttagtttaaatatatgtcatttaatgttccttcattatgtttgacttaggttatttgtgctcgcatggaggcaacacaacgtcaaatcaccgatgcacaaagtcatcttaatagtcttattgcatcatacaactgtgatgtgaaagtgttgaggactcgtttcacctcttcacactatcgcacaatgaaggccaacagttaaattgtcatgaacatgttaatgaaagtggtgcaccattttatacaaataatccacaacattcacttattcattctggtggtcaaagaagatcttctgaagatgaccttggatgtacaaatgaaggcgtgtcagaaagacccaacgtagaagagggtgtgttctttgcaaacgaggatccccttcaccttgggccacacaatatgttggtgttagtgcaatcgtgcatggacaacaatgcggatgtagcaccacaagcctcagaagaaatacgaccacgaagagtaaaaattaaagtatgtcgtcataggcaacgagcagctgcatgcaagtcaccttttgtacaattatgtgtatcaaaatacaaaaggttgacagaggaagagacacatgttgccgactatgtgtttgacgagtcaaaagatcctaggttagtcccaaatcacacgtttagcaagtattgttcttaaaagactatgattatggatttgtctagaaaaacaaaaaaaattactcacgtcttgtgtttcatgtgattaatagtgagatgctttgtgcatatggtggctatggcgtgacatgggaacaacttcaatgcttagtaggggagagcttcattgatattccggtaaggtttatgataaataagaaaaaataccctcatctttccattgatcattttaactaatgaagaggaatatgtaggtgatttccatgttctgccgatacatgaatgcaaaagaagagaatccttctcgcagacacttttttaatccatactttgggatgaggttttttccttgagtacaccaaatcttgtccctaatataagatgcatgtatagttttagtcatacattgttactatgatctcaataactttttacaggaaatatgtggttcaatgagcaagtctacctcaaaatcaacactcaagaaaagattaggtagctattgtgttaatcttattattaggttaaatttttaagttattaataatattattaacattaattatccattaataaaagtttaacttaaagaaaaggacatttggtaaaacttaatttttaatgacttaaaatgactttaagtcacactatgtttaagttgttaagtcataagttattaaattgatcatcaaagttatatttaattttaaattataatattaagttattttattaaatatatttaataatttaaattaaatcattcaatcattattaaacaccctattagccttagaatttgtttgataaaacttactttttaatgacttaagatgactttaagtcacattatgtttaagttattaagtcataagttattaaatcgatcatcaaaattatatttaattttaaattataatattaaattattttattaatatatttaataatttaaattaaatcattcagtcactattaaataccctattagccttaaaaattgtttcttaatagtcatagttaaaaattaaattttagagtatatgatataaagagatagacaaacaaggaggcttcactttttacatgttaggtctcgtaaaattgaaatcttaaaaattgaattattttagaatttaaaattcacatcttaaacattgagtaaatgtatattagttaatagtattaattcaacacatattgacatttaattaataaaaaaaattcattgaaatacaaaattgtatttaaaaattcattctcaatatttttttattcattatcaagaaaaagaaattttcttcattttaatcactattgaaatcatgttttaaaatttaaacatcgatgtcattgagatgtgcaatcaaccaagtgacatggcacccggaaacattaagttactaataattatatttaaaagaaaataaaaaactatatatatatatatatatataaatatatatatgtatatatatatatattttttttcttaatcaattccatccaccatgccaaggaaattcttttattttatgattatataattatgattgcaagttggttgattgatacgtattatcccctcaaaatataaaaaagcttattggaacttattataataatattattaacattaattatccattaataagagtttaacttaaaagaaaggaagtttgatgaaatttaatatttaatgacttaagatgattttaagtcacattacatttaagttgttaagtcataagttattaaattgagcatccgagttatgtttaattttaaattgtaatattaagttattttattaaatatatttaataatttaaattaaattattaaatcattattagacatcctattagccttagaatttgtttcttattagcatagttaagaattaaattttagattatataatataaagaaaatagccaaacaatattgctaaggatgcttcaatttttacatgttacatcttgtaaaattcacatattaaacattgaataaatttatattagttaatagtgttaattcaacataggaataaatataaataaagataaagagattttaagaaggtttgatgatcaatatgatttctatgttcatagaacacactaatgctcaagaattgattaatcaaatgaaaataaaaagttataatggttaaggttgtcttctctttacacacatttttttttcctaatgaaatcacaatcataagatgataaactataataaaggtaaacttgtgattcaatacaaaaaaaaaaaaaaaaaaaaaaaacaattatccaagggtgctatatccttgaacctctgcaaatcgatcaagaagttagacttttgacatcttatgaatcatataattggattaattttctaaataaataagatatattactcattgaattaactagattactacttgatacaattaaagagtgtgtttgatagtcattttggaaagtgtttttaacttaaaaagtgtttctgaaaaaaaaaaaaaaaaaaagacattttacaaaatctaaaaaccatttttaaaaatatgaaaaattatttataacgttaggaaatcacttgaactcattttagaatatcgtttggtagtgattctaaaaatatttctaataaataaaatataatttgtttcaagtattataaaaattaaaaatgttttttaaaatcattatcaaataaattcttaataatgtttttaaaaatattttttttaaaatcacttttattaaaaacatttgaagccgaaacacccttcagtgtgggtcataccattcataacactaataaaaaaaaggttgttatttacttatttattaattgtatgtggagtctacacgaggacaaatgaataggattccttcaagaaatggaatacaggacatgacctttgagtgaagcccgataaaacggtggggcgattagaatgaaaaaagaggaaagaatcaatctcaatcttattttcaaaattgaattttatgaaagaaacatacgtgaataaaagattggatttaagaatctagttttatgagaaaaaaaacgctcacttagagacaagataaaatttaagaattcattccaaaactctcttcactttaatcatgttaaaaaaaataaattttttttcatcaaatgtcattgagatacttaatcaaccaggtggagcatggcacctgaaacattaagttattgataattatatataaaagaaatcatataagataaaaatatattctctctctcacacataatttaatgcaccaccaatattatttcctcatacacacataatttaatgcaactcaggcaccaccaaacataatttaatgcaccaccaatattatttcctcataactcaggcaccaccaaacataatttaatgcaactcaggcaccaccaaacataatttaatgcaccaccaatattatttccacatatgagaatattagaagtgttcatgggtttctctctctctctctctcataatttgaaacaacttctcaaccactgccaatattattttttcatataagatttaaaatgttcatgggttggtgctcggtattccaattttatatagactcgatgaagcccaacttgtataaattatggtacctcgataacatcttggttgtatggcttcatttgaaatggtgaacgtgcttgagcactgcagactagccccagctccgggcacagtcgatgagaagtcacttcctctcaccttcttcgacataccatggctgcattttcctctaatccaacacctttttttctatgaattcccttatcctaagtcccatttcatagacaccattattccactacttaaacactcactttccctcgctctcaagcacttttatccctttgctggaaagttgatatttcctccaaattttggtaagcctgaaattcgttacgtcagtggcgatgctgtttccctagtctttgcagagtctaacaaagacttcaaccatatcactggaaatcaccaacgaaacgttgctgaatttcattctcttgtagcccaattaccgccagtgtccataatatcagactcactggtggccccacttttagctgttcaagtgacactttttccgaactctgggatttgtattggattcacttttcgccgtgtaactgcagatggcaatgcatgtacaagattcataagatcatgggctagtattaataaagtaggcagagagaccaccatggtggagagtggtaccctcccattctatgatcggaccatggtcaaggacccgaatgggttagcatcagttttttggaaccatgtggggaaaataaagtttgaagggtctcaacgtcagctctccaccaacaaggtcatagccacatttattctgggccaatcccatgtccagcagctcaaaaaatgggttctgtctcaatgcccaacatcatcacatgtgtcaactttcacagtgacatgcgcttatgtgtggacctgtatggtaaaagctcgagaaagaagtggtgagaaggtgactgaagatgaattagaacactttgtttttggggcagattgcagagctctcttgcagcccccattgcctgcaacctactttggtaactgcttggtatcatgctttgcaactacaaaaaccaaggaactgatgggggacaacggcttcataatcgcagccaaaacgataggagaagcaattcaagagaggctt

SEQ ID NO: 11822 - DNA, 7058 bp, Vitis vinifera
  Intron number 4 from transcript GSVIVT01036611001 (locus G SVIVG01036611001) derived from phytozome v7.0 (chr-ID chr1 3; pos 19212422 to 19219479 reverse strand)
aaaatattcttcggaaattacttcaggaacttgtggtatgtaatattactgtactggcccatagaattttatggtttattttcatttcacttttgcattcaagtgtaacatatttcattgtcattgattcatgaataagtacaatggaatatcatatgaaagaacatcaatcctgaatggtcatggttctaagtaaatttgctcttcttatccattttctttgagccattatttcattggaaggaaacaaacactaagacagcaaagaggcgtactactgttcagatgctccatctaaattatgtaatacataccataaccatttagttatgtataaaattgtacttgtttacagctgcattgatgtaatgcttgcatactaacatgcttggctttcttggtgctttgctaagattccattcagctgcaagtcagtagaaattatacggccataagtttggatgtcatctttgtgagaagtaacatttttttccttgacatgcttcagtttttcatgaaaacttatggccatgtaattttaaattgaagggaggcagaatgagttgcagataggtataaaaattgcatttgggtgagtcagcatatattggagttactgtggtcagtaaaattcaattttccaaagagagaatgacccaaacaacttgcaagtggtatgatttgtagtttgatcttcttcaagtcagtggaaatgaggtggccataagttatgtcatctttttatgaagtaacatttttcctttgatatgccttatatcctttcatgaaaatgggaggcagaatgagttgcagttgggcatgttttgaaaaaatttgattcaggtgagtcacgatatatgggagttggttgcctggtcaatttcaatcatccaaagagagccatgggcctgaaaactttcaagtggcatgagtgatagtttgatatttggctttagctgagaaggaaacaactattcttttcccctccccaccctacctccttccaagttccaacttcttcccctagaagatgattttgaatagggaatgctgatgaactttactgcacctaataagagtttctttggttctgaacttcaaatatgattggatattgtactttgacgtccatgatgaagttattattgtggattttttggtatttataatagtttgaagaatgcaggaattgattggggaaataccatggtaaaattggggtgaagtgatattgatcaaatccatcaaggaccaaaatgaagggagcaagtgtgttgctgcagtgtaagggaaatctgcggtttgatttttaagagtcttgtacgggtcaattttaaattttggcattctttaggggatagctacatgggtttgtttaggagacactttggagagtaattgccacaaaataaggagttgcttatagtggatggaatcccaaggtagtgagtgctctgtatggttgtggcctctatggggctataaacgaggagccttactttttaaaaaggtgtagaactcagggtagcttgtagaaattcaattaagttttggaatgatatgttaatggtgatggtgcattgaagaccaatgggttcaccaatatggaggataggaggaatgacttagttccagttgaaggcaacaaaaggttgaaaagaaggccaaagaagatgaaggtcaatgtagtagaaaaagcatatttgtccatgctatgtgaaggtatagctctaaatggagttgaatggtgaaataagatttatattgccaattccaagttgttgggagtaaggcttagtggagttaggttgggtggtatgatgatgcgcctctttgatggaaattccttgagatacttcgtccctacttaccgttattatgatgtgctactttgagtcggctggaaaatgatgtaagaagataggtatttgaatatcagtcttctttttagtaaaagttttcgctcgttattgtttgacatttttttttttgatagttctcattattgtttggcatttgaatattataatttcaaaatttaaaagagagttgaagagagtagagtgcattgtgaaattcaagggtttttcaggtagtggggcaggttgtggcaaggaaggctaggatcaacttcaatttgcaaatgaagttgagaattatttcttaacatgtgaggggggctaatgatagtgataagagaaagataatcatgtctgtgatttgtatgtagaaagctgatttagtttgctaataggaaacaaaaatttaggaaatgttgagggagcttttgaggagtttaggggtgggaagatttttggaatagggagttgtgggtgtaaggggagcctttggtggggtgctagtgttttgggataataaggtgttggagcttgtgggtagggaagagggtgaatatttgatttcatgttgattcaaaaattgcgaggatggctttttctgggtgtttataggggtgtatagggccatcttgaggagggaaagagagggttttaggcaaagttgggggccataaaggcttgtgggatgacccttggtgcattgtatgtgattttaatgtggtaagattccgaaaagaatgcaacaaaggtaatagattgtcttcagttatgagaaggttcccgaagatgattgaagagttggagctgtgggatcttccattgttgggggcccaagtgcggggaactgagttatcagtccttattgagattagacctgtttttggtggttgagagatgggaaatctattttagtgaggtggttcaaagcaatttgttgaagcttgttctagatcatgtgcctattttgctagatgggggtgggatcaggaaaggaaaatatgtggttaaagggggagggtatcaaagaattgcttaaagggtggtggatggggtatgattttagtgtatctccttttcattttggtagcaaagttgaaagctttgaaataagacttgaaaattttgaaacaaagaggtgcttgacaatgtctcaattaggaagaagaggaccttaaattcggtgggattttaggattccaaggagagtaaggggaccttttctcaagaagaagaggaagcgagaagcacaacaagggaagagtttcgcaaatgggcccttttcaaagaagcttcgtagaagtagaaaatctagggagattttagtagaactaaattcttccacaaaatggccaatgctcatagaagaaggaattttttggccaaagtgaaggttaatggggcatggctatttaaggatggtgatataaaggaaggagtgacattgacctttcacaaccttttgtctgatctagaagagtagagacctagcatcgattatgtggctttcaatactcttaatgggcatcgattgggtgtttagtgctttgttggagttgaatgggaacaaaaacctaggtttagatgggttctcaattgaattgcaattgggattttgtgaaaaataaggtgatgaagtttttcaaatagttttttgaacaagggagatttgagaacaatgctactttcttggtgttaatccccaaaaatgagggaacacaggatctgaaggactttagacctattagcttggtgggaggtttatataaaattcttgctaaagtgttggcaaatagattgtagtgggtggtgggaaaagtagtttccaagtcccataatgtttttgtagagggaagacaaattcttgatgcagtggtgatagctaatgagggagttgactctgtgttgaaaagtgagggatgagacattatgtgcaaactaggtattgaacaggcttatgaccgtgttaattggaacctcttactaatagttcttgaaaagatgatttttaggtagaaatggagaagatggattagatggtacattttcattgtaaaatttcagtttttgttaatgacacgacaccttttctaaattttttcaaagctccaaggaattaagagaagggaaatctattccccctacttatttgtcattgtaatggaggtccttagttgtttgttgaagagggaaaaggaaggaggctacttgttaggttttagggtgagtgggagaggaggtgaggtggagaaggtgtctcatttgttgtttgtagatgatacctttattttttatgaggctaatcaagatcaaatggttcatttaagttggttgctcatgtggtttaaagctatatcaagtttgaaaattaactttgaaaagagcaagttgattctagttggaagggtggacaatgcagaggagttaacctatgaatagggatgtaggctaggagaacttctgtctttttacttgaggctttcattaggagcttcagtagccacttaggatagagtggaagagtggttttacaaaaggctatcaatgtggaaaataaaatatatttctgagggagggaggcttgttttgatatgaaacatatgttctagcttacacctctatttcatatcattgtttttaattccaagatcagttacaatgagtctgaggcttgagaagattcaaagaaacttcctctagggaggagggcctttgaagaaaaatattcatctagtgaagtgatcaactatttgaacgaagaagagaaaggggggtttaggcattaaaagtttttctttgctagataaggcttttttgggcaagtgaagttggtgttatgcattagaaaggaaccttatggagataggtgaaaagtggaaaatatgaagaggaaaaattaaggcctatgcgttgggatcggtattccacttctcttgtaagtcctcaagggtgcttccataatgtttctcattaggaattattatcttcaatttgttttggacttttggaaagaacatcaataccgggttacgacttatgttgataagaacttctttattgctacttatctatgggttactaatgaaggtatgtaatgtaactggcgagaagatcaggtgggcagtccctttggttgttttcaggttgtttcttggggatgttgggccaaatagggttaagtagtgttatggaaatcactatgggaacagagctaattgtcacaggatgcacaagaaacggtggatcaccttttacttcattgtgtaaagacgcgggccttgtggaatcttcttttctccctatttggtgtggcttgggttctctctggttcagtgaaggaaactctctttgggtggtatggagcgtttgtggggaaaacctgtaaaaaggcttggaaaatgactcttttatgtatattctagtcagtctgaaaggaaaggaatttgttagctttcgggaatgaggagctttcgtttcaaagactgaaatattcttttgtatgtaatctttggtcttaggttaaggtgtttatagttttgaacccttcttctcttattagcttttttgagtggctaggctctaagtaagggtaggggttttgttgtttatttcctactcccttggtttggagcttgtgggctgcttttgtatactccctgtatacttagaggccactattttggtgcttcctcttttcgttcaatataattctctttatctatcaaaaataaaaaataaaaatgaccctccccatgggcttatataggaggagggaagcttttggaaactcgtggagccatttacactaagcaattagtgggaagagtgtggaagtttctagagaagcctagagatgtccacacatctctacactatggtagaaggcatgagaagagtctaaggctttctagagagttctagaagtctcttgtatattcttgtacataagcttgtacatagaattgtgtagggtgttctagaatattcatgaattgtaaggaactctccaaggttccagagagttccattggtgcctataaataggtgagggcctcatttggccaaggtgccaaacaagtgagcttccaagcattgtatagcttcttttgaaagcaataaagcttccattctttaagtgttgtctactatgccctctaaagcttctaagttgggtgcatcttagcctagcaagccaagcatcggaagtaaagctgacttaacaagatcaagtgtcttgacttgtctaagtgccgcacgagcttaagaaaagattaagtccgtgacataatgctctttgccaaactaatcaattttactgtaatcattgaaactgggatattagcctcaatggaagtgttgatggtggaagtagatgtgggcattaataattttttgatgagaaactatacaagttttctaatagaaaagtaagtaattgtcaaaagaaagaaggatgagaaatccctcccccccccccacccttgctccccctctccctccccctccctaaaaaaataaaaagaaaaaagaaaaaaaaaaaagacgtattcaagagtataaaaatagaaaagcaaaagagaagtccctgtagtagaaagtctttggcttcctgaccttatgggaaaagagcaataaaactttggggacagcggcggcggcacaggcatgagatcccaataaaatcaatagaggaaggggcttctctcttggccatcctatcggcttattaattagttgatctaggcctccataagaaggagaaaaagaagagtctcctttcttgggtactgatgattttcatgtagaaagggtcaagacattgttctatcctggttatctcaaagcaagagggtcttggagatggggtttggattgacaaaattcctgacctttcagggggtgtggttgctcttcctacagcggtcacccatgtaggggacgagttggctaagtatcaagcctcatagctagaaaagtttggtggaaatttcttgccattatatatttttgtcagtattttttttttcctgttggatcttgagaaattctctctaccatgtgggcaatatgctgcatttgagacattaattgccgtttcttcttcttcttcatttgagacattaattgctacatttgcttcttctctaccgtccctgtactgtatccattcgatgacttaaattgcttgtattttgtgcagtc

SEQ ID NO: 11823 - DNA, 9958 bp, Vitis vinifera
  Intron number 22 from transcript GSVIVT01001045001 (locus GSVIVG01001045001) derived from phytozome v7.0 (chr-ID chr 11; pos 6995880 to 7005837)
gaatagcttcaaatcaattattcaaaaaattaaaggtaaatttcatacacttatattatgttctctggtttcccattgctattgccctgcaaaaccagcatgtttgttgtcacattgtttacttgaagttgcaaaaatggtttacttatctggtatggtagtagtcacatttcctgttctggtaaatttatgtcaaatgttagctttcctgctcaacaaactgtcatgttggaggatgagctgatatttccttcctgttttgcaactgtatagagggcaatcttcagaatctaggggaaaaagcagaaaaaggaaaatgcagactgagatagtaattgcaagcatataaacactaatcaactcttgaggactaacatctcttgttaaaactgatgaaacttttagggcccatttaataacagaaatgaggacaagtctttatttcatattttcatttcttcaagtgaagagttcctttccatttttatacccaaaaatgtatttggtgatagaaatgaagagttagtaagaaagttggaaaaacatatgtggtactaagcatcaggctgatcagcaaattctaagacaatgaaaagagaaatgttcaagatcttgttattcaaaactatttgaatttcaatgtgatatcttccattttaccccattcagtattcactaaccatgacttgtgccactaatacctttcatgtcatcattaagaaaaataacctaatgagccacaaacacacatacactcacagacacagaaaagagagaggaagaaagccaatacctatcaattaccattaagaaaaacaactagattagccaccaactaacagagaatgaccgtataacacgtggaagggaagagagatagtgggtacttatcaagttatcattaagaaaaactaaattattcactaacaaacatacactcatgccaaaagagagagagagagaaagagagagccagtacctatcaagttaccattaggaaaacaattgtgttagtactgaaccaacacagaaatatacacaacacatggaggaaggaggagacacacgcagccacacatacacacacaaagatgagagagggagagagcccatacctgtcaagttaccattaataaacacaactatattagcctagttgaaggtcacaattgaccattttggtagaaaaaatataagttataggcatctttctaaaatattattcacaatgccctgttgttcccatgtaggtccacataagccaataatttataaataaataaataaaaattaagtagaagtcgtaggatgaaactatgactttaatgtttgatacgaaactacatgataaacatctagcttcccataaaacacaagtcacttgtttgctaagaagttcctactttgaagttcctgcttcatcttacaacttctacttagtttttttccaatatggcttgaaatggctattgtcaacaatattttaaaaagctgcctatagctcatacacacatgaatcgtgcatcgtaagtttttttatatagtgacaaataaatagaaaacatatgcatctatatatattggaagcatgaagtatgaagtaatgtatgaccaattttgtgaaagatagtagaatttaatgagttaaactatatgaaaacattgaatattagagctttgaatggttcaatttaacaaaatatatttcaatatatataagttacttatcaaaaaaaaaaaaaattaatatatataagttcataaaactttagcattgaatgttttcatatgattttaatatataaattcatcatagtaataaatttgtaatattgagatatgattcttagtttaaattctaattgggtatatgtacttgtacgtgttgatatatatgtcatatgtacttgtacatgttgttgatatatatgtccttatgtgtcatcttcaaagtttcaccttttcatgtttattgttatttcttccataccaaaaaaaagaatcccctgtttaagattcccgcttcagtggctgcaaaaattgagagattgcaaagggatttcctttggttagggaaggtaaaagagattatcttgttagttgggatgtaatgtgtaagctgagggtaaaagggggattgaggtttgggaagatttctttaaggaatcttgctcttttagggaagtggttgtggaggtatcctagggagagtacaactctatggcatcaggtcattctaagcatttatgggacacattccaatggttgggatgccaacactttagtcagatggtcacatcgttgtccttggaaggctattgcacaagtctttcaggatttttccaagtatactcggtttatggtaggagatggggaaagaattcgcttttgggaagatttgtggtggggagaccagcctttgagatcccaatatccaagactatttagagaagtcacggataaaaatattcttatatcttcaattctcggttctgctcgccctttctcttagaactttaatttccgtcgtaatctttccaattttgagatagaagatctagaatgtctcatgtgatctcttgattgtatgcatttatccacttcggcttcagatgcgagatcctggtctttatcttcttcaggattgtttactgtcaagtctttctttatagccttgtcccaaatacccgatttatctccacttttccctactaaacttgtatagaattctcaagtcccttttaaaatcaagtcttttgtctggttagtggcacacaagaaggtaaatactaatgacttgctacaattgagaataccatacaaagttcttagtcttgacatttgtaagttgtgtatgaggcaaggagaatcaacagatcatcttttcctacattgttctttgacgatggggttgtggcacagattatttcaactagccaagatggattgggttcctctgagaagcatttccgacatgatgtccatcaataaaggttttggcatttccaagagagggatagttttgtggcaaaacacgtgcattgctttaatttgggttgtgtggcgggaaagaaatgctacgatatttgaggacaaagctaggaactcaaagaatctatgggattccattcacttccctgcttctctttgggctttttgttccatggtttttaagggcattccccttaacgtgttacaactagattggctagtagtgtgtagttccaatgggatggtctagctaagagagcttgttcgtagttttcatagtgtagtttcttgttttttttattgtgttatttagttttatctttggtgggaggattcctcgtccttcttttgtacttcttttttctatcaatatacatatttgtcgtttccaatcaaaaaaaaaaaaaggaatccaaaaaaaaaactaatgtataagtaaaagtttttattcactaatcatcatcattttgaatgtgaaaattctcttatagtcattgtaagaataaatttacttttcttatatgacttttgacaataaaaatgtagcttttcatgtagaattattttacccctctcccccttttatgatcaatttttaaccttgttgtatattttaaacaattgatataataattccttaaagagaaaaaaaaaattatttgatttttcttaaaaattatgaagaatagtaaaggtatgtgtgttgttgtattacgtatagtattgtgtatcatatatgtcgtatgatatatttaagagtaaaatagagattgtgatatatatcaatttccataaaaaaaaatatatcatattattgtattgtatcatatattggaaattgttaacaactatatatatatatatatgtatgtagataaccatattagctaccaatggatacttgtgtgttgaaacatgaagctaattcctatcaattagcattaagaaaaataactatattagggttccaacccgatctccctaccaacacacgagtggggctagaagggaggaaaaagaaacaatgctgactagccttaagctcatttatgtacaatctatcatgcattcatacataacctgttaaacctactccaccaaacatctgacaaagccatacataggtaaatgtttatccaatcacaagccctattcaactataaacaactttttttatcagaaacaaaatatgttccttccattgaataaaaatacaaagaagggtgaaaaatcctaccaaagatatacaaatgttggtcaaaaggtataaatgcatactgcatcacaaaacttaccattatctgcatagacaaagcaatgtacatatactacaaaagttctacgaactcgaggagaaaaaatatctctaaaaaaggaaaccattgttttgctccttgctcatctaactagtccacaacttgattagctgagtgaggaacccaagagagagcatcccctttcactagcaacacctagaatactgcagagccgactatcaaacttccatgagcctctctcccacacccaaaagttaacatcaaattctcctacatttaggttggagagacatgaggatttagcttttaaataacttgttaaacttgtttcatcatatatttattgaaaacaaaaatcttcttaaagcaataattctttttatattttactagctttatgaataacttatcaacataaaaccagctataatataacccaatcaacagtttaactaaataatttaaatacttgttaaaataagaaggacaaagtcacttatgcatgttagagttctttgatagtaaaggaaaaggcaatgaaaaaatagaagaaaagaagaaaaggaagacaatatctttggaccattttttatagcccacaccctttattgtgtttgtgagtgcgtgtaatactaatataccccatgttgtcaaaggcgctaagtgatatggtgcaggtgttggatcatgaatgcccatcgcctagttgaggtaccacaccacaagctaaggcctaacttaggcacgaatgctagtgactaggctttgaatcatcatcattattactatttcttttttatggtggccgaaaacaatgtcattttggtacaaaatagggcaaaatgacattgtttggatccctttttttttttttttataaacacaacaaaacaatgttatgtctgtttttgtcaaaaaaaaacatgagcaaaatgatgtcatttttctgattagtatataaacccaacccatgcttctttctctaaaataggtccttgtcttcctatagaaaaagtgcaaaacaagctcaaatgatgtcattttggtgccaaatagggtaaaacatcattttgagccctttccttccttttttaaaacagaaaaaaagggcatcgttttgctgtctatttcctttcgaaaaatgagcaaaacaacattgttttgcctgttgatatataaatccaaccaatctctagggcaaaagtgcaaaccacaaggagaaggagaaggacaagaagaaggtgatgaagccaacatagatcaggtactggggctccactgtgacatggtcccagtctttttccctgctttttgaactgatatttctttcttataattgatttttaaagaagaaaaagaagaaaactttttttttctaacatgaattgatttctgaacttaacatgaattagttaagaaattagggccaaatatgagaattaatttttattgaaagatgcctataacaacaaaatcatgtatggacacttcactacaacacaggtttcattctttttttttacccttctttgtgtctgatatttctttttttaactgattttaaaaaggataaagaagtagaagatagcttttcttttctagcacgaattgatttctgaatgtaacaggattaattaagaaattagggctaaatacaggaattgatttctatggaaagatagcctgttttgctaaatatgatagtttctctaatttaaaatataaattaatgctaaatacaaatcacgtgagctagaactaccgtgaatttatttagagcttgaattatgaattatgtgagttattctagatgtagttagttctaaaatatgaattttatgagctatttcttattcaattgttttgttggatgcttcttttaaatgctttaatcttgaattttttattttttggccttttgtgttggtttgaattaggaatttggattatttgtgataacatatgaatatatgtcagtgtgtctaaatttgcgatattccataaaattgcacgtgcgtcttggaatgagccttactttgatcagacttgccttgcacctaggctctgggaacttttttgtctatgtagttgttatgtatttcataatatagttttcacattaataactagtcaaactatcacttgccttaaaagcttaactttttaggaaataagtcaataatgtatatgtcaccgatcaggagaaaaaactagcattcaccgaattcttattaaaaataaaacagtggtacaaactataatttatacatagcaggacgtgaaataagccttaattctaggaataattaaatcatatcttctaatcaaaaaagtcaaaagagacaaagtcgaataacaaccaaataattgttgattatttggctactgatttaaaacggaatctatccataattaaaatgatttgattttattcaaattatcttccaacactccccctcaagttgggttgtacaaattgaacatacccagcttgtctattagctacttgaatgatcttcttgatagtgctttggtgagtacatctgctacttgtttatttgttggtacataaaccatgcaaattgtaccgtcttcaacgttctcttttataaagtgtttgttaacttctacgtgtttagttcggacatgatgaactgggttgtgtgatatgttgatggccgccttattatcgcaatacaccttcattggcatctcctccttcacaccaatttctccttagaagttgtttaagccataatagttcacacataccatgagcaatagcacaaaattccgcctctgtgctacttctagctacaaccgtttgcttcttgctcctccaagtcaccaagttgccccacacaaaggtgcaatagcctgaagttgatcttcgattatctatggatcttgcccagttagcgttcgtgaacccttcaatgcttcttgtttcatttttcctgaagtataatcctttcccaagagatcctttaagataattcaaaattctatacacagttttcacatgctcttcgcaaggagcatgcatgtattgactcacaacgcttactgcaaaagcgatgtctgacctgctgtgggaaagataaattagctttcctactaggagttgatatcttccggtgtcaacaggtgtgctttctttttgttctccaatcttttttactagatcaattggagtatccataggtttacatcctagcattccggtttctttcaaaagatctagaatatattttctttgggaaactgatattccacttttgttccttgctacttccattcttagaaagtaacatagaggtcctagatctttagtttccaactcagtagccaacttctcttttaatcgttccatttccattagatcatttccagtcactataatgtcatccacatagacaatgagaatagtgaccttaccatcattgtgacgataaaacaaggtatgatcggattgagcctatatatatccatgcatcatgatggtcttggtaaatctcttgaaccattcacgggcaactgtttcaaaccatagaaagattttctaagcttgtagactttcccttcctttcttcctttcatgatcaaatccaggaggtaattccatgtacccttcttcttctagggctccattcaaaaaagcatttttaatgtctagttgttgaagttgtcaatccagatttgcagcaagggataaaagaactcttacagtattaagtttggcaactggggcaaatgtttctcgataatcaataccataagtttgagtgaatcccaagatgagcaacaataataattgcttcccccaatatgatttaagaacattttatggaacgaaaaagttcttgtaacaacaagaagataaccattttttctttcaccaaccccattttgttggggagtactaatgcaagaggattcatggataataccttcttttttaaaataaggtgataagacttgattgaagtaatcctttgtattatcatacctaaacttcttgattccctctccaaattgaggtttgaccattttgtgaaaattgggaaatatagtagtacttacatcctatttttgtttgaatagaaagatccaagatacttgagcgcaatcatctataaatgagacaaaccatctagagtttgaaatattaagaaatgtggaaggaccccaaatatcactatgaactaacgcaaaaggaatcgaaactcttttattacttattataaaagaagcacgaaggtgctttgcaagttcacaaatatcacaatgtaatttttctacatcaattcctttgaacaataaaggaaacatgattttaagaactctaaacaacaaatgtccaagacgacaatgatgaagtcaaatcttatcttttattgtagatgggattttggaaaggaatgataagggtacctaattctcagtcctattttaaccaaacgacaactcaaaataataaagtccatcattttccctaatatgtccaattgtcttcctcgtaccctaaaatacactatgagagggacaattcaattctttggtaagtcaatgaatggaaacaagattagtggaaaggttagatacatgtagcacatttttcaaaactatggatttattcaagtgaacttccccttgggctattttcttattactaggacatggactataactactaaaattttgtgaggaatgagtcatataattggtagctcctgagtcaatgaccaagaccataggaaagacatagtcgagacactaaaagcaagagaaggggaatacttacttgactgagtgagaaagcaagcattgctaggattctcaagagttcttaggagattcttcaatttctcaatctcttcgttgttaagcgcagtgtattcactattaccagaattcaccctttcttgtaaagaaaagttggtgaagtgtgtctgggttctctattgttcagctttgaaaccttgttgtgcacccttgaaaccctaatctttactcaaaatttgaggctttccatagagtttctagcatcagtcccttatgtgtctcggcttcttacagtaagtacaccaaatagtgcccttatttgttgttctagacaaatcagccgttgatggaggattcacgttgtctgtcacttgagtttgggcagtgttggtgtcgtcaacaatctcaaacatggtgggtagaattcggaaataattttagagaaaaatatagcagagtgcctttgaaatgacaatgaaggttgtaaactgggttcaaaaaacaggggaaaaatggtactacaactcaacaatgaaggctgaaaaggaaaaatcccaaggggcataattcgtctctgataccatgtggagaaaaattatgtctcattcatattttaaaagtatacatccctagaaatatatacagtagaagaaaagaaagaataaggaaagaattggaaattatcctattaaagatccctacaaatcagggattatatacacaaatctatacaactggatattcacatagttgtatgcacacacacacctatatacgacagttgtatacacagctgtaataatcttcaccactaatataacagaagagcaccaatatccttagtttcttcttctttccaactttatccattggagttcgactcaaatgtgcaggatcaagggtat

SEQ ID NO: 11824 - DNA, 10769 bp, Vitis vinifera
  Intron number 1 from transcript GSVIVT01024468001 (locus G SVIVG01024468001) derived from phytozome v7.0 (chr-ID chr1 6; pos 3035249 to 3046017 reverse strand)
ctgtgactcttgatttcggcaggaattggccgagggtttgtgctctttctactctgttgtggtgtgaagagtcttaggttgtgtttgggttaagagaaaggaaaggaaaatgctggtaatagtgtggaaaattaatctatttcggacaattctttgcattttcctctccgagactcaaccagggccttattttatccatttcgaggcataggcgcatagcattgaattgacattaataacaatgaaatggtcttgttagggtttgcaatttttttaaaaatattttttattgccatagtaattctggtaccacaataattatactccagtgagactcttagatcctatttagattgtggagagaaggttgatgagaggaagacgatgaaaatactgtagaatgaacaaattttttagtaattttctgcattttcctttcctggttcaaaagccccccccttttttttttgtatgcgtgtgtcaactgcggggcataacatattccttcctgttgattgaccatgctcaagcggggtttccttgttgttggtttttgctcaattaagagtttgctttggagatgatgatggttagttcacttatcagataatgttttgaattttggaagttggaagaagatgagtaatttagccaaggtggagatttattggttgtaggctcaactaagagtttgatatattttaggaatctttgttacacaaggattatgatttgataatttattatatgttaagagtcattgtcccataaggattatgatttagttttgtcaaggcttaggaactgatttaggtcctataaataagtccaagtcctttggtcctttggtcatagggggagaatgactttaggttgagttgtttgggtggttttagttaatctttgtggctttagccaatttgtgcggagaaagctctcccaatttgatttgaaaattagtggattgatataattttggaggatgtaggtaaaacatccttaccaaacctcataaatattgtgtttcttcttttatctatattcctcttgctatttctctttatattatgggctagtttagtttgtattttatttggtgattttggaagtcttatgggattaggccaaagcacaacaatttggtattagagcttcttttggtacaataagtggtatcaaagtagttgttccatttagggttagttcaaggctatttgttatcgtgctagctaaaagaaaatgacaaagactttatcagttaaaactatggttactaatgtaaaatttgcagtagagatatttgataggactaatgattttagaatgtggcaatgcgagcatcaataggatttggatgttgctttggaagaaaaacttgatgacatagatgataaagaatgggcaaggatcaattgtgaggcttgtagttccatttgctcatgtcttgttaaagcttagaagtattccattatgaaggaggcatctgcaaaaattttgtggaagacattggaggacaagtatatgacaaagagtttagaaaattgattctatttgaagaaaaaactttttcacttctagtatcaactgggtatgtctatgaatgatcatatgcatgcatttgataggatcataacaaattttgttgaatttagatgagaacattaaagatgagaatgaggctttcttgttattgaattcactttttgatatgtatgaacatctcaccgccaccttcatggtaaggataaggtagcttttgatgttgtccattccgctttgctaagctctgaatataggaagaaggactaaaataatcatggagatatgttagtagaagctttaatagtgagttgatctcaaagttggaaacttagaaaaggagacaattctcaatctataggcagacttgcaaaagatgaatgtgcctttggtcatggaaaaggccattggaagaaggattgtcctaagctacaaaagaggaataaagacaagatagtctctgatgcttgtgtggctaagtttggagataataggtcagactttgctttggttggcttatccttggcttgtaactttgaagaatggattttagatattaaatccacttatcacatgtgtccttacaaggagtggttttcttgctttgaagaataatgaggataagttgtttacatgggcaattataatacttgtgagatagaataggtaccagatacagatgtttggtagttgggaacttgttcttgaaaacgattttcttctccttagaaaaaaaaccaatcttctaactcaaaaaacaagttggcggtggagatagggtgtaaagtggggaccctcccttcggtttatttggggctgcctttgggagccaagcacaaagccatggctatgtgggatggggttgaagcaagaatgagaagaaggcttgctctatggaaaagacaatatttgtcaaagggtgggaggattaccctcatcaaaagcactttggccagcatgccgatctaccaattgtctctttttcgcatgccgaagctgattgttaaaaggcttgaaaagcttcaaagggattttctttggggagggggaagtttggaaagaaagatgcatcttatcaactgggcggtggtgtgttcccaaaaggaaaatgggggcctaggtattcggaaaattgatcttttgaataaggctctgttggggaaatggatttggcggttcgccattgaggaagatttattctggagaaaggtggttgaggtgaagtatggtcggttgggttttggttggagaacttaggaggcccgcggaacgtttggggtgggggtttggagggatatcttgaaggagtcgtcttggtgttgggataatattgatttcaaagtgggaaaggggactaaggtgtgtttctggattgaccattggtgtggtaatgaggtgttggctcaaacctttccccagttgtttgatttggcagtccaaaggaacgcctcggtaaatgagatgtgggattctagcctcggccaaggaggttggaatataagactctccagaaaccttaatgattgggagttggacgcttttggagagttgatgcaggtgttgagggatttgaggacttctcttgaagaggatgcagtgatttggaaaggagagagtcacggcctctttcggattagagatgcctacaagcttttggcagggtctaatgtcattagcttcccgaaaaagggcatttgggtggataaggttccaaccaaagttgcctttttcgcttgggaggcgtcttgggagaaagttctcactttggacaagcttcaaagaaggggatggcagtttcctaacaggtgtttcttatgtggttgtgaagaggaaagtgtaaatcatatacttttacactgtatagttgtaagggctctctgggagattgtcttggccttgtttggggccaattgggtgttcccagagagagtcaaagatatgttagtcagttggaggggcccttttgtggggagaaagaggaaaaggatttggacttccattccgttgtgtattttttggacggtttggaaggagagaaatagattagcttttagggggggctctctagctattcagaagctaaagaattcttttgtttgtaacttgtggagttgggctagggtgtatatgggagaggagtcctcttcacttataggttttttggaatggctcgccgcgccttaaggggtggtgagtggtggttgttggtttggctactgtgtatacgtcctgtatgccttgtggctttttgcctattttaatatatttgtgcgcacttatcaaaaaaaaaaaaaaacaagttggaatttttttttatttaatacaattttttgaatattttgtttcaagcaaataatacaattttattaacaaacgccaaagagatagtacatcatagtacatagaaggtatacaatgagtgccaaaagatgcaagcaaaaagagagaacacaaaaaccagctcctctttgcaagaaccccaaccaatctacaaaatcatttaaagacatagaacctacatttatttatttttgatagataagcattgaatatatgtacatcttcacccacaaagacaaatttctaagaaaagtactcttcaaagtttgatccaaacgttttccatcttgcccccctaaaattttaaaatccaactgcatcctacggggaacctaaccaatccacagaatctaacagtgacataaaaccattctcaatgtacaatctaattcaattccaaaatagatacaaaaaaaaaaaaaaaacttttaattgtttggtccgaactttcacaattctcaaaggctcctatatttttctcgcaactttccaagcctttttcctttttttgccaactaaggagctgccccaactcaagagcacccctctcacagaagcttgcatcacccactatacatcaaatagagcaaaaatcagttgccacaacatgcgagctttcagacagtgcaggagaatatgatcattcgtttcttcttttgctttgtacatattgcatttgttaggcatcctcaatcccctatttcagagttgatcccgagtcaatatcttatcccaagtttcttctcaagctaaaaagctagctcttacaagagcctaagagttccaattatactatgaaagaaatgcttcgctctcctacttgttaaggaggagtagaaggacttaactgaaaaatcatcgttttttgtctccaaccaaaccataacatcattagtatccaaagagatgaagtgattatgcaacctctcaaaaaaggaatctgcttcttccaactcctagtcattgaattgtttaataaatctcagaccctaactacccctatccgaaacattgaccacccaagcatctttagaagaggttatggaataaaggttcgggtaggaatccctcaaagacaaatttcctcaccacctatccttccaaaacttcacccggttccttgagccaacctgaagactagttttatctttgaaagcttcccatccatttttgattgccttccaaacccccactatattcctctctctcacctcttttgtgcaccaacccccctcttctagcccataattaccaacaattagccgtttccaaagaggtttccttttcctcgcaaatctccaagaccatttccccaaaagagccttgttgagaattgaaaggcttttatcaaatttggcatgttaaccaaagcaccttctccctttttttccaatctagtcgccactcttttagggatgacaaagagggatatgcagtaaatgggtaagcttgataaagtactcttaatcaaagtctgtctttcaccatttgaaagatattgcctcttccataaagcaagacttttttggaaccctcttccatccctttcaaaccctaataaacttgtgaggagcacccaaagggagacgtaagtaggtggttggtagattacccaccttgcggcctaaagcctcgacaaactcctctaaatatgggacatccccaattggaatcaattcagttttctccatattaatttttagctctgagcacgcctcaaaccacatgaagacccaactcaagtgctcaagattttccttactagtatcacaaaatatgagagtatcatctacaaagaacaaatgggagacctccactcccacatcataccttcctttgactaggaatccctcaataaaactgccttcctttgccatagaaagcaagtgggagagggtctcaatcactaagattaacaaataaggagacaaagggtctccttatctcaaccctctagaacttctgaaaaaaccttaaggagtgtcatctaccaagatgaagaagcatgttgtagagatacaccatctcatccaacctaaccacttggagccaaacctcattttccccataagtgcaaggacaaagctccaatttatgtggccataagccttttcaatatctagcttgcataagattcctctcaatttttcttcaagtttggaatcaatgacctcatttgctatcaatacaacattcaaaatccaccccccccccccaaaagcatgttgaaaatttgagaccaaggtacccaccacccttttaagttatttagaaccttagccagaagcttgtataaaccccttgccaagctaataggtctaaagttctttaggtctttagccccccctttcataggcaccaatactaaaaaagtagcctttaaactcctctcaaagagatttattgaaacattacgaaacacctctttattccaaattttcaaataagatttcaatgccttcagtttcatggccaagatgaagctataagagcctctaaaattgtatcccatcccccacccattaaagaggtatttgaaacactcctccctcagtagcatcttttcaaatctaaaaggggtaacgccattacccatccctctcatgtaacaaaattggagaatgattttacacgggtttgtgcaaaatacactgaaacacaccaccaaacatgactttcccaaccttcagacaccaaaaattggtctaatcttgacaaggattgattgttcaacctctcactccaaataaaggagcccctaacagaggaaggtcacatagctccagctccacaatgatttctgtagatcttctcatagttaaagacaacttaatgcctctattacactcccacaggaatctaataatgttgaaatcactagaacacaccatggattagcctacaaacccttaatgacccttaaatctaaaagcctttcctttccctctccaaagtgggcatatacaccctagtatatacctagatgaattggacctcacaatttttaaaacaaaatgttctcgcacttccataaccaccagctccaaagttttaaaatcctagaaaacaaacaacctaccattagcttgcctagaattcataggctataaaccccattctataaatttacccacacccctaagctccttattaattcgctcgaaatcatttggattttgtctcttacaagtagactaagtcggctttctacaatcgaatcagggacttgatgattttcctcttgtcactgtcattcactcccccaacattctaagagatgatttttatcgtcatttactaatcggcatgatgacccatccttctctgccaacttccctcccactagttattgcctcaaatagttcatcttgcactctaactttctaattctcttttgaattttgaagagatttttttcctcctctctctaacctcttaaccctttgcctcctttctagcctttatttttctaagaagacctaagatcttagcttcatagccctctattggcatgcctagacacttattgagcataacaaactactagaaaaccaatcctcaatagggaactcctctcttgaagccaccctaatggttactcctccttttctaacctttttttccacccaaacatcattcaccttcattgcaagatctgtatactccacttaggtaccatccatcaaaatcatacaccacgagccacaaccctccccttgagaaatcgcatccaacctcgcctagctcccctcaaggactaactcaccctcagagaaagaaggagaaacaaccctagttcccaaagaagagacaaagaggggaaaaaaggttggatatttgtttgcttctactgagagggactcgttggcaattggatggtgaaacttcatcgatgaggcaacatggcctcttcctcaatgacgatctcctttctacacaacgacaaccctctaagaaggaaagctgtaggttaaaagaagccccggtgtcatttaggcgtaaaatgattggtccatttgagcttgtagcccctagtcaccattaaaggtagcttttggtatccagcttagcccacaaaccttatgcaccaaagaacatccactacctaaattaaataaagggtctttcttagcccaaccactacacatccctttcctttttcaccttctgctaccatcccaacaccataacctgctccttttatcttgcctctagtgtcactaagaataatatgcctagttcaagctgcctgcttcttactttgggcctcaaatgggctctctttaggccttaaataggacctttttgctcaaacttacatcttaagcaacttttttaggtctaaccctaccaaaaatgccccctccaacccgatctctaacaccctttttatagagtttaatagagaccactccaccgtctcttcttgtatccaaggaggacatgtccctatgccagctttcattgtcaaaccttggactcccatactcaaggcaacatgtgcctctccatcctctttttctctaaccttttgcccactacaaccttgcctaggagccatctaagacagtcatggagggatttcccaccacaactgaagaactgcgaaacacaaaagacccatcactaattgaagaaccttaggcatcttcgtctcatcagacttcaccaacactcttgcccactgcaaagtgctacactgagttgtgttttcatccatagctacaaatccaccatagtgatccccaagcgttttgaacacctcttagcaccacaaatgcagagtaagtcccataattctaatccaaacttcctttgcttgcactccactttgaaagcacctaacctttggaacccatctatccaaatgtagaaacttgttctcatacctccttgatcccgagtctagcactgactccacattagaagcctctacaaagtcaaagagaattagggccccttaagaagagataacttcaccccaccattcaagttctaagtccttgttgcccacctcttcaaagagggcaagtttggaatggaatcaaaatgctcccctcatcatcccactaaacaatgcttcaaaaggtcctccctaaactgcacataatcacctcaccctccccaccataaggagccttgaacttcttaacaaaggaccttccctttgacaacaccaacttgttgcatcctctagcatgctcatggtcattggcacacacattgggttttggatggagggagtcacttggaaaaattagtgtgaatctcttagcttcaatggattccacggaacattgaatgaattgttttgcttcatcataccaacattccaacctcgagaatctcccaccttcattccaaaccttgcaaaatttcttctcacccacttccctccaacaagatttgaccaaatctaattcaattagatatgccctttcctcttttcataattctacttagcaaaactcctgataccacctcaacaacaacttcaagggacttcaaatccccttcaaaccagctcttaccccctttcttcacttcttccatctttgaatccattgcaaattgcttgttgaatatacctttggtttatttgagttattccatttttatgaatatttcttatgccatggaactttcttgggttgtcgaccatgcaagtagaggttcaaatcaaaaggttttgaatacttattattttttaggataaatttgaggtgttatcaagtattttttgtaaagtattttgaaaaacaattgaaaatataaaaaatattttgatcacttttacattatacatagtgcatagcatctttgttagacaacctattttcctagaagtttaagctagtgggatttgagtccacaatgtatatcatgcactctaacatcttccctcattggtggcctcttcttgggtttacatgtgggtttaatagagtggagaactaaacatgtggtgaggtggaacgcttgacctcctgtcaaatgagactttgataccatgttagacatccaagtttcttgaaagttagcttgtaggatttgggcccacaatgtatatcgtggacttgaacaactttcatggaaaataagccaagaaaactatttctcatatttgagtttctaaatagaattttgttcctgtcaccctgaaccaattgagaactgtttttaagaatggttctcaaatctgtttttctgacaattgtattcgaaaatgttgccaaagaagtcccatctacttgatatagaacatataagttttaaaggttagtagcatgttttattcaattacaaacattttgtgataacaccgaaaaagatcccctttatctatccaagtgtgatgcttggacatgttctagaatggtggatcatttggttggtcataattaatggtgtttgtattgaaggggggaaaaaccgttattgaaacaagggaaccaatagaaggaagaatatgatattcaaccacaagaagaaaataacccaaaaagtttatgctaagtggtgatgcacgttgaaagagaaagaaagaggggggggatgtgatagtgatgtcaactttcttgtatttaatcattacaagtgcacttttagaggaatattaatctttaacattggcatgtgatacattgttatattttcaagagaagatagtatgatttctttacttagtgagtgattgttagtaatgtgctaaagctttgagatttgggaaatttgtttggcaacttcctatttggcacaataaaatttgatgtgttctttcatttgttttattgaagaatggttgttggcattattgtttcttcaatgtttgtatgattacttataatcttttcccttcttattactcttgcagtacaggaagcagctca

SEQ ID NO: 11825 - DNA, 11276 bp, Vitis vinifera
  Intron number 1 from transcript GSVIVT01026986001 (locus G SVIVG01026986001) derived from phytozome v7.0 (chr-ID chr1 5; pos 18798000 to 18809275 reverse strand)
ctcttgatctccttcaacaccccttcaagcagtatgttgctgatacttcaccagattgaataatcatcgatttcttcccgcattgggtcagttcaattgctcgagaacatggtgtaccgctcgtgtacttctctgttttctcggcttcaacacttgccttcgttgggcctgcttattccctcgtcggagatggtcgaaggagacttaggtcatctccggagagtatgacatcaccgccggaatggatcagttttccatcttcagtggctttcaagggctatgaggcaaaagccgtctattccggcttctttactaataacgcttctggaacaactgacgctgcaagatatgtcgagatcattaattcatgtcaagccgtggctgtgcgtagttgtgtggagtatgaaggtgaatacctgaatttacttggaaatctcatgggcaagccggtgattcctgtgggtttactcccgccggaaaaggcagaagggagagaaattcaaatcactgatgggtcatggggggagaacttcaaatggcttaatgaacaaaagcccaagtcagttgtgtttgtagggtttgggagtgagtgtaagttgacaaaagaccaagttcatgagatagcttatgggctagagccatccgaattgccatttctgtgggcactcagaaaacccgactgggctattgaagatgccgatgccctaccttccggtttcagtggccggacctccggcagggggatggtgtgtatgggatgggcgccacagatggagattctggcacacccatcaatcggaggttcattgtttcattctgggtggggttcagtgatagaaacccttcaatttggccactgtcttattgtattgcccatcattattgatcaaggtttgaatgcaaggctgcttgtggagaagggtttggctgtggaagtagagagaagagaagacggatcatttagcagggaagacatagccaagtctttgagacttgccacggtgtccgaggaaggagagaagctgaggatccatgcaagagaggcagctgccatttttggcgacccgaagctccatcaggatcactatataggagggtttgttaagtatctgaaaactgggtttgcaaagcagaagtgatatgtctgccaatttttgagaagttccaatgttgtttacaaaattctaatttcattacaatagtatgaaagcacgcatgtgaatcttgattgctgataatattgggttgggtgcatatgtagtacggaatattgtactcttttatcatcttttaattttagattatttaatcacttgatatccttttatcattgcttcgtcctctccgctagatgacccatcttcacttctctctacttccgcagacatactcttccccacaaaaagtcttgcattaaagctttgatcgattatgaatggtaatacaatgagacgatacccaaattgaaatgtttctatggctggaccccacccagagtggaacaatgagcccccaactgatagctgtgctagaatttccacctgtgctgcccatctcattaacatcacccctatgccacgtctactcttaatcctaaatagaatgcaactaggtagggatttatatgtaaacatagttatttatctaagataagctcgaatcacttcttctcataatgagtatataatcctatttcaatctagtccaatataaaatgaaattataattatggaaacaattcatcactttgaattggtaatcctttgatttcaattagtaagatcttgaattaagaaatgcatcataggaggttcaaccattgaaattggacaatagagcataacatcttcaacaaatcaatcatattcattttctaagtatgcccaaagaaatgagaactcagatcgctcaagcccataaataggagtggcaaacatcctattgtttcatagcttggtctcgttgcttacatttcatgttaaaaaaacgtcttctttcaaagtttcaagaattcatgaagtgacaaattcgtcattgtaaattcataactagtattgcaatatatgaatttcgcttcccttatcattcttaatttcttcatcaacaagtttttctctatttaagaaatgacggagaacactcatgtgatggactaagatgatgatttgatttcaacataataggaaatttgtgatgtttagcttgattgaaatcaaattaggataaaacttttatttctctcatcatccttaattttttcaataggttctccacttaagatatgatggagaaaactaatatcacaaaccaagaagatgattttattttgccacactaggaaatttgttgtgtttattttgattaacatcaaactaaaaaacttatggaaggcttggattttttttttttaaaaaaaaaaaaggaatacgtggttttttagaaagagaaggtttaacttcaagcctcttcccctaactctagttccattaagagtttgataattttgacaataaaaacattgagttctattatttctttacaaaaatttatagaaaaatatattatgaattatacaaaaaaaaatgaataataaggaaaaaaaaatattatttcttcaattaaaagaataaaatattattaatatctaactagttttaatttacaaaaatattggatagagtgaattcttatcattatgcaccccattttgtgtgtcttttgtataattctatgcatctcattataaatgtcccgccattatatgcatctccttgatttatagaaatattaattaaagtgattcttattattatgaactcgattctaaacatttcctttatgtcatttcattttgtgtactcttttatagagatttcccaagaatacctagctaatgaaggtagaaagaggcttcaaccatcgtcggagagtttgatgtcaccatcagagtggatcaatttttaatatttagaggttgtccgaggatatgaagcatatagtgtttatgctggtttctatggacaaaatgcatctgaagtgatgctcacatgcatgttggatttaagggtatggaaacaaatgactaacccgaaagacacaaataaagaacataattaataagaagaaaaacttatcgatcgaggtgtgacaaatactgtccttgaaatatatccactctcctcgaaaacgaacttggtgcactagggtaccagtggtctacctccaggattcaacaaccagatctcgttttgggtgcactctgtaagcgagatgtgtacaactcgggttttgaaaaaattcctccagatagatgtatgaaaagactctttgaaaaattctttgaaaatttggtattcgtatataaagagtgaggggtggtctgcttttataggtcactaacacagtctcaatgggactctacttgtaattagaatatgactcaaagtggaaggggattctacttataaatggaatgggactccactagcacaatcccaataggactcttccaaaaaatataagactaataaaataaaataaaaataattctcaataggattctttccaaaaatataagactaatagaataaaataaaataaaaaattatttacactcttcctacaatccctcactaagtgtaaatgtaattttttttgaaggaaaaaaaatctaatgcattagtactggtgcacaaaggctatgaaccagtctcaggacaaataaggattgaatcacaaaggtgaaaataaatttctatgaaccagtgtttcttgatgtaactcaagggacttttatccacatttgttttctcaactacactacgagctgtataaaacgggttggcacaaatagaccatgcgccttgcctggatgttcatgagagctctagagaacctgcctaagttctcataggaagcgaccccacctccactctcatatagatgaatccatcaagtatgttctacattaaacgtaccatccataaggaatatggtattcattaagagtaaacactcaaccttaatcaatgcagaatatgctctatctacaccatagggataaactctcatacaattagagttgatagagcacctcaagtcaacaagtgatttgttattacccatatgaacctacttcatagaatttccattctaatagattggattaccaccactcttgacttctgtaataggcatttgcctcatcactgtcgatgtttatttcactagtttcttatttagtggtttggtcaaatgatcggccaaattcaactttgacctcactcattctagagatataacctgtgtttcaagcaactgttgcacaatattgtgccttagacgtatatgcatgttcttcccattaaatattttactcttagcattagcaattgtagcttggctatcacaacatatagacacagacgaggctagtctcatccataaaaggatatttgttaagatgtttctaagtcactcaacctcaaaacttgtttttcctaaggcaataaactcaacctccatagtagaccgagtagtgcaagtttgctttgcaaacttccaagaaactgcacttccaccaaggattaaaacatatccactagtggatttcatctcatctgaatctgaaatccaatttgcatcactaaaaccttcaaggacacttggaaatccactaaagcacaaaccatagttaatgatgtctctcaaatactcaaggactctacaaacaacagtccaatggtcctgattagtactttgggtgtatcgactcaatttacctactgcttaagtaatgtcaggtctggtacagttcattaagtacattaagtttcctatgatatgagcatactctatttgggcaacactatattctctatttttctttagctgtgagctgggatcataaggagttgatactggtttacaatcaaagtgtttaaacttccttaggatattttcaacatagtgctcttgataaagtttaagcccattaggtgttctagttattttaattcctagaatcacatctgcctcctttaggcctttcatatcaaacttagaacttaggaatttattggtctcacacacaacctctaggctagttccgaagattagcatgtcatcaacataaaggtaaatgactacacatgtgtaatcctcatacttgttgtagatacacttatcaacatcattactagaatatccattagttactaacacatgattaaacttgttgtgccactgtttgggagtttgttttaacccatatagtgatttaaccaacttccacacttttttttcctttcctggaactacacaaccttcaggttgtttcatataaatttcctcttccaaatccccattcaagaatgcagtcttgacatccatttggtatatcaccaaattatgaatggaagctagagcgatcaatactctaattgatgctattctagtcataggggtaaaagtgtcaaagtagtctacatcattcatttgtttaaatcctttggcaactaaacgaactttatacttctctatggacccatcttgttttaactttcttttaaagatctatttacaactaatagtctttgcaccatgaggtaaatctactaactctcatgtatggttatacatgattgattcgatttcattgttaatggccttcttccagaatggtgtatcaggagaagttatagcttctttgtaggatctagggtcttcatctattaggaaggtgtagaaaccatctccaaggtttgtttctttcctatctcttttactcttaggttcaaattcaaaaggttcaatagacttatctctacttgttttccgaacttgttgttcaccatttagtttcataggaaagatgttttcaaagaaatctgcattctttgtttctagtatagtattgacatctacaagactattttctgacttagtaacaagaaacctatatgtcgcattattcttagtataaccaatgaacattgcatcgaaggttttaggacctggttttcgttttttaggttcaaggagaaaaactttagctaaacacccccacactttcaggtatgttatattaggtgcataacccttccacaactcataaggagttttaccagttttcttgtaaggtattctattttgaatatgacatgtagataagataactttcccccataagttcaagagtgctcttgaacttaccaacattgcatttataatttcttttaaggtcctatttttcctttctgctactccattagacttaggggaataaagaagagtagtttcgtgaatgatcccatgatcttcaaaaaaagaattaaaggggttggactcatactttcctcccctattaattctaagccttttaattttcttacttagttgattttccatttcatttttgtatttcatgaaagcatcttttgcttcatttttgtttctcaaaagatataccattgtataccttgagtagtcatctatgaaagttatgtagaatcatttaccacctctagttattgtattttttaggtctcctaagtcattgtgtattaaacttagtagatctgattctctttcaactaatttgcaagatttctttatggttttagattttacacaagattcacattttccatggttttctaaggacaatttagggattaaacttaattcaacaattttcttcatatatgaaaagttcacatgtcctagtctaccatgctaaatatcacaagaatcaactatgtaagcatgcaacggaagaagatgcattattattgataatataataaacataatagccctttcccacaaatgcgtcattcttggttaaaactattttatcatagtcaaacaagatcctcactcctgcttttccaagtagagatactgacaccaagttccaacggatatctgacacatgaagaacatcactgagggcaaacacttttccagaggttagcttgagaagaactttccctttgtcaatcactggagtagatctagaatcacccatgaacacttgttcatctccttcctttacaatggtataggaagtaaatgcacttctattcccatagatgtgtatggtagccttagagtctaccacccagttcttcatattggtgaccatgctcacctcagaggaaattactgctgtgatcacctctacctctgttagatttgcctttgaattggacttctcaattctcttcctatggcgacattgaactgcatggtgtccagacttgccacaaacaaagcaattaccccattttttaatagttgagttttggaccttgtttgatacattggggttggtcctaaagttttgtttcctggacctattgtttttgggtttaggtttttcttctactacattagtcttagaagacaattcgttagctttcttaacattatctctatttcggttttgttcatcaatcctaatatggattatgacactctctaaggacatttgtttccttttatgtttcatgttatttttctaatttttccaagtctctaaaagttaatgtcttcaataactaagtcattaataacaagtgatagtcatggatttgagatgatacatctctatcctcggtcatttggaaatttctaaaattccctatgacatatttatgagttcctgcatcttccaaaatatattttttatttattgcatcccaaatttcttttgcaactttaaattgacaataaatatcaaaaagttcattagaaagggtacttagaatagtatccctaacttatttatttctagtttcccaagttggtaagaaatgacaaccatcttttggttttgggtcaatcaaaatgtgtcctaagtttactatatcaattgcagagaaaactctttcctgccaatttttaaagaatgtctcatttaagggatcaatttttgaggtgttaggataggtgtgaactagggaagtctatgaagaaatctttctaatcaaatttcttctttatgtaaatttgtgcaaaatccctttttaaggaaaaattcctttagttaaattcatttaaaaaaaaattgtaattgattaatttattcattttagtttatttatttaaataaagtaagcaaaatcatcttgtagttaagacaaaattcttctttttttatatatatagaaataaagtaaaaaaaatatttttattctttttattttattttattttatttatctatttattttattttaattcttcatgaatcttttttatacaagtaaaataaaaattttcttttagataaaattgtcgaaatgtagatttccattttttttcttttttcttttttaaagcaaataaattcttggaaaagaaagcaaaaatcaaattggagaacaaaattggaatgtttttgtaaatataatataaaaaatcttatttatttatttttaataaaattggataaactttttttacacaaattccaaatctttaagggtaagtaataaatttgaaatatctttttataaaatcatagataattattttctaacaaatctttttaaaatcaaacagtaaaatggattcaaaattttttttaattaattttgtaaaaattaattttttgaattttttttttggtgttaataaaattggattgaattttgatattttttgtaaataaaattgtaaaagtctgttttctataaaaaataacaaaaattaatttgcttgcaaatagaattaaattgatacaacttttgtagataaaattatatattttctttcttttttaaataattcataaaaattcattcatttttagtaaaagcaaataaaaataatttttattgctaaattgaaattttaaaaaaaattattgtaataaaataatgtaaataactttttttgaaattgacattttttttgtaaataaataaattgaaatcattaattcaaaatcatttttaataaaatactttgaaatttcttgaatttttttttaagattcaaataaaaataatttttattgctaaattgaaatttaaaaaaaaaatattgtaataaaataatgtaaataactttttttgaaattgacctttttttgtaaataaataaattgaaatcattaattcaaaatcatttttaataaaatactttgaaatttcttgaaattttttttaatatcttttttttatttagttcaataaatcattttgtataattctcttgttaattattttgtgtattcttgtaattagatttgataattatttttgtgtatattgattttcatcatgacttgtacatactcatttacatgattatttttcttggtattcctaattaattaattaattgtcacaattctcttaattcgtttagtagagattgtatgtacacgggtttaaaagggtgttatggctcaccatcgtaccttcccaataggtaacttgactcccgaacccgactttggtttttcacaaacctgtttttgctttaggagtcacacttagggttttttttttttttccttattttgttttcccttttaaaaataaaacaaaaataaatagcaactctaagtcttttctaaaaatcaaattttcaccaaataaaaaatgagtttcatcatcgagcagggacacacgtgaaaaacgtcgagccacaccaaagtctttttttttttttttttataacctaattaatcatttttttttatcccatatgtttgaacttaagatttattttctcttttgcatatttgttcaataatttagatttaattcatgtatcaactgttcaaattcaaagattgatgtatgctggactctaacccaacaacttattattcaatccaatcatgaaaaagagaatgctaaggtaccatgccctttatcgtatttttaatttaaataacattatttaaaaagtaatactttattttataaaaaaatacaattcaaaacacaattttactgaaaatttttatttttaaaagagaatttagtataaacatgatttataaatttacattaaaattatttttgaagaaaattttgaggttgtaaagaagtataatatacatattaaactcaaaatattacaaatttaaacttttaaaaaaattgataattcaatataatattagaacttgatttagtaggaagttatgggttcgggtcatctttctgcaatttgtccaatttgtaattttgtttatcctttcacttatgggcatggcttaacggtgctatttttttcctaccaattttttagaagtttttttaaagccacatgtaattgccattttttcctaccaagtttggtagcacgttgaaagttagaaacgagcccaccgattaatttgctccatgcacatgacaaacaccccccctcctcccatctaaaggtggtcacaggcatgcatctaaatatatgcacacagaaaatgaagattgatccatagaaacaaaccaatggaaggtgtcacgtgtcagacactcatgtggtgtgtcatctaacaagccaaaaagctcataatgacccgttagtggcgtaaagagttgggacttgtgtcaattattcaaaggtgaagacaaatgctcttctctctcttataatgcacatgcgtgtcaatttttttattctaatttatttgactcatgaaaagtaactagaaaaaaaggctaaaaaaatattttatatatatatctattggatatcaagaaaaaaataataataataataaataaaaaatattaaaatatatattttcattaatttttcttcaatgaagattaaaatttttgaagaaattaattgtatttttcacacagttttatttatttttctcaattttttcttactcattttttttctaaaatttttcttattttactctttacttgttttttctctatacgtttggtttgtattccagtgttgggctgatacggagtgcattcacggtgggaaatgactggtaaaatgcatgtagtcatgcttccatggtcggccttcggccacatgattccgttttttcaccttgccatcgccatagctaaagcaggaatccgagtttcactggtatctactccaaggaacatccagagactgcctaaacctccaccaaatttgtcatctctgataaagttcgtggaacttccctttccagtaatggagaatgggagtatcttgcctgagggtgctgaggctactgttgatatgccctttgaaaaaattcagtacttgaaggctgctcttgatctccttcaacaccc

SEQ ID NO: 11826 - DNA, 1788 bp, Vitis vinifera
  Intron number 5 from transcript GSVIVT01013400001 (locus G SVIVG01013400001) derived from phytozome v7.0 (chr-ID chr1 8; pos 697572 to 699359 reverse strand)
taggtcaagagttcactaaaagcggttggggttttgtgagtatctattcattttcatttcatcatttttcttattcaggaaaacatgtgcattataattcagataaaatgtttattctttgcattttctgagagatttgatgggaaagttacagtctagtttaggtatctgtggaaattggcattccattttgttttccctagaatttgaaggcgaaataatccatcttctggaatggagtcattttgaaatatgaaaccaacccttaccacataccatggtggaaagatctttaataaatcttgaagcaccctcgttttaaaaaatattaaggaatacatgtagtttttttaagtacaaccaataacacaattgaataatgctagataccatgtaaaacactatgggctgtttcaatctccatgtatcatctaaaccaccaataaggaaatgaattgtattttttctttggcactatgggctgattcaatttctatgtatcataggaaatgactttcttgtttttttttggtgagtagttctgatgcaggttagacctttcttcaaaatttgctcaaaaagggccagaaaatgggaaaaactcattgggcccttgtattggtaccacaaggacaatttttagagggattatggatacctcattgattctagccttgttgaatttcaagttatctcaaaactcaatagtgaagatgtatttggaggtgttttgttaatgttatagaattaagtatttggttaagatccaagttatcaggtgtttaccaggatactcttgtggacttgttcgagttttatttgcaattttttttttataagattttcttataaattagtcttatttgtcatgcagtgtcttttatttgatttagaggggttaaataattatgctctgtgaaaacaaggctcatagagacaaataaatagaatggttctgaaagatgtcttcatgtttttgccctgaaagtaatggtcagacttcattcatcttttcttttctaggtgaagcccatgttccctcctcattttacgtctgcatttggacaaaacccttatgctgtcctaaagtttcaccaacctatttttgtagtcagagcttagaccactctaacccttttccatccctagactctcgtccattggccaacagatttagcctttaggttaattggttggttaacatcttcctctttcatgaactctaaattgataagccatcctagaccataaactacttaattgagcagcctcactcaacaaacccaatttcaccaatggactcttatagctattcctctgttacctaggatggacttgtcctaagccatagcccatgacctaccaagagttgtatcaactcttaagtgcagtgaaaacagatttcatggaagatcctattgtagataagctcggatgacataaaagaattcttgctttcaagctcatgtagttgagattaaggtcttattgaattcagctggcatgagaaaagacatgcaggaactaaactaatgagagaaaaccatctatgccctgaaaattttctcgtgtttaatgggttgtgctttgtataataatgaataaatgttcatatttcatttttaagttggatatatatttttttttcccagcattataaaactcatcctttttgagcttttagtttttacactagtgtaatttaaaagcactggagcttgactcgttccttttctttgtatattattattaggtgtttccacgagactctcccttagccgttgacat

SEQ ID NO: 11827 - DNA, 8215 bp, Vitis vinifera
  Intron number 1 from transcript GSVIVT01014829001 (locus G SVIVG01014829001) derived from phytozome v7.0 (chr-ID chr1 9; pos 10293653 to 10301867 reverse strand)
tctgatattcacatctgattttttttgttatttatattatgccctgttttttttttaatattagttatatctaaaatctatgtgttatttggtctcaagatgaatgaggatgatgtatgtcttgtagactatgcaaccacacacacaattcttcgagacaaaaaatattcctctaattgacattaataaaagctaatgtaagtaccatatctggtattacaaacttagttgaaggctctagaagaacaaatataatgctacctaatggaactagattccatataaatgacgctttatattttaaaaaatccaaaagaaatttgctcaactttaaagatatctacagaaatggatatcatattgaaactatgaatgaagataatgtaaaatatctttatattacttccattatatctagccagaagcttataatggaaaaactcttggctgtctcctctaggttgtatcatacaattataatgcctattgaatcatatgttgtcataaaccaaaagttcaacgacccaaaagtttttgtcctttagcatgatagactaggccacccagggtcttcaatggtgcatcgaataatcaaacactcacatgagcatccactaaagaaccataagattcttttgcccaatgaatattcacgtgctatctgctcataatgtaaattgatagtcagaccatcttttactagagtcatatccgagtcaccagtatttttagaaagaatacatggggacatatgtgggtctatctatccaccatgtggaccattatgttattttatgatcttaatagatgtttctactaggtggtcatatttttgtctcatttctacacataacgttacctttgctagactccttgcataaatgatcatattacgagcacaatttccaaattatccaattaagacaatacgtcttgatattaatgttgacgaatttatttcacaaacattcattgactattgtatgtcagtagggataaatattaagcatcatgttgttcatattcatacccaaaatggattagtagaatccttcatcaaaggtctctaattaatagcttgaccattactaatgaaaaccaaattacctactttcacctaggaacatgctattatgcatgctatagctttagtccttattcaacttacaacttaccatgaatgctccccttcactacttgtgcttggaaaacaaccaaatatctttcacttacgaatctttagttgtgcagtataagtaccaattacacctacacaacgcactaaaatgggttcccaatgaaaacttggtatttatgtaggttttgattctccatctatcataagatatcttgaacctttgacaataaatgtttttacaacccgctttgcgaattgtcattttaatgagagtgttttcccgttattagggggagaaaagtcgattcctaaagaacaacgagaaattagctggaaggtatctactatgacccatcttgatcctcgtacaaatcaatgtgaactagaagttcaaaggatcattcattttcaaaatattgcaaatcaattaccagatgcattcattgatataaagaaagtgacaaagtcacatatcttggttactccaacatggattgatttcttgcaggacaattaataaatgaatctaaaatacacctgaagtgtggtagacctgtcgacttaaaggatgtgactctctataagatgagaatacaagaaaaacttagcactctagaaaaggccatcaaaatgactgattagtttaaaattgataactctatagccccaaaagaggcataaataatgcagaaagcccctaaatagacacatattgaataagaagcccctgaagaggcacatattgaatgagaaacccctaaagagacacaagtacctgaaaattgtgagatctcagtaagttatgtacacatgagagaaaaatgggattgaaataatattgttattaacaatattttcactttccaagtagcctttgatatcataagaaatgatgaagatcccaaaccacaaaatgtgaaagaatgctgacatagaaatgattggccaaaatggaaagaagctatgcaggcagagttaaactcattaacaaaacgagaagtttttttacctatagtccaaacacttgaagatgtaaagcctattgggtacaaatgggtatttgtacaaaaacacaatgaaaataatgagatcataagatataaagcacgattagtagcacagggtttcttatagagacctggtattgactacgaggaaacatactctcccctcatggacacaatcacattccatttcttaattagtttgataatctcaaaaggactagatatgcatctcatggatgttattgcaacatatttatacgaatccatggataatgatatacatgaaaatccctgaaggatttaaattgcctgaagcaaatagtacatcgtcttgtagcatgtactcaatcaagttacaacgatccttgtatggattaaagcaatctggacgcatatggtacagtcgccttagcaaatacttgctaaaataagggcatgtgaataaccttatatgcccatgcatcttcattaagaaatcaaaaaccgaatttgcaattattgcaatgtatgttgatgacttaaatattgttggaactcctgaaaaggtcacaaaattaaaaattacttgaaaaggaatttgagatgaaagatcttggaaaaacaaaaatttgtcttagcttccaaatcaagcattttcaaaatggagttttagtacatcgatcaacatacattaagaaagttttgaagtatttttatatggataaaacacatcttttaagttctccaatggttatccgatctcttgatgtgaaaaaggacccatttcatcattgcaaaaaagatgaagaattacttagtcctgaagtaccatatcttagtgttattggtgcacttatgtattttgccaattgtatatgcccaaacattgttttttttgtcaatttattagcaaaatacagttccgctccaactcgaagacattggaatgacatcaaacatatattgcgttatctttacggaactactgatatgtgtctattttacttaaggaaatcaaaacaacaattgcttggatatgcagatgcaggatatcttttagatccacataaaggtaggtcacaaatagggtatgtgtttaattgtaatggtactgctatttcatggagatttgtcaaacaaacaatggtggccacatcatcaaatcattcagaaatactggcaattcatgaagcaagttgtgaatatatatgactaagatctatgatctagaatattcgggaatcatgtggactcttttctatcaaaggtgacttaacaatattatttgaagataatgctgcatgcattacacagataacaaagggttatattaaatgagatagaactacacacatttcactaaaattcttttatacacatgaactccagaagagtggtgatattgatgtgcaacaaatacactcaagtgataatatagtagatttgttcataaagtcgttgccaacctcaacatttaagaagttaatacagaagattggaatgtgtaaactcaaggatatcaacatgagaaggagaatgtttataaaagggtgttagtgtattgtactcttttttcccttcatctaggttttgtcctattgggttttacttgcaagttttttaacgaggcaattctaacatataaaaaacaactattttttgggcttggaggttcatcacacccctactggtattcaactcagccaagcaaagcatatcattgatctctttacccgagctgctatgttagatgccaagccatgtcccactcctatgtcctccaacacaaatctctctcttcatgatggtgtggctcttaaaaatgattcagattatcgcagttttgttggtgctcttcagtattgtaccttgacacgcccagatatagcttttgtagtaaataaagtgtgtcaattcatgcaccatccctttgatgttcattggtaggttgttaaacgtattctctggtacttaaagggcatatctcattttggtatcttcctacagccttcactggacttcaacatcacttgctatacagatgccaattgggcctcttgccctgatgacaagcgttgcactagtggctactacctttttcttggctcaaatatggtttcttggtcatcttccaaacaagaagtggtatcccggtccaacatcgaatcagagtaccgaggggtagcaaatagggttgcggaaattgcttggactgaatctcttctttgtgaactttccattactcccatcacctcccctcattctttgtgatcatatcagtgcaacatacttaaatgccaatcctattttgtatgcccaaaccaaacatgtggaaatcgactaccactttgtccgggaacatgttcttcaacgctctctctctctagttcacaccttctgatgatcaacttgctgattgcatgaccaagcttctttccacccactactacaaaaataatttatgatgtcattatttatggtgtcgcatttaaaataatgacaccattgagcttaaaatttataaaggtgacacatcatataaaaaatcttcaattagggtagttagatgatgctaattttagatttatggtgtcattttttggaagtgacaccatatgaaataaaaaaattaaattttataactcaatgggcctttttttaaaatagtgagtaggaacaatttatgaaaagtccattgtttccatatatacattaactaatataaaagatcttattgcttaaccctaaccatcgttttcttctccttcttctcacacccatggtcggcacacccataattgatattctttgttttgtaaaatctcgggtaagtcaaaatcccttatctatcatcttcattttttttttattaatgcaaaaatctttgttagtataattgttttatatctcttgatttagtatatctatgatgtgggttttgtaaatggtgtcttttatcgagttccaaggaagtaaaaactaggtttaacattctaacatatttttcgtttcattgctaataagccccaaaacaaatgaaaacaagataaatgaatgatttttaaaatttttgtctaattgagaatgagagatacactagtttgtagtaatttttcacatgaaataatattttattgaagacttgactatatttgataattttttccaccgtgctaggagctttttggtgaagtctaacaatagagattgacatctactacaagatgatgctcaattaatccaaaaacacttaagctatttagggttttcttcagttaacctaagaaaacatttctactttctttgtattgagtcacctaaatggaatagaatattgggtatcagagtggtaaagggtattataaatatgatttttttttaaagagtcacctacatggaatgaattattggtaggtgaacaaaatattggggtgattgtaatagttgaattagtaaatggaagagaagtgtatgttgctttgtttattctacaaaaacaataattttagtagttgaaatttacatgctttgttgttttataaaaacaataattttagtatttgaaattttaaaatgtgaatgaaatgcttgaaaatatgttttgaaaaataggatagtaataaatggaaaatagctcatttcctaaaaatattttgataaattaaaataatctgtggttaaaatatatttttgtgaaagtatttaaaaatgaatcaaaatattaataatttttattttgtttgaaaataatttaggaatataaaataatattggggataatttttgagtttaaattgggttataaaatattaatttttttaggactatcttttttgaaaataatccagtgataatttttttaaataagaatgttgaaaataattttaaaaataaaattttgttggcaatgatttttctaaaagtattttaggcataaatggaaatttcttgtatgaaaataagagaatttatatatatatatatatatatatatatatatatatatatatatataaagaattagatgttaaaaatgatttttaaaagcaaaatgaattataaaaaaacattaaaaagtgaaaattttaagtagaaaattagtattttttaaaattttagatttatattttgattttgtagttttgatttattttttattttcttgaattgtttttatttgagttcaaatgtgactactttgttatgagattcattaaaaaaataattgttgattttatagttattgcatatattaaaggttttactcatttaatgaattgtacataatttcatacttccaattattgtgatattaatgttattctcatttgatttcagtttgatgacaaaaaaacatattctcaagtagaatttgatgaaattagagaaaaattgattacttttgtgttataactaatcatgaatcatattgatgtatcgtgatcattcatggtaagtcccttagttgttgtatgattgaattttccattggcattgtataacattacttattctttacgaactatttttatatcaaaatgagaaaaaggaaaaagaaaaagaaaacattagtacttagatttgtttattttttataacatcatatttttattttcaataagaactctaaaactcattaaactatgaaatgcaagtatacactcttgggaggacgatatgaagaataaaaagaaaggagaaagatgcaacaagatttaggtttttagatatgactcttatgtcatacattataggacataaacattactttatttggaattgagaattttgggtttttggatgcaactcttgtgtcattttatggttagtcggttttatgcatatgaaatgtaggtatacatgaatgttgggaggcttaacatttctaaatcatgttttaatgtgtattcactttacttttttagttttggtgggtttgatgtgtttgatgtactatcattttgtgaacatttgatatacaaatattattggatgatgtaatgtgttacaagttaattcataagcattatgaaaatataagttaaatgtaatatgattattatatttatggacaatttacacaaattggtcttatttattaataagcattacaaaaatctacaaactaatcaacaaaaaacaaccatatcttccataatcatttacaatgatgtgacaccataaattaaaggtgatacatttaacgggacactataactaaaaaatgatgcatttaatatgacactttatatatctcatacaactctatatcaaattaagcatcactaaaaatatatggtgtcgtttctgaatgtgtcaccatttatctgctttggtgtcgcttccaaatacgtcaccaattgataccctttatggtgtcagtggataaaatgatgctatgttgtagtgacaccctttgtttatagtgacttattataaatgtcaccatatatctttttccatgtagtgacccaacgtttcattactctacgttccaaactcactgttctcactagaccaatgagcttgaggggggatattaagcctaaagctataattagttaggatattattttctctctagtcttttagctccacatgtacagttggttaggatgtgtattttctgcttgtatataatgcgtgctctgttattgtagaagactactgagataaataatattagcatcttttcctctcatctctctcgtttcatcacccctttcatctaaagcaattccaaacttgggattattcggagaatattacaacaaagatatttccatcttaagcgttgtttctttcacttctgcaaatttcctaaggattattcttttactagtggaaggctgattaacttgtggatagctgaaggatttgttgaggagaaaagaggtaaaacactggaggaggtggtggatgcctacctcgatgagctgatcaatgggtgcttggttgacgcaaacaaaagggatttccaaggcatagtaagaaggtgtcaagttaagaatctttggcgagaatgccttatttccaatatctgaagatgcaagcttttgtaaagttttgaccatacaaaacgtagatcgat

SEQ ID NO: 11828 - DNA, 6157 bp, Vitis vinifera
  Intron number 1 from transcript GSVIVT01004076001 (locus G SVIVG01004076001) derived from phytozome v7.0 (chr-ID chrU n; pos 14594241 to 14600397 reverse strand)
gtgcctccaaacacctctttcctatatcttttttagtaatccagttccatatggagcatttaaaaaaaaaacaagagaggccctttcatatgatctgaatttctgcatttgcaattgcgaaaagggatttttggttagatgggagatttgagctctttaacaacaaaaattgagattagagaacttgtgccaaatacttgaatcgcccatagaaattcaattgctagagagtacatcaacagatgaatgctctcttgagtgtgcactgatgggtccgatgtttaattccttgctccggatctgatgacactgcgtaatacaaacataatgtccaggtttaatatgttcgtctgtttgttgaaatcgaatattatgagttttcactattgaactttaaaataaaatccacgacatgagaaagaaaacatgtatggatccataatgcttaacctcaatatggtttgaacatctctgacatgagaaagaaaacatccatgattttaacttttctactttcctttttatgcactctttagtgattaatataaaaaatgttttcgaatgaatgtgagttgagatcgagagggcaaaacatagatatacacgttgtctagttcttctcctaaattaaccattaattaaacactttgaaatttaatttcttatctatttaataagtagaattaaaccttgataaattaacagcattcagagcaagagaaattgcaataatgagttgtagaaaattttgacttgcaaatgagtcatgcgactatatcaaatacaattaagtgatatttagggtgtctctcaattgattttgaaaaatgtgatgttaaatgacataaagatgtaaaatttaaaatttaaaatgagagatcttttcttaattaaaaatttaaattgttgaagatctcaaatttaacaaatttggaaaaatgttcttctaaaaatattttgaaaagggatattagattctctaaatatacttccaaaaatcttgtcatataaaaactccttaactctagcacacttccaatttaaacaaatatttattttggaaactcattctcaagaaaatttagtttccataagaaaattaaaacccactttttaattattttctctaaatttgaatatattttcaaaaatcgtctcgtatatcaaatatgcataaattaaggaaaatataacaaaatatgaaaataaaaataaaacacacggccttaggatcttgctgcatatttggtgagcccaaatattgaaattttcagaaatccaaatatacaaaaaattacctccaacaaattagggggttagaaaaattacaaaaaccctaaaatatccctaaaatcctaaatcgctcgggttgtcaccacaatcccaactatgagaaccatcaaaactcttctttgatcactttcccataaaaagttcttgtctttttcccattgagaattcactatgaatgctttgtgatttatgcctctcataggttacatagattaatcaaaacaaaaacttttacaatgtaatgaaaagtcctctacttcttcaaattgaagcatgcaaccaatctctgaaaaactagatttttacattccaacaaaaattctatacccctatagaaagtacaacccatcccgagaacaagaaagcaaacatattccgaatccataacaaaagaatggagttagtgagtttgtattcaagtttttcaactggattttttgcattcaagtttttctctaaagttggtgagtttgtcatcatgactaaaaggatggagttggaagagtcaatagaaatagtgacaatgccgtgcattgctttggaagcatagcatgagatattggtgtacacctttttatcttgaatcattagagagcagagccaaacttaagtggtgtttgtttttttacttaattctaaatagaaccttaatacttaatagtattaaatattaggttgtttgtttttgtattattttatttctattaagtattaaaaagtaaaaaaaatcattgtgttattttttctatttagaaaaaaccatatattttgactttttctatttagtaaaaagtttataataagtcataaaaaagtaaaaaaacaaacaacttaaattctaaaactaaatggtttttagcaaaaagccaaaaaaacaaacaccaccttagagtttaaggctttttctagggtatggtaccacttgctcaaccatggttttctactttatcctcaacaaagctaataagatgattggatccttaggagaagtcaattcaaaatttatggcttgattagggaaaaatgtagtttgagtttgttgttaggaagctccttttgccttacttcaaattatggaactataacttttcttcaactctagagatattttccagttataaatagatataatatggagagattgtttcagttaaagaaaactagttgtcaaatgaaaatttaattaattaatttaagaaatgaggtacaatcttatataatcatctaatccttcttagaaggaacttgagttcagctttgacttggtttggaccttagcatgtcttgggcttgggcttaggcttggaccttagcgtgtcttgagttggagcttgaactttagactcatgtttaataagggcataatatttgatctcaaattgaagacacctcaaacttcatcttcgaatcttctaacttgactctcaaatcttcgaagttgatcttcaaatttgttcatttgttctttgaatcctcaaactaggtttttgaatcttgaaatttgttctttgaatcttcgagtttgatctttaaatctttgaaagattttaagaactttttgaaatcttgagtcaagtttttctcaaatcttttcaagtgtggaatttttcctttgtcgatatgattttgctaaataataattttttttatttaacttgaaaacaacttgttatccctaagaatttcgttgtctaacttgaaaataacttgttttcgtcttgtgtaatattttattgggatattagtggatgcatatcattttctacacttgatggtcaataaatggttgatatgcaattgaattgtgaagagttataaagcactaaaatccatattaatatttatccttatgtcacattttcttgtatgttcttcatatcaaatttcgggttcacatgcaaagaaagattttacatgcacactgtcaaaataataaaaacacatgtaatttttctcttttccaatctatttatcttttaagtaaagagtgaagtgtttgggagaatatataaacttttaaataatgtttattgtgtaatattccttagatttttatcttgaatcatttgagtgacgtatgagaccaataaagtttataacatcattttcgtttaacattcctaccaaacaagttaaaccactttgaaaattcgatgaagcaatatgaagtgtgatgaccggtaggttttgacaaaactaaataaagaaaaaaagtatgtagttagtattccttaaaaaaaaaaacaaaactagaatattttatttaataattatttatttgatttatattaagatatgtttattattttaaacattaggtaatggtgtagagtagaagattaatatattgtacttgaaaatgtagatcttatgagatggtcttttgtttttttattattttttttctttagagctttttattcattttattgattgtatcattagtttgtagctaatattgaattgattaagttaatgaatattataaaaatatttttatgatttatattcaaacactaaataattcatcataaaaatataaataataaaattattattttattaaacacttggttgttgttgttgttcttattataaaattttttgtgggatctatagttattattattattattattattattattattattattattatagtaatagttataattataaaatttgttatgggatctagtagtagcgaagggattgggtcaatatatatgtgatattatgtatatatataagttttaagatgataactatacttctaccataatcactcacaactctttcttcttatatcaatcttttgatataatgaattttcttcttttttatttgtgattttttttgtttaaaattttatacataaatttatgtgtttttattctacttgtgttttcttttatttcttattctcattattttataacaataataataattattattattttaagatgcactttcaaactaatagtacaaaacaaatctaatcatcgaagaatcactcccaaactagtcctatatgtcaaataatttgactatatctttttggggattactcgatgcatgaatcaaaagaaaaagaccttagagctagctttcatgtctggaaagactaaacaatatataaaacctaatgaaattaattagcagttttattagatgattttcttgtctatatattcaactacaccgacgccaacttgtagatgtttttatacccatacataaaagtgaaacatgaaaagtcaaaagtgaagcacttacatataaagcaatttatcctatcattgacgagttgcgcatgccaatttggacatatgtataaatgtatgcatgcctaacaccttgatgggaacgacaattttgtctctttactatggcagtactatgaactgcatgttaaaactatttgattcagaattccacggccctaagtatcgactttacagaagagaaagtcggtgggatgaaaccaccgtttacgtttggtgtatctgtcattttctgtgccgcagtcatatctaccattcaactgtactttttaaatccaagttccagattttcagctgacccaccaaaatataaacatagtatggacacgtagtttcccaattctgtgcagtacttccaaggaagacagccaaattaataataggaaatattggtcaagactcaaggggtcgtccatatggaatatttttatctaaatgttggattactacttgtcttaagttaatggggatgattagatgtgcctccgtcgtgagtgaaggatctttatgcagcagatattcatatatatatccaacaccaggtgagtgacaagttagttgcatcaaatataatctttgttaatgaatagattcctatgttggagagagaaactctgatgacccaatcttagaaggtagcccttggtaattagcatcttttccgtttgtttagatgactcccacgcgggagaaatgggatggttgctttggtgatctaataatagggtaatggtttttaaactaccatcttcttaattcttttctgtttaaagtaaagagatcttcttctctatcatagaccaggatagctctagaataatggttgcaatgagtggtttaaaataattgcgatcatgttatcagatacacattttctttgtggctttctacatcttcttcctttttgtcgggacacacaaattttcaaacaaaatggagtcaagaaagtggactaactacagaactaggtacttttccaccacatggtttggcttgcacggcatcacccgggagtagctagaactatatgctctcaatgtgttcggctggataatgaaaccatatgtatttatttttcccgcaatggtagtggtgcctgcaagcaatatatggatgcagagttgttcgatcctgtttaataataaggatgatggtacattcaatccactcttttggataggcattcaatcaagtcatgtgtgttaaacttgaaccctttctcatcataatcggaggtaggtccaatcatatgaaagtactgttatatgaaggattgaaagttttgtttaaatagatacaaaatataaatattttttattttattataaatatctatgtcatcccattcccaataccatctgagaaaggctgtttgcagcactaaatgcttccattccagagtgggtaaatcctccgtagcacgcctcctagtcaagcggactttgtactgaaagtttcattaatggcttactgaagtacggtggtgctgcatttccccagcgtacagattccaatcagccgcccaaaattattaggctgaaattctgctcaaggtcccctccccaccatggaga

SEQ ID NO: 11829 - DNA, 15835 bp, Vitis vinifera
  Intron number 6 from transcript GSVIVT01026351001 (locus G SVIVG01026351001) derived from phytozome v7.0 (chr-ID chr4 ; pos 14649840 to 14665674)
cgtatgacttttttctatctcaactaattcaaagaacttttaattatttacttactatcattgccagaagattatttcagtttcagttggtatttgccttcatgaatgcttatttataatcccaaggaactgttagtctattttattacttaatatttaacatataaggctatgtaatgctgaatcttgttgccctctttctcataatttctaggctgtggatatgatattttcagactgggtaaaatgcatgcagaactataaagtataatcaagttttgactaggctgtcaatctccagcgatctatttactaattatggagtaaaatagcattttgactttatggcaggattgaccttgagcttgcccagttcaagctcaagtcttggaaagagatcccctattgtctcataatcatgcttgtgtgaggagaggatggtgggaatgtcccacttcagtctgtcacccaagagaggttcatttacatccttgagaattggggattgaaaaagcaaaacttgtgaagttgggcatatagttgcgcttaaagtgtgcctaggtccaaggctcaaccactccctagttataatcaaggataaaaatataggttttgaaagatatatcgacaacttgattttatagatatatcggtggatattttgacgcaaaatatcgatgtgatgaaattaatcaaaattcatgaaatttttggaaaaaactttaagaaataatgaataagaaataatttacatattcaattttttcttttagaaaaaagcaatatatgtataatatattttgtgacattctataataatatacaaaatttaaagactttaaatttaaatttataatatatttagttcggaaaaagttttttatttaaaaatattgatgattttatttataaatttatatttttttgtatttaattattatataaaaggtatagtaaaataattaaaattaatttattcataataattttattttaattaatttatataatatatatcaatttgtatgtacaagtatggcacaaataaagcttgggtccaatggttgtagccaaccaagctcacacttgagctcctaggtttgatccttggtttggtggttgtgcaatttaattttagtttcttggcttaagaaacaatcccacattggaactagaaaggaaaaatttacttgaatttaataaggaaccaattgtaatgggctacaactcttctttggctgagtgggctttctctaattgggttggatgtgctttccctagcatatggattttttcaaagaaaaggttggtgctgaggtggcatcaattaaattggtgataataccaataaatcgatgcaatatcggtatgtcgccaaaaaattagggaaaaatgtagaaaaaattggaaattttggtgaaaagagaaatcattgtagattttgtgttgggcccgcccgatatctgatattttgatgaaaaatcggtgacagatactgattttttcatccttggttatagtgccttactcgctaaggcatgcaccttgttggtgcatgtcatatctgtgttatttttcttttttaagcacttccattcttaaaatttccacttgtatactgaaatttgtataatttcattactttttgttgcttggattggattttggaccatattctataaaattaatatgcatcctaagttccatttcactttgcgtaggcatgtgccttgcaccttttaaaattgtgggctaggcaattggaagtggtagcttttggttagtaggttaaactgaagtattactaccattatcacacaaagagcatgacaagatccttttttttttcttccagctaatgagagtgtgatacaattttaagttctctctcttttaagcgtagattagtatcttaggacactagtgattcactagagcctccaataccatgggtaatgttggctatgctcattaggtacatgtcaactgcaggtattgcatcctttacctcatctcattccttttgattgattgattcaggagcaacaaatgaaattgttgatgtccatgctattctattcttttagatcttctatattggtatagtggaagttatgcattggaccttaaattatttttacctatgatccagtgagactatctgacaccactttatatttagggaagaatatttttttttttttttgggttttttttattttcaagcaatatcgttataaggttttctagcccaaagtgtaacaatttcttgctttaagagttttcatgtatgaatgacattttctcttatattcatttgtgcttgaccaagattagattagctaaatcatttgcaacaagagctcaaatcaaaattaagagaattagtaagaacaaggaaaaagttggaacaaactcacattgctaaataaaaaataaataaataaataaaaattgaagaaatttgagggagaaaaaaaaaactattattttctcttattttcaaattgattattgtattaatatttatacatgaatgactgatgtcatctgtcttgaaaaagaaatctaatccttgattttaggagagaaagcctcttataaaatcaggaaataaaattagaataggaaatacaactatcacagttatggcacaaccctaacacaactgtgacacgactataacataacggtgcacacaactataaattctggatttcctccagatttccggagccctctagttgagttgtaaatgttgatcattcctagcttggatctcaagtctttaaagttggttctagaaagtgccttgataaggatgcttgttgtctggagagctattagagtgtaaactaatgaaattgtctcttcttctatctttttcttgataaaatgatgatttatttccacatgctttgtctaatcatgatgaattgggatcttagggatacttatggcagcttgattgtcacagaacatcttcatggaatcttttactagaatttccagcttgtttaggagtctctttaaccacattctttcacagacaccatgtgtcatagctttaaattctgcttatgcgctactctgagttataacaaattttttcttgctttatgaagtaactagattcccctaatatataggaatatcctaaggttgatcttcagtcaattatggagccaatgtagtctgcatttgaaaagatttcaatgtttctcttttgtgttcttttgaaatagagtccctttcctatagtcattttgagatatcttaaaatacgatacatagttttcatatgcttttcaattggattgctcatgaattggctaaccacgatgattaaaaaagcaatgtttggttttatgtagagagataaatgagtttccccacaagtctatgatatctccctttatccattggagcacttccatcgacaattcctagtttagtagtgttgtccaaaagtgtgtctgcaggtttacaaccaaacattctagtcttttttagtaagtttagaacatacgtacattggaagaccacaatacccattttttatctagcaatttctatcccaataaaatatttgagattccccaagcctataatttcgaactcatgagcaagaaaactcttgagtttgcctatttcttcctcatgatcttcgggcaggattatgtcatccacataaacgatgaaaatgacaattcttcccttagttgtgtgttttacaaatagaatgtggttagactaacattgggagtaactaaacctctttatgaccttggtaaaacgatcaaattaagctcgaagagataacttgagaccatatagagatttttttagtttgtagactttgttaatgtttgtctcaatcacaagacttaaaggaatttccatgtatacttcttctaagtcaccattgaggaagacatttttaatgtctgattgatgaagaggctaatcttggctaacagctaacgacaatagaacatgaattgtgtttaatttggcaactgagttccaaaaggtttcttggtagtcaattccataggattgtgtaaatcccttaacaactaattgagctttgtacctgtcaacaataccattttctttgtacttgactatgaagattcacttactctcgaccgaattctttctttttggaagtaatgcaagctcctatgtcccattcttttcaagagttcggatctcttcctcaatagctatcttccattcaagtatttgtaaggcttcctggatattgttgggagtctgaatcttcgcaagttcggtaagaaaagctcgataacttggtgacaaactcttaggagataaaattataaatcggatgatttgtgtaagatcttactcctttccttttggcaattgacaaattgagttcatcatcttatgactcattaggattagaatcaatgttacctaagtgtgtctattttgggactgaactatgttcggtttcatgtactagcccagaatgtgttcgttgctttatatcttctttagacttcttctttttccttgagtagataataaactcattgttattgatagtctgaaattggtttgggtgaagagaagtactcggctcaatgtttatggattcaatagtttgtaacatgagatgaggaacaagaaagatagaattagagttgtgaactataacagactcaagtgtttgaggttcagttatggcttctgtttccgaaactagcattcctaaattctattctccccctgaatatcggttttggagtaatagggttgtttttcaaagaatgttacatccatgaaggtgtagaacttttttgtgatggagggtaacacttatagcccttttggtttggagagtatcccatgaaaatacatagtggccttaggctcaagcttacttcgatgttgttggggaatgtgaataaaggttgagcaacgacacacttttggtggaatggaggagatgagtcaactcctagagtatgattcaagaaagactttgcgcggtctttgaaaacttaagacacaggaagacattctattgataagataggttgtagtaaatacaacttctccctaaaaaattctttcgaacatgggaggagaacataagggcccatgcaacttctaacaagtgtctattatttctcttagctatcccattttattgaaaagtatcaatgtaagaattttgatgaactataccttttgttaatatcaattcccttaggatagaattgaaataatctcttacattttcaattttcaacacttgtattttggcatggaattaggtttggatcatgctataaaaatttttgaaaatttgacccacttctgttttgtctttcatcaagaatatccaagaaattctaatatgatcatctgcaaaggacacaaatcatctagtccttatattctttatcttaaatgaccaccgaacatcactatgcatcttggaaaaagaatgagatgatttgtatggttgaattagataggacttacaaacgtgctaggataattgacaaatttcacactgaaaaacattcaaacttttagtgaataatgatggaaagagttttttgagatacaagaaaccaggatgtcctagatggttgaggttgaggttgaggttttagtcaagagtttttttgacataacattactatctttattagaactaaaaacaaaaagagatcgtttttcatcaattgatggttgaggttgtctttcaatataatcagtcacttcgaagatatggagtcccaaacacacttcagcattgccaattgtcctccctaaattcaagtcctaaaaaacaccatggtatgagaaaaatttagtaacacaattcttttcctgagtgagcttactaatggataacatattgcaatccaagtttggaaccaaaagaacagagttacgagttaggtccttagagatgacaatagaacctataccaaccacctttgagagagaaccatcaactatatgaactatataatttctagaacaaggtgtataattttgaaaattgtggcatctccagtcgtaattagaagctcctgaatcaacaatccaaaagctcaaattttccttttttaccttcaaggtagcaagaaaattacctttttgaattaaggatccagacttgatgatagaatgggaggaattttcccctagttgggattagttgaacattttttgcaatggttccaattgctctttgctgaacggactgtaattaggtgttgttaggttatcctcaatggtggcatggtgtcctcaactttctctatcattttgaggatgtgacgacttctaatccactggtttcccatagaatttccagcacatgtctttggtgtgacctggtttttggtagtgatcacaccaaggtctcctttttcttggtcagttgtcattggaaggataaggaggaccccgtgcctctacagctgaacccttagttaagggttggttggtttgtggtcccaacatgactttctttctactttcttcttggcgtatttctaagataatatctcagatgtttggtaaaggtttacttcccaatatcttgcctcaaacttcatctagatttttttttttttttttttgataggaaaccacactagaatatattgatagaaaagaagtacaaaaggaggatgagaaatcctccctccaaaagaaaactagacaacaagaaaaaataacaaagcactagaccgtcccaatagaactatttgaacaacacactgataaccaatcaagttgtagtactttaaggggggtgcccttaaaacccgctgaacaaaacgcccaaagggacgcaaggaaatgaatggaatcccaaagattccctgcattcctagccttgtcctcaaatatcctagcgtttctttcacgccacacaacccagattaacgctatacttgcgttttgccatagaattacccctctcttggacttgccaaaacctttgtaattgatgaacatcatgtctgaaatgcttttcggaggaacccaatccatcttggctagctgaaaaagtctgtgccacaaccccaacgtaactgagcaatgaaggaagagatgatctgctgattctccttgttccatacacaacttacatatgttagagctaatagctttgtggggtctcctcaattgtagcaagtcattggtattcaccttcttatgtgccacaagccagataaaggccttcactttgaaagggacttgagatttccaaacaaacttagtggggaaaaatggagatgaatcaggcatttgggacagggctgtaaagaaagatttgactgtgaacaaacctgaagaacataaggaccatgatctcgcgtctgaagcggaagtggataagttcatacaatctagagagtgcatgaggcgctctagatcttctatctcagaatcggttagattccgacggaaattaaagttccatgagaaagggcgagacgaaccaaggattgaagatattggaatatttttatccattactactcgaaatagtcttggatattggtcttttaaaatttggtccccccaccacaaatcttcccaaaagcgaattctttccccatctcctatgataaaccgagtatacttggaaaagtcctgaaagccttgtgctatggccttccaaggacagcggtgtgaccatctgacaatagtattggcatcccaaccatttgagtgagtcccatatatgctaagaatgatttgatgccaaagagatgtactctccctagggaacctccacaaccatttcccaagaagagcacgattccttaaaggaattttcccaatccccaaacctcctatactcctcggcttgcatactgcttcccacctaacaaggtgatctcttttaccttccccaacccctgaccatagaaagtccctttgtaacctctctatttttgcagccactgaagctggaatcttaaacaaagaaaggaagtagcttgggatatgggaaaggcaagagtgtaggagagttatcctaccaccaaaagataagtaagccttttgccatccgtctaatctcctagagattctctctatcactggatcccaaaatccacaagcagttgggttccctcccaaaggaagacccagataaagaataggccaatctgaagccttgcaatcaagcagcgacgctaacctagaaagatgattctgatcaaggttgatgccaaaaagattactcttgtcaagattgaccttaagcccagagatttgaccaaacactaacaataaactcttaagagtttgcacttcatcctctctagggctagcaaataggatagtgtcatctgcgaattgcagatgggacaccctgcatctatttctacctaccctgaagccctctagcaaatttctttcctcagctttcaacagcattctactccacacatctgcaacaatagtgaataggaaaggggatagcgggtcaccttgtcttaaacctctagctgccttgacccatcctttagcatttccgttcactagaatagcataagaaaccgatgacagacaacctctcatccaactcctccatctaggactaaaacccttcatctccaacacgtgatctaagaaatcccaattcacatggtcataagccttttcaaagtctatcttgaacacaacaccctcctcccctgatcgctttttctcatccacaatctcattggctataagaactgcatccagaatttgtctcccttgtacgaaggcgccttgagtggagtggatggtctcttgtaaaactcctcttagacgccctgacaaaacttttgctattatcttatatagacaagtgatcagactgataggtctaaaatccgaaatcttctttgactgactctttttaggcaaaaggactatgaaggaagcattagtgttttgattaataatcccactgttgtgaaactctgcaaacaccctcactaagtcttccttgatcacatcccaacagtcctgaaatactgctatggtgaaaccatcaggccccggcgccttatccctatctaactgaaagatggcattaaagatctctgcttcggcaaaaggggaatccaacctagatgcgctctcttctgaaataggggaccaatcaataccttctactctccatgactccctaggaggacacgagtagagctttttgaaatatagtaatatctcctctgtgatgctctcggaactgtctaacaccaatcctctttcattctccaagattttgatgaaattcttgttacgtctcccattagccactttatgaaacaactttgagttacaatccccttccttaacccattttatcttagctttttgtttccaataaatttcttcccttaaaattagctcctctaactccccttttcttatagctcttagagctacaagatcagaagagagagccccttcttgttcaatggcatctatgttagctatttcatccgaaatggattttttcctttccttaagcaatccaaaagtatttttattccaatctttcaattttgccttaacgaattgtaacttcctcatgaacttgtggccttcccatccatttccttcaaattctctccaccaactactaaagctctctttgaaattatgatgttgcaaccacatattctcgaacctaaaaggtgttggtccccacttgaacggattagtatccaagacaatcggccaatgatctgatgtccatctaggaagaacttcttgaaggctttgagggaaggaaagctcccactcatttgaatagagaaaccgatccaatctcttacacaccggtgactcctgcatgtttgaccaagtaaaagaggcattccttaatggggaatcatgtaattcgctttctcttataaaaccgtcaaaatccctcatgctggaagtgactctagatccccccagtttttctgatcttctcctaatcacattgaagtctcctccgacgcaccatgagggataagtaagaccaaaaaggtctgacaactccacccaaaactcctttctaattgatggattattaggaccatagactgcagacatccacaatggtccgcttccatccaacaagaacttaactgagacggaaaaggatccaattaccacctcctcgcctctcattttttttgagtcccaaataatcaaaatccctcctgaagccccgcacgccggaagaatagcccactccttattcctgaccgaccagacgctacctacaaaccttctgtcgcacacctctctttttgtttcttgaaacatcactacatccggattctgaagccgcagaaaatccttaaccaccctcctctttgtcctagaacccaacccccttatattccaacttatgatcttcataaaaacacctcactgcccctaaaaccagaccatcaccaccaagtctcaattgcctatggcaattctgttctttcgtcttgagtacaccttaatatccaaggaactcaagacttcacagactttagccatcttgctaggggaaagaccttctatatggaatccactcgtctgggaaaaatctaagactcccttgcttactgctcccataatagggatcccatgagacgagctggaattggtcatatcatagttaaggctctctgacatcagattcattccagccacctgggacgccactccatcatgattaggattgccagcatacccaagacgatgatccccatcatctcttttttttaagcaattttcagttaacactcggtttttcataggaaactgggaatgaaaggctgaaatggaagaatcgggtacaaaaagactctggtgtggaggagccactccagaaaagggataccgtaaaggcagagaaggctgaggagaaagatgaacagaaacctggaaagttccccctttcgtcaatccgcagtcccccccaacgataagccctttttctctgttctcatgataagaagggtgatccgcgactgaagaaccactgtgagaataacccgcaaagcccttaccgccttctccgtcttctcctataacgttattgcgcattctctccttctcttttgacataaaaggaaccctaggagtattcctttgttcctcgatttcctccgacggcttcattccttcctcgggtcccccttgaagcaaaatagaacccgcttcggcgacttcttccactgaaagagaatcgctacctgtcggcgatctctcagccgtaactggcttttctcggcttcgatctccttgtcggctttcagaccttgacggaagtaggacattccacagcttctttgaaccccgcatcaccgtgggttccctccgttgaagttcagagtcatcgtaacctaccttcgccttcccctttgcagcgcgagaagccctgtgtgtcgggcccttcctcgatctgttttgctgaccccccgactcttggcccatctgctggatcgggcctctcctagaggcttccctcttccagcccgcatcactttctgacttaggcctgggcttactaaaatattgggcccttgacaaatgtttggagacccaaatctcatccatggggtttgactgggctttgaccttgccctcctgctttggcccaacacctcttgcctccagacttttaaattttgaattaaaagacataggaggccagctgtttccctcttctgtccacttcataccacgtgtcctcccgggagcatttccagccttttgaccctctctccactccatcagactgtcagctgcctcagccaaggactcctttccagccgttgatctaacttcaacatccctccttctgccagctatcctcaagtgagcctcagccaaatgccgagttaactcacccatttttctatcctgcatgccaacttctttccctaccactgtaattgagactgtgaagtcccaactcccgtctaccacctcaatcaaagcgggaagcaccgatctttctttcataactactctcaccctagctttgcttagatcaaaaattttcagtgtacgccaatctatctctgtcaccgtcccccattgctccatgattttcttcaagtgaacctcagaccataaatggaatggtaaaccccttaactcaatccaaccttccttgaatttcccctctatttcagagttttcctttggcgaccattttctcaacaagactgtatttcctcctttcatcttgatgaaccttgactcgtgtagtgttacagcctcctctaaggtttctacaaaaaacaatgcttttcctctggcgaatggaaccactgtcaccacgcctttgtgccctaaccttctcgccaaagcccgaccaacctcgtcccatttaacagaatcaacttgacattcacacaccacggccctcgcccacctccctacagatacaaggccgcctctcctcggtctttcttcactgactacattcgcaaaggaccgttgcaagggacccgcgaatttgtgcagattccttcattccctgctctgcctacctttttcgtcaaaacccgaggaggggaccaccagcattgaatacaacgcttccttcaaaagttcccatcccctgccattgtccccctcaggtataaccagaaaggctgacttccttctggatgcaaattctgataatcttatataccttccatgctcgttgaaaccaacctccaatagatgaacactattctttcctctaaattttttgttgaaacccataaaaaccttcaactcaatggcctttgtcagttgttctatcaaccagctaacttcttccttctcaaaaccaaggacgaaggcaaagcctttactgtgctctgttattgagcaccatcttcctccaattcctccctcgaagctaacccagaatgtcttcctctccactgagaccttcaaggtcctacccatttctctcgtctttgtttgttttttttccttctgcatatcttttgctgtcctaacctattttcaacttcatctagatttttgtaaagccctaataaactttttaggtctgttttttctcaacaatcttcttgtatttgattgcatccattggacagtcccatttgatggtctcgaacatgtccaactgtcgccaatagcgagctaggagattgaaatattgagtggcaaacaaatcaccttggcgtaaatcatggaggatcccttctatttcaaatgcctctgttgtgtcttctatatcggaataaatgtactttacttcctagatttcttgtgtcatttcataaagtataaaatttccccctgtgtcattgtttatcaagttaattaaccaaaatataaccatgttattctcaaccttccatcctttgaatttcgggtcttctttcataggttgaggcactgcaccggtgaggtagtcatccttccctctactgcatatgaacatcatgattgcgtgagaccattgaaaatagttttgcccattcagtttgtgtccagtaatgataagagtaacactatctaatccttcattattgctcaatgagtggaggtgactactaaggttgaggagtccttcttggtggccattttgtatttggtcatggatggattgaatggtttagaattagctttgataccacgaagaaatttaagggaaaaaaatacttctttatttatatatgaatggttgaggccatctgtcttagaaaagaaatctaatccttgattttaggagagagtctcataaaatcaggaaataaaattagaataagaaatacaactgtaccacaactgtaacacagttgtagctataacacaactatgtcacaattgtagctgtaacacagctacaactgcaacatagctgtgcacacaactgtacattccggatttcctccagatttccacaaaactaaagaacaataatccttagggcataactagaatcagtattaagctataataactaattataattgtcctaaccctaagaataataggagaacaattccaagtgtaattgacttagttacctaaagataaaaataggaaatctaaaaaaataaggaatctgaaaagatgaaaaaaaacctaaaagatagggaaaatcctctaaaagtaggaaattgtgtaatggtaggaagctaatccaaaatggacatgtattcctaacattgcaaaaattcttcatacactaggctgcatcataagtgggggtatctttgagtccttgtaggatgttacttaccatcttatttctctatagggagctgtttccagagagtttaggggcattcatttggcatgattttgctatacttgagagaggcttgttgagacagtaggattcagtttgggtggtcaacagtttgagttccctgcagaaaactttaattgatttttactggggactgggctgacgggaattgggttgtttgtgagatcacaatagtaatgtgattattgctttctaaaatagattaaataggttaggtttatcttacctatcaatttgatggcataaggtgagccagatgccaacaaaaatcttaatgcattagcaatcaccattcatcgatgacaagatgaaacaaacattttgtcatggaaagttctattgactggtaaaaaaaaaaaaaaaagcttccaaattataatgattgggttcatctcacgtgaagtggttaactgatgaaaattaaaaaattaaaaaaaaaaaaaaaaaaaaagtaactgcagcatggatttatgcttgctattctttgggtgatctagattgatgaaatgctaggacctttgaagtccaatggaagactacatatatctcgtggaataatatttgttagcttatttttattaggagtcgactaggcatcagaagagtgtgcagtgactttaggactaaatttcaatggcaaatgggttgtgggatgttcagtgatcaagaggggcagggaggtaagcttttgcacagccaactgaatttggattgacgtattattagaaagtttgtttgaagggtgttcataaggtgttagtaatcttcagatggaggggtattcagctgttattctcttatggatgtctcaaggaaaaagagggccggaaattagattcttggatctataggattattgaccttacaaaaggactgggatgcttcttgtttagaatgcctgatcagcaactggatggcatatagcttggccaaatgatcagcatttttgtcagaggcgtttgttagggatacttctgatcgctttttctgtgtttggtttgaaggatagcttgtacttcttcattcttattttaatttatatcaatacagtttctcttgtttcctaagagctttataaagacccaaggtagtattccctatctataacaatgtaggaaaggctgagtataaatattgcaagtatgcattacatgtcattgtgtatttttaactgaacaagaaagtttattagttaaagtgatccactacagaaaggaaaatttgtgtttcacacaaaattagttagcatttagtagacaaacaatttatttctttagtattgatttctgcatcagattagctttttccttgttggcaccacattgtttttcattttgtgaataaagtacatgttataccttcaaatggaactagtacctatccaatttctgataatactgttaattattttaaaccatcgttcttcttgttgaatttgatgtcttttatttgacctaaaacatatgtaagattccacctctatcttcaggctgctggtggagtgcttgaccaagtattgtgtag

SEQ ID NO: 11830 - DNA, 5589 bp, Vitis vinifera
  Intron number 3 from transcript GSVIVT01004951001 (locus G SVIVG01004951001) derived from phytozome v7.0 (chr-ID chrU n; pos 16974123 to 16979711 reverse strand)
ctactggtcaagttattgggagagcaacaaggttattttaagcttttacttcttttctttgatttgcaaacaaaaagataatattcacatgacaaaaaatataaaagaggaaaatttagcttttcataatttctgtgcgtccatgcattagggtaaatggttcagctacatgcattagtgtagaaatttaactaaatttcccccgaagtagcatttgaaactcttcttccccaacttaagattcccaagagtgcaattgtgacctgaacccaaaggccaggacaccaccgtcatttcacatgcacatgtgcagctcgaaagaattgacataagagtgacccaacaagctggattgattagcaacatgctaatcacaaaacctatctaaagtagtaattaagctaaccaaaagtcttagtagaaatttgtctttccacatgaaaatccataaatcaaattataacaattctcctaaaagtagaagtaaaataaaccactaatatccaatcaaactagtctcatagctaaagaaataaaggaacttctcaagcccttcctacccatgttacaccttcctagaaagaagtgtacttgaaaacatttaataacaaagagtgagctcgaaagcccaataaaggatagagatcaagtacatttatttttcaaaaatgaaataaggaatataacatgagtccaatcatatgaaataaaattgtattacatgtgctattctcaaaaaagtctcaaatcaaacttttcgataaacttacatatattcaataatttttggttgttaatagaagtgtccatcatagtgagacttacagaagtagctaaccttagatgttccttacatgttggtgggtggaaccaaaactaatcttatgatatactaactaccctactaatcatctatcaaaaaaaaaaaaaaaaaaactaccctactaattgagcttttagatcatcattgcctacactatggttaataaaggtcaaaatcttttacttggctgactatggatagataaccataatggacatgcaaggcaaaatatagtcaaataaaaaataattcccaatttcagtattttagacttatctaaacatttttcaaaatttacaaaaaaaatatacttagatcatttataacaaaaaaaaaaaaaacatattttcacataattcccttacttgagttcaataatctcaaaggaagagagttgtaggcatttcctatgaatcacctaagagatttaaaggaatctttcaaactaaagttctaacaattattatgctttaagtatagatttatttattatttaacttcatatcaaaattaggtgaattaattcatctagggaatattcaattttcattacttaggttgacttaactttgtttttctagagaattattcaaacttttttcctaaggaattttagcttaatgtttttatggcatccaaccatccaaaatttatttaacctttttattaagatcaatttttctataaaataaaggtgcaatcttcaaaaaaaagaaaacctattgtgcacggatgcccatggtaaacaacactttcaaaaaaatacctactacttccaaagaacatcttattattttccaacgccaaaacacactacaaaaattgtcataagcacattgtattgttctcaatgtttctccatgattatcctgtagtctccatatataatgccctatggattcacccataacaacaaaacatccatgggtgtgagatttgatctcaccactacaaccattttttgtattctttgaaaatgaaatgttacaaccattttttgtactctttgaaaataaaatgcacatacccgcatgatatttacaccatatccaaactttcatcataggattaatttcttcttcctcaaatcttcataaaaataactctacatttaagatttatgaattctagatttgtttaaactttgatttagttacttacataattttctattaattatttctttttctttttaaaaccaaaagaacaattgtattataagaaggaaaatattttgaaataaaaactcttaccttgaatctgaaatcctaacttctctatgttctttgctctttacaacatctgaaaaagttttaataactattcaaaacgtgttttagggtttttatattattattattttgttattattattttttttctgacctacaacccaaaattaaagcccatagggatttaaaccaacgaggctagaatttaagggtccgaaattattttttgggctaaattgggtgttataacaatcccttaaggtaggatacagtttcttggtgaccttgtaggatattctgtagttaatctctaggttttttacttttgtgttttaagaagttagcctcttctcacttgtcatgtgtttgtcttttaaagtgcttcataaaataaatctgaattctaatgtcttttgataccaaaaggtgtaatgtaaccattgttaagcatattttatgcttatccactagtccatactcattccttttttggcagaagcaaattgagtaagataatggaaaccttacgatatgtggttaaaggtgagcaacagtgcaatatcaaagtttttaatggaatattgtgagatatatgcatatgctttaactggtacagataccattttatagtatcttaagcattgccttgtagcatggaatttatactagtgagtcatctaaataatcaaatacaacaaattaattgccctttagaactataccttgatggtactgacactatgttccaatggctattaataattatctcaaaaagaataactgtgttccattgttaaactagaagtcataaattatctctggtggggagtttattttctcagcaagtaagcactgcaattctggttctgtttctgggagataggaagtcagcgattttctttttgaccaggagatgttctgtgcaagcttctgaaattttgtgggtagcaataagttctatagaaactgtcatgcatagtgttgcagaagcaatgcagctgaaacaaaattctacagttgcctaataaagagttattatcctctcttacggttgatacttgtgacaaacttgacaagtccttcaaatggaggtggacacgcttaacaaatgggagtatctcaatctgtccaagccttgtccatgatcagttggggaatcattcagccctatctcagaaacaaactagaaattaaaaaaactgtggataggctataataacttctttatttttattcttttcttacattgaagatgctgaaatagcttatgtgggtcatgaatcaggaaaaatgaataattaaagcctgtcatcttttctcccatcttcaacaatgactcataattcgcttacccttctaggttctaacttaaagcactggatgggataattcaaaccatattttttaccagactctacttgaaaaggatttgtgactttggtgaaatagacatggaccagatttaattggagctttttcaggagcttgggtcaaaataagtatgctttggaaaaacagacctgggttttactaagatgcctttgactttggttttttgtgcctggcaggctggtttgaaagtgagcggtttgaaaatgacccacatcacatagctgggtattttcttagctgaattgtgttctggcttgcattgtttatctcaaccagaatttaagtggactgtaaaaataccacatgtttcccacgagctttcgcgatttccttgggtaatttacacagaaaggggaaaatgttttgcatcagttgtttccttgatctagcagtaaaagcaaatgcttttagcgtgtgatgctcattagttatattttgaaaaccttttgggtcttgcttctctctattaatcttgtcctagtgttatgaaaaggaagttttgtaggcaagaggagtaaaatctggatgacttctctattatgtatttttttgtgtttttggaaggagagacatcaaataatttttgaaggagcagagctctttgttttaaattcaaatatgtttttctaaagtcttggttcatgtggtgtattggtgctcttagggaaatgagaaagtttcttcttgactttttagacaaggtgggtttagtaggagagtctggtgagtgttgattgtttggatttttcactctctttttgctggcttggttgggtggctctttgtatactccatgtgtactatggattcccccttttggcactttattcaaactctattccttaggaaaaacgaggagtaatagtgtctccagggtttttgtttagtaggattaggacatgccggagaaaagacatggaatgcatttttagtaaaattagccatagaaatgagaatacaatgaaaatcattggctagaagtgatggtggtgaatgtcagaaccaagaagtgaaggatttttcttcctctacttctctaaatattgtttttttcctttatacttggtttacaagtctacaagactacacgatagtttttgggcccttttacttgttttaatttcttttagaataaaaactgttttttttttcctttacaatttaaaccgcatacttttagtcatcactaatgaacctttcataccaaaactctacttgacttattttttgacctttcggcagcattaaatcccattacgatgttggttttgaacaattctccattaactagacacccaaaagcgaccattctgttatcttggatcaatcatggggatgttacaggtgagtgctaatggtcgctattgcatcccaagctcaaaaattgacagctaaaatagctattctggacaactatggctgttatgctgccagtgagctcatgaatcatctaaaaggttgttggagcactaataagtgtaccagaatgaaggagtgatttcactcaagttgaaggcaccgaacagacaagaggcagaactataaagggatggattgtgttattgagaaaaaccatgatggctaagaaactaatttaggatatggctctaggtagagagctgagtggtgacaaggaatgcattaaactgccccaactagtgaggattattgagcttctccaagttgaattggccgttgattagttctcaaacaaagatggtagtggtaacaagaatttccatgtgaagttgctccagattttttctcttaaggtgcacatagtaaagttggatattatggatttaatgcattgtcctgagtttgtctctgtgaatgaagccttaatgaatattatttttattattattattttctgtttgtttatcctggtataataatttaaacccttgatgcttatctcaatcatcagtgtattttggtctagcttgctgcaagaatatgcttgcgttctcagtcacatttattgagatccttagtgggaaatatggggtgttggtttcagttctgctctgtattctttttatatttacttctcaaaatctaacttcatttgtgatgtcaaatttctgaattgagttcttgcaattaaccttctacactatcaatttcagcaagtgggtg

SEQ ID NO: 11831 - DNA, 5678 bp, Vitis vinifera
  Intron number 2 from transcript GSVIVT01026410001 (locus G SVIVG01026410001) derived from phytozome v7.0 (chr-ID chr4 ; pos 23836555 to 23842232)
caagtgaaaggtgtccaggtaactgtttattttatttgacattatgtctcctatgctaactgtggcatgatttctgcagtgcttgttagtgtatgatatcttctgatagctattattctaaatgcataaggattgaattctctttgatgatgtatttcccacatatttgtatacttatgtattctgatattaactgatcatgcctgatgatcctgatttttcagtatgcctgtcaacagaaaaaaaaaaaaaaaaagattttgatttattaattattcaaatattttttttataggcaaataaaaattaatttcattatatgagatagtgcctgccttagcaaactctccacccattgcccagcctgaactaggccatctaaaattatactctcctcccattgatccactattaagtgaattaagcctccttttaccatatatgctagtgagacaaacaaaataaataaaggatcattttttagtttctatatgattatggggagtagtgatatgattatggtgcttgattatgtagtctttgctgtcctgaagcaaggcaatccactggcctgaacatgcaagcccagagttttagaaaatcccaaagcacagtgtcttcaatgtgtacatggagatgatggctggccttatataatcaaggtttaaaggtttgtccaatggttagggaaaccttggttgccatcggggttaagagagatgggttttttttttttgtttgccgtgtagtggtgcattactgtgcatatgctgttgcttttgtcaatttttaatgatgtaatatatttgcaactcccttcatcacctagtatgatgtgattgatttagttcttttttcttttttggagaattataggcagtcattactgaggtacactgtcaaaatgttatctgacattatagtaatgatgtggcactttaatgaggtgtcaggatggcatgaagatgaccagttttaggggagagcaaggtaactgaggggagcatatcaagaattgctatagcaagagggtcatgaggaactctttggaccatctttgaagtctctggatgcctcattttaaaggatctcagggagttctttatgttgcctttccaagtattctgcatctttgaactgaaagttcacaaggacctgaaagttcacaaaagtaggaaaacatgagccctagaaccttgaacttccttattggaaacaaggctccatttggcaactccaaatcagcatagaaagatttgacaaaaaatttcccattcttaggaccctcgccatagcttttatctctctctaagattaagcctcctgaatatacatacagcattattcaattcctaatcttagaaatgtctaaagagtcaaggattccaatgtctttcccttccctaaaccacctaatcatcattagcccaaggctccctattgcaaatgaataaagaaagggaaaagatacacacaaaggtagttgactcatctaacatccttcgaataaccctccctccattgccacctataatcttaatcctagattgaactgtcccccaaccttttctgtttgctttccacaaaccaaccccatacccatccctccctgcacaagaacaccaagctcttgactccttatgtttccccaaaattatccacctcttaaggtgatatctttccacaaagaccctcccaaaactatgttcctccaaaaccattttcctgacaaggctttatgagagaggagaagactttgataccaagtagggtttaaagtattgtccgagtctggtataactcggttgagtcgtgtccgccttggctaggtttgagacgattccgatactcgagttatgatacaacattgaaaattgacttggtgctaacaagccttgaattgtttgacttagtcgatttttttattttatatatttaaaaaaactcatttgatttgatcgagtttcggatgcaaccccaataccttgagtttggtcacaaatcccttttcttatttttcattatccacaaaatcgtcctatttcggatgttgaggagagtttgcttaaggttggagcagatttaaagggattttgtggggaggtggggttctagagagtaagcctcatgtagtgaagtgggatattgtttgtttagacaaaagaaaaagtggccttggagttagatgccttcactctctaaataaggccctcctttacaaatggatttggctctttgctaaggaaagggatgccctttggagagaagttatttgtggtaaatttggggaattcgatgggggttggtgctttgaggaagggagggacaactatggtgttgggctatggaaggctataaggcatttttgggagtcaagtctcttccaaaatttccttcttagtgggcaatgggagaagggtcaagttttggagagacaaatggtgcagggatgagcctttatgtgtatcttttcccttcttgtttgctctagccaactcaaaagaggtttgggtggtagacttgtagctgcactcatttgaggggggtggatggaacctagtcttctctagacctctcaatgactaggacattgggatggtggagtgcttcttgtcaaggattcaagacaaggtggtggttgaggagagggaggacaaggtgttttgggcaaaaacaaagagtgaatccttctctattaagtccctctattctacccttgaggaaagaagggtagacccagaccctttcccaacaagtgttgtgtggaatgcatgggttcctccaaaggtcagtttttttttttcttgggaggcaacatggggagagttttgactttaaaccaattgcaaaggagagggtggtatttagccaataaatgcttccttttatgttcatgaggagtcgattgaccacatactcttgcattgtggaaagacgaggctgttatgggagctcttggtctcattgtttagagtgtgttgagtgattcactctatagttagagagaccttgttagggtggcaaaccttgtttattggaagaaagtgtggacagtagtgccgttatgcctctttcggacaatttggaaagagagaaatagaagatcttttgagaatgtggaactttttgttccaaggctgaagttttggtttttgtgcaactattatcttggactaacttgtttatagaacattcttctatgtccttaattgattttattgattggttggggtcggattgagagaggggtatttttgttttccctatccttttgggtgctttttgatgaccgttggtgtgtactttggttccccctttcggtgttttaatacaatttgcacttacctataaaaaaaataataataataataaactacttaaaaaatatataattgagtttattaatacttacaaatgagaaaaataatgaaagaatgataaaattaacaaaaaagaatatcatttaatgtattttaataattaattaatagaaatataatttttttaatcatattcattatttttttttgaattttttgagctattaaattaaaatattttgcttatctcctgattcggatctgagttactgataccaatgtgcttcgctatcttttgagtcaataactgatattgcaactttgaaccatgataaaaaggatccgttctttttatccccacaaatagttgactattttacaaggtgaggtttcttttgagtcaataatcaatactgcaactttgaaccatgataaaaaggacccttttcttttatccccacaaatagttgactattttacaaggtgacgttttttttcaagagttgcacaacaccctccccccactccccagcacctataagggctacaacaacttcctccttttagaaaggctcctccaacttcaataaagcctctttgccctaaaacttgaagaacaacccatcaattctaggtctccaatcctttgaattagacaacaatggatagagactccttagttcctaccatggatcctggtggaagttaaatgttgggtttgtgtagataaacgaattgttagcctcatttggtacattgtgtcccagtgggctccactttgtttcataaaattgttcctgcaccaaatactaagaagaggacttctaataacttggcatgcatcaatcccaatggacattaaagttagcatgggccacaagaggatggaaaagttgttaacatatttcgtaaatgttgccttacgtccttgtttcatgatgttgtttggtggaccttctttttatagctcctcttatgtcaaattgcaaagtgatattggtgtcatcttagcatgtgttgcttaattgcagctacatgttgcttggtcgttgtcacatgaattgaagcattatcaagcagcatgccattttattgttggctttatcaacagcaggcccctaaaatttccatattgaaatagtgttgagcctggctattgatttggtgagggtgagattgtgggagttagggaactatccagcattaataatccacatggtttgggtggaggcagggtttggtttgtggtttgcagagtatgctgatatcctttttaccttttcatatttcccttaaatgctcctattaactcagtttcatgctgttggggctagtgatatggaaatgtgaagaggatttggtgctggaagaaagtgttcttttctcattgacatttgcttcttttcagtttctttgcaaatcttcccgctttctttattcctcttaggtgtgcccatgttagtagctaatcatataagagcttgccccatgggaggatgggtctgttgttggggaaagattgctgaagtcatcatctgtggagtgcttctgttgacaaccattcaaaaagttgtctccttgtcagattgttccctgcaatctcttgccttttgttttggtaaaaagaagaataatcttatggacagaaaacatcacaaggttccagtaacaaagtttgcctatcattttcacatattccttagaaaaaaaaaaagtgatgtgcatactgaattaaagataatgcattgtgcactaaatgacaaagataccatattgtctacagttgcagacacagattgttaatcatctcttgttccgtcttttctcatgcaattagggggcttgcttatttggttgtgggaaaaatttataggtccatttggaaagaaaggaatgtgaaactttctggaaattagtttcatccaacatgttgatgtctaaaagtgttctgtcctgtagtttcatgatctttggtgatcaaaactcctgtggggttgtgataggcccatagatgctttgaagcatatcagttcccggacctctctaagttccataattagttttttgtgtttggacttatggattcagtattttatttgtgtaattcctttgtgtttgccaaaagaaagaagaaaggtcgaagttatagtttgatatagaattagaactaactgattgtatttaagaggcaattttttttcattttgaaacatatcctggttccctgtttttaatctacttatctatttatttatttattttttcgtgcaagcacacttttctattttatgcatcatttatatgccttgatatgattgatcaggttgaggagttgtattcgttggaccttgattctct

SEQ ID NO: 11832 - DNA, 8272 bp, Vitis vinifera
  Intron number 10 from transcript GSVIVT01032255001 (locus GSVIVG01032255001) derived from phytozome v7.0 (chr-ID chr 11; pos 14064604 to 14072875)
aaagggttttatattttcttcttcctggaaggctggtaggtggtgagaatggtaaaattgaaatttggttacagcttaaatatctaaatccttctttcatatattattatatgtgggaaaatattataatttttatcattcaaagagaataattaggcattattctatattgaatgaataggctaacttaggaaactttgactattctattctattttgaataggaaacaatagctgtccataaattaggcattattctatattgattaggaaactactctattttgattttacagttatacatagatttcctaacatttagagaatcttagggtctgtttcctaactgttttcgataatagttttgaaaaacaatttttgaaaactgttaactaatgttttgtaaaacaaaagtctgtttgggaacctaaaatatttttaacctattttctatatttttaaatatgttttaaaaataacttttatatatagtgctttatttttaatcattttccatatttgtataattattttttaaaacaacccttaggaaacaagtgaaaataattgaacacaactaaaagatgttatctgaaaacaccctattttctatttttatgaattgaaaaccgttttctattttctggttgccacttgtgtctttttggagaacagaaaactgttttcgaaaacaattaccaaatatgaccttagattttcaaacgttcctccttaagttggttaatagatgttatctattctcaacttgcttgtgattgcttgaaatgagggattaatgccttagttaagatttgtgcaagttgtccatttgttgaaacatttggtgtacatatcaatacactatcctgcttttcttttatgaaattattcacttaaatatgtttggtccgaacatgttgaattgggttatgaataatgttgatagtggacttgttattacaataggatttcataggtccttgctacttgattctaagatcttcaagaatgatttttagccataacagttcacaaattccatgtgtcatgactttggattcagctttgacactaatcttgcctcaaccatttgcttcttgcttttccaagtcactaagtttcctcctagaaaagtgcagtagcttgaggtcgaccttctgtccataataggtcctccaatttgcatttgtataagcttctaaacttaggtctgcattcttttttaacattatttctttccttggggtagatttaagatggtttaggcttctataaattgcttgaagatgtgtttcttttggattgtgcataaaccaacttataacacttatgacatatgctaattgaccgtgtatgtgatagataaatcagtttgccaactaacctttggtacctttcttggtctactattgcatccttatcccgccttaccttatggttcaacttaataggtgcatcaattggtttacatccgagcatttttgtctctttgagaagatcaaccacatgtttttgttgtgatacaaaattccttctttcaaatgtgccgctttgatccctaataagtacttgagttcccaagctcttttatctcaaattccttagctagccatttcaaagtaggtctctttcttctaggtcattgcccatcacaattttttcagacatacacaattaactcagtgactccctttgagattgagtgctttatgaatagggtatggtctccttaactttgcttataccccatctccaatttaacctgcatactttattcttgtcaaaacctagtggaacctccatgtctatgtcctcttctaatttaccatgcaaaaaggcatttttaacatcaaattgttataaataccaatcaaggttagctgccaaaaatagcaaaacacgcacaatattcattttggccataggcgtaagggtttcttgataatccaccttgtaggtttgagtatagtccttagctaccaaccttactttttctctctctgaggacccatcaactttatatttaatcgtaaatacttatttgcaccttattagtctttttcctcttggaagatcaacaacttcttatgtttggtttttgtttggtgcttccatcacctcactaatatcctttttctagttcttatctttaagtgcctcctcatgtagtgtttagggaatgccaaggaagttcaattgagtgagaaacgttttgtgtgttaatgagaaaattttctattggcggattcaaattaaaaccagctgatcataatccgctggtttcaaatctgttaagagtttgattcaaattcaatccaacttatccaaatcggctggtttcaaatctgttagagttttttcttttaaaattactttgtttttaaattttgttatgctcttaaaaataaaggaatcggtttttttctaatctagcatacaagtcattatattatgcactttatttttttcaatgaatgaataaaaataaatagtgtttttgttcattgttgtcacaacccaaattttgggcaacctagaatttaactcttgatcctggatcaaagatttgaccctaagggttacacctatccaagttggtcgtcaatcctgataacctgattttttttaagaataaatttacatctaatccctaataaatttattaagctaagatttactatatatatatatatatatatatatatatatatatatatatattttccctttttcccaaaacccaccatcacctattcacaagtataataaatccaccaatagtcttaccacccaatgtaataacctaaatatttacaataatctctacgtcaaaaatattttacaaactaacaaaatataagtggtgagcatttccatattgcttagttgggtgttttacatcaaaatgggttagaaattttaggtcaatagaacataatcatatgccaaaatataatattatatttacattatatacattaaatgaaacctcaaccatacaaatttaaaccaatcaaaattatcatttttcttattcaattatatgtctaacatattgacaattccaaatttataaaataaataagtcattttagtcttgaataacatatttaaacatacaattgataaataatacaaatccttcttccaaatgcaaatgatcgagctgtggcaaaaattagacctatccacaaattgtgattggtattgcccagaatgtgtagtgtggtacaaaaaactattggatatggaaagagtccatggttttcttgtaggactcaatagagaacttgatgaagtacgaggacgaattcttggaataaaacctctacatgctattgaaggggtatttgctgaagtcatgagggatgagactcgaaaacggttaatgctagatccatgccaagtactgaaaattctgctttagcagcttgtggtccagaaaagcaaggagaccctcgcagcaacaaaaggggacaacagtggtgtgatcactataagaaactatactacacaaaagataattgctagaaaatacatggcaaagccaaacagatcaagaaaccgtgacggcaagggtattcaagtagctgaaactgccatgttgtcgttaggagaagctacagcttgtggtgctcaaggaaagaccacgaccaaccttaatctcaccaaggaacaaatggagcaactttataagttgctaactctagcaaagcctggtatctctctcttgccacaaaaaggtactttcttgactgcacttagtggaatagctgaaaaaggagagccttggatcgtagattttggggcaatagaccatatgacaggttgtgggaaactcttctttgcttgtactcctagccttggaaatcataaagtaaagattggtaaagattgctaatggatctctttaagttgttgcgggattggtaccattaagcttagtcccaatataatcctaagatcagttcttcatgtgcttacactttcatgcaatcttctttccattagctagattactaaagatctaagctgtgtagtaaattttacacaatctgcttgtgttttccaggacttgacttcagggaggagcattggcagtgctaaagaacatggggactatattatttcgagaaggacactgttgtgatagaacaagttaaagttcaagctttcatttgcaaatcttctctttcataaaaacaagaaattatgttgtggcattgtaggctaggccacccaaggtttccttatttaagacatttgtttccatctttatttcaaaataatgaatcaatccaaggtgatatttgtcagttagctaaacattaacgtcctttcttaccttctcaaccatatcaaacgttaaaaccttttgctttgatacacagtgacatttggggtccatttcgagttcaaagtattacaaataaaaggtggttcattacttttactgatgatcatacttgtgtttgttgtttatcttttaaaagaaaattttgaggctgaatttttttttttaaatttctattccatgattcaaaattagtataatgcaaatatacaggtttttcacactgataatgggaaagaatattcagtctattcttggggatttcttgaaaaaaaatgggattatatatcaaagttcttgtgtaagcactccaaagcaaaatggtatattagaaagaaaaaattggcatctcttagaagtagctcgttccctaataatattcatcatgttcctaagcattttttttaagggggggcattgcgagtcattcaatttcaaacacctttgggtactctatcgtctttatctgcaaaattgagtcttctcttcattggatccaaaaatctttcgttgcatcacctttgtccatgttcatgaacacgaccaaacaaaacttgattcaaaagctataaaatgtgtgttcctaggatattctgcaactcggaagggctatcaatgttattctccaaaaaagcataggtacttcacttctatatatgtcacattctttgaaaatcaaccattttacaccaaaaattctctttagggggagaaagaaagtgaagaaaatttttgggaaacatgtgggggaacacccattcctctaccgagccaaactcaattcccatctcatcctaattttgagctaccacgtcagccaagttccttgagtttgtttcattccccttgtgtgtttgagctaatgatgcctttttccaacgaacaaaacacgacaaggagagatttgctaatgcaatcggagctgcttgtttattcatgaaagaagaaagattaagaaaaaatagaaaatcccatggttctttagcaaggtcaagagcccgaaccgaattcaggtacatctcattcaaacgttgattctagtcctaaatttgttgatcttgatgtttctatagctgtaagggagtttgatcttgcacacattatcttatttctaattttgtggcatatgaccatttatcttcatctatatgagcttttgttgataacctatcaggtgtggagattccaatagatatataagatgcatggagggatccaaaatggaaaatggcaataattgaagaaatgcaagcccttgagaaaaatgaaaactggtatattgtggaaaaacctaaagggaaaactttgctaggctgcaagtggatctttacaattaaatacaaagctgtcaggtcgattgattaccaagaaatgttcaatcacgttgctaaactaaataccatccaggaatggtgatttagaagaagaggtctatatggatttaccaccaagttttgatgaggaaagaagtaatggaaaagtgtgtaaactgaagaaatccctctacggcttaaacagtcactacgggcctggtttgatagatttgctaaagcaatccaacaacagggatacaaacaggctcatattgatcatactttattctatagacgtaaggatagtaaggttagaatcctttattgttaatgtggatgatataattttgactagagatgataaggccgagatggaaagattgaaggagaggtagcagaattcaaaataaaagacttgggaagtttaaggtatttccttgggatggaggttactaggaataggggtgggatttttgtttcacaaagaaaatacacgttagatttgttaaaggaaaccattatgttaggatgtaaatcgacacactcccatggatctgaacttgaagttaggagagaagtcaactaaaattccggttgatagagggagatatcagtgtttagtaggaaaacttatttatctctcccatacccgacctaacattacttttgcagttagcaatgttagtcagttaggtggtgagcgtattgcctttgagggaggggtcgtctcttgtatatctttttggacaggtttttgtttcagctgtaagaaggtgagcgtatctttcttgtatttcacgggccactattttagtgcccctttttaatacaattactcttctttacttgtcaaaaaaaaagttagcaatgttagttaatttatgccttcaccaagccatatacaggatattgtggtatctcaaaggcactcttgggagaggattattctttaaaagaacttaagaaagaagtgttgaaaccttcgctaatgccgattgggttggttcaattgaagatagaaggtttacctccggctattgcacatttgtttagggaacttggttacatggaggagcaagaagcaagtagttgtctctcatagtagtgtcaaggctgagtttagatcagtagctcatggagtgtgtgaattgctttggctaagattattactagaggaattgaagatgttcaaaaatctgcctatgaagatttactatgacaaaaaagcaacgattaacatctctcataatcctatacatcatgctcgtaccaaacatgttgaagttgacaaacattttattcaggaaaaaattgacgaaggaacaatttgtatgacatgttctcacatctactcaagctgttaatcttctaacaaagggagtcatcaaaccactgtttgagaagtaagtagacaagctgggaatgttcaatgtatttagtctagcttgagggggagtgttggcggattcaaattcaaaccagcttatccaaatctattggttttaaatctgttagagtttgattcaaattcaaaccaacttcaaatctgctggtttcaaatctgttagggtttttttcttttaaaattactctgtttttaaattttgttaggctcctagaaatatgggaatcggttttttcccattctagcatataagtcattgtatctgcactttatttttttcaacgaataaataaaaaataaacagcgtttttgttcattaacttcttttgttggcttttattttcctaggatatgaagtgagatgtaggatattgagtgcacttcctggttccttttctaatggcaatgggtagttctaggtcattaacatcaggacaagaaggaataagttctgtacctagtgttggctttggattcttggacctgcataaggttaagaataaacattgtagtaaacttgaagagggtagcttagcagcaatgggaccaaatttgtcaggaatgacaaccataggaatgacagtttcagactcagattcaatgaaaacagtacttggtatttctgggataattgctggaatttctaggacaactgctgggatggtgatagtagcttcagactcaggtgtagaagaacttgctggaaagtcaagtaggatcaggtcctggtcttccatagatgatgatggctcccttgaagagaaggattttgaaggaaatattgtttttcagcaaacgtggcatccatggatacaaagaacttccttgaaggtggatgataacacttgtaaccttttttgatagcaaagtaacccatagagagtcagagacacttgtaaccttttgcctgtatcagtatgtcaattgataattgcttggtcttttgataaattgctttgcttttgtgattttgttctgattttgtgttatttgttcaaatttcaatttacatgtaatattttctgggtgctttatcttaacttaatttttgagcttgggtatggtagtggcaatttttagtaatggtggttaaatttgatgctttttggtgcatgtaatggtggaatactcaagaagtgtttgccatcttctcattatttttcaggttaaggtcagggaaggtggaacagattgggggtg

SEQ ID NO: 11833 - DNA, 2681 bp, Vitis vinifera
  Intron number 20 from transcript GSVIVT01021589001 (locus GSVIVG01021589001) derived from phytozome v7.0 (chr-ID chr 10; pos 7593755 to 7596435)
tgggtcgacaggtaattatttcatgttaaataatgttaaattacttgaggatcgctgttatcattattgtttctacattctgctttatactcgatatgatttgtagatcatgttatagccccaaacatgcccatctcagttgtgcttaaaattattggtcgagtttgttagaaacaacattctttatattgaatcctgaagattatcttgaaccatagaattaacttgagcatatcatgatcttatgaaatggaaaccttttagatatgtgtatgtgtattgaaaagactgtttgtagattggatccttttttttttttcttttgataaaaaacgaagggaaatgtattaatagaagaaaagatacaagagaaagatgagatacaagagaaggatgagaggtccttccctccaaaacaaaaactgatcaaaagagaaaacacccaactttagaaaactaaatacaaagaataaaccctaactatctcaaaccactgaatcacaaaccgtagtccagttgagctgtagaacactaacaggaactcctccaaaagctgcagtacaagaggcccaaagagaggaatagaaatgaagtaaatcctgtaacatctcttccattctccccttatcctcaaaaatcctagcgtttctctcttgccacaccatccataacaaagtgaggcaagcgatctgccagagtgtcttgcctctaattgagttccccaaacctttaaatgcaatacatcatgtccacaatactccttggtggaacctaagccaaccctgctagattgaagagctaatgccaaagccctataggtaaaggacaatggagaaaaaggtggtcgatcgattctccatttcctttgcatagaatgcaccactaaggacaaagggatttgtagggtcttctcaattgcaacttgtcattggtgtttaccttcccatgtaccactaaccaagcaagggccttaacctttgaaggggctttcgaactccacaaaaacttggccagaaggaacaaaataggatttgagaaatttgacaaggctaagaaaaaagatttaacggaaaacaagcttgatgaggacaaagaccaagctattgaatctgccatagaaggagaaaaatgcattgaactaagggaggacatgattctctgaaggagttaaatttctatatcagtaagattacgacaaaaattaaaatttcagtagagtgaaaaggaattgccaaggacaattgagacagtgaggtttttcacaaaaataactctataaagaccagagaattgagagcacaaagtttggttaccccactatatatcttccccaaaacggattctctccccattccccaccactaggtgaataaaaagggaaaaatcttggaaaacttgagcaatagccttccaaggatccttaaactaggtgatttgaagagatataccttaaaagttattgatttattcaatttattctaattaagttggagtcataaataaattgagctacagtgatcaacttatcttttctatttttggagaacgtcatagacactctaattctgtatttgtagaggggaatttgatactatatagagtgctaagataatttgtgttgagttgccaactttcctgaaagcttaagctgttaatattttgaccccatattgtatatcacattctaacaaccctcctcatgcatgaccgtgtccttgtacatggagagacaaacaggcacatgccaaggacactcaaattctgtatttgtagtggagaatacaatacagacttctaagataatcagtgttaagttatcaactatctttcccataagcttaagctgttgggattttggcccacattgtatatcatgctctaatagccccctcatgtacagttccatctctgcacttggagaggcaaatagatagggagacaaattttcacttaataagggctttgctaccatgttgggttaccaactttcctaaaagttttaattgttataatttgggcccacaatgtatatcatgttccatcaataagatttctaaggatttaaacaaataatatttttgctactgatgtggcttgatctatgtacaaatacgtttgatcaattgtactaagtttctgctcaatcactaaagcagaatggtcattgatcaagatgagaaatgttacttaaactgactaagcaagagtcccgattaattgactaggtttcttgcaaaattatcctctccttttgattgaaatctgattcaattaatcatattccataatcttgatttgaaaaccatattatcaaattaattcttaaattcttccaacactgtaaattgcttgaagaatagatatttttattcttcaattttgttcaattatctaaacaagtattttgaattgaatatgttttgactcttattctgactctaattacacatgtacacaaatatggaattatgaaacttttcttttgttaaaagaggcataattgcacgatatattatttgtttcttctattcttttgctcttttttttgtatctgttctaactcttctttgttcttgattatcaccatctttggctcttggaatttaatcatagaactgttcttgaattttattttataatggtctaattttcactgccaatcatttccaggtttttgatag

SEQ ID NO: 11834 - DNA, 4890 bp, Vitis vinifera
  Intron number 1 from transcript GSVIVT01034722001 (locus G SVIVG01034722001) derived from phytozome v7.0 (chr-ID chr1 3; pos 8431954 to 8436843)
agcgtcgcaaatccggaaaacgccgcatctgcgaggtagtcttccgttaatgcttgatgcgctttctgggtcttttaggacaaattgactctttttatgcgctgtttgttttctgagaaaaaaaagtgaaaagagagcaaaaaaagagaaatttaagtgtatgtctttcttttgggttagttacttgcgataatggaaaaagttcaaataaaaaataaaaaatcatagtagtagtctaaagaaaggctagttgatcgattaaatcctaattaagtactggacaaatattttacattggagcaatttctacgagaacaagcaacgtaatggattgtaatgtgacccatggaccatatctggtgctttgaataatcattcataatcagttgtgcaaaatatcatgttctttaaatgagaattttaattgagattgagcctaatggaagtttggattgatttcagtgaacataaaccctcgaagtaatatggagtcagggggatttgctcactgaatcgcttaatcttatacaaggatgagtatttgttttgacttaattggctttacaaaagtgtcctattttctgaaattatttttcagaatattttatatcttagaaaatcctttttaaaataataatattcttatgttatgaaagatttgcctccaggtttgtttgcctataaataagagtcatgtgaacttgttttgtgcaactcttccatctgcattaagagttgataattattggagttttgttttttttcttttttttgtttcttttaagaattactatgttcatgcatgctatgtgttgatttctgaaagttttgaaaattcttattgttttataattatttcatcgtttgatttgcttctggtggattatgtgaaacgtgcttttggtggatcccatgaatgattgacagtctgaagggagattgcttatccatggtggcttgtgaacttgttgcttggatgtaggatgcattttgaagaataatatgcagttatttacttatttaatgttgaaacctcaagataattactaccaaatcatttagtaattggacagtcctgtggattttgactcgaatagtggttggtgattggtatttggggttttcaagtaaaaagggaaaacaattaggtgctttttttttattattattatttatgtttccacattatatatttttttgctggtctggaagccaatgaatagtattgctttgttttggatggttaattaaattaaaataaaattgaaaaaagctggaaaaaaatatagatgagtccatttcaaccctctctagatctatttttaatgtcgttcttttataggattgctaagtttgagacaatcaaggaagaatgaggtattttggaaataactcatgagttttgtattgctattaaaatttttaagtttcaaaattttaccgttaaatttgaaataatagttagaaaattttcttatatcttgaaccaggaggttctcaagtgattgatattaagaagaaatagaacattcattttctaaaacttgaggaattagtaggttccccctaacttttgaaatgacctttccaccatctatgagttgtaaagtagctgcatcttcttaatacattatgcttattaacctaccaaaaatcacaaagaaaaagaaaaagaaaaagaagaaagaaaaaaggagttcaagggaactctaataaacaaaataataaaaactacaaaaatatgggtgatctcaaatagaagaaaacacatcctagaggaacaaagaaagaaaagtcactcataagatatacttggtttgggtgttaaaattgtcacaagtaggagattatctttggattgtcttttttttgataaatatatatctttggattgtcttaataagcaagtgaaaaggaaaaagattattattgtgactttctttcagttttttcccgtttgaccttttaactatgctttgggtttcttaggtgatgacatggtcatttcaaaagtttggagtgaatcaaccaacttctttattatttggaagtcaatattcttagttacttcaatggcattcagtttaggtgtggacctccttgttattgttctaaggtgttctctaacaattctagattcatgaattctctcttaagttgtggcataaattgataagtatcacatgattatgcccttaaataaatgtgatttgagttgtttaaaggttatcctctctttgtgaatccattctaccaaccgtatgttcaagcatcactcagatttttaagcctttgtatgaatctactaatgctctggtaggaatagaaaaacacatttggtggtttatttaacttttttttaggtttttttcagtttaatttaatttaattaattgcccaaaataagtaatttgtattcaattcaatccaaccaaacaaaaaatatgaagtgcagaaacataaataacaaagagagacacaagatccttctttatgagaaaacaacttgatggggaaaagccttttaaagtttattcaaggaagaaagggaagacctaagtaaactttaagtaggattaatataattagaatttgagtcatgataggttattaaagtcctagtagaataggttattagagtcctagtagactaggttattagagtcctagtagaataggttactagagtcctagtagactttggatttcttagagaagcctataaataggctaatcaatgtaaatcaaaggaatgaattttgatgaataatattatactttctttcattgcaaggttgcaaccctcaatggtgagactccattgattttcttctaggtgagactcctagaaggccttagtgagactctaaggttttccatcttttcttcattgtttcttctttctctctatttcttatcttataattttctctaccataaagtttattccttttttcctctccttacaccctaaaaataaaaccctagcccacctacccttgagtgtagacaaccatcctagggttgtcctacatcacaactattcatggagaaaaccataggactatctagtccactaaattgtctattagaagttatttgaagtgccaggaatgttgaacaagttcttctccgcatgcaatctatatgcacaaccttactcttcaataatcctcctacctgcaaacattgaatccataaagtgtcagaaatgaattagaaattgcctttcagcatttgctcaatacttcaaaatccacctgaagcgttattcatggaatccatttttttttatataagtaaaaaggaagtatattaatcaaaaagcggaaacaccaaaagccaatgccctcaaagtatatagggagtatacacaccgccttcccttactaagagtctatccagtgtacaaaacttacaagagaagaagggctcaaaactaagaaaaccctgacccaagaccaaagattacatacaaaagaatatttcaatctttgaagcaaaagctcttcattcctgaaagctaatttattcctctccttccaaactaaccataatatacatagaggagccatttgccaagcattattcatggaatccattagattcagagaatggattaattttgaacatgattagttttgaaagaaaaaatttgcctagaattttcaattcttaatgcaggagagaatcattgcagaaaaacaactcgtcttttatttatatgcaaacagaacttcagggtcaggttttcacctggtagaaattttcttacttaccaaagaaaatctggtcacaaccctctatggtttatttgatctcagtgcaaatccttagatttattgaactcgcactttagattgatctaagggttaattttactggtaccaatccagaattcacttgtgataagtcttaggtcaaattttttgtcaaaaataattttaatgttttgtaaaactaaaattaaaattttggaaaacccattttaatgtccaatgttcatatttcgtccatggattttattaccctgtataagttttcctctgaagaaatttctctgaaactgattttttctaattcaatggagaattgatctcaaatgactacaattactttgcattgaattcccaactactattgtggacacaaaatctttcacattcaaattgtttgaaataaaaaatgtaaaaataaaatcttaagttggtttatctgttcaatatttggttatttgtgttgttaagcatgcatctttaattaggatatattccttggaaacaaggagttaggggttgtaaatttaattcttaaaaaggggaatttgaaaacccaatatacagttagtttgtctaattcttataaattgttggattgttgttggtggtactcataactaggagttatatttgtgaatttattgtaaaaagaagtgttgctggtggggcccatatctttacctatcatagttaaggtatttttctgctctcttggtctgtgtgtgttggctctttcatgcacgtgttttctttgtttttcaagttctagtaatatgtaaattgagatcattgttaaatcaaccagtgtatgaagttgcaaactgagaaacaatgttgctcttcatttctttatcttttcagttggaattagtgattttatttttgcccctggttcgttcacttatacaacattgttattgcaataacagcttgatgttgatctctttctagtttcatgattttatttgaagtgtttttgttaatgtgcacaatttcatttctttggtttcctgaacttgttggcaccctctagtgctatagtgtgctttgaactgtgtgctttttgccaaggaatttgttatatgtgaatctatcttgacttgtacaggga

SEQ ID NO: 11835 - DNA, 2014 bp, Vitis vinifera
  Intron number 1 from transcript GSVIVT01003904001 (locus G SVIVG01003904001) derived from phytozome v7.0 (chr-ID chrU n; pos 13400161 to 13402174)
ttattgagtcaggagggctaattcctgtagttaatattactaaaccattgttctagagcaggattatatgatatattatggtagcttctcgatatgatgatccaaactaattcggatgaaaaaaatgttatttgattaaaagggtcattcaaaacccaattttgcaatccttttatggtcatattttgataaaaatactctcatttaaaaaaaataaataaataacaatttttctataactacatgtaattacttgaaatagttaaggctgtatatgttaaaaattggtaatttttcaaacaaaaataggaaagattttaaatttacaaataggaagattatttcatcttttttaaccaattaattcaaaaaaaaaagttggaaagatcacttcaaatgagatttggttgatatttagcattttgtaggttttctataacattctgaatgtaattagatttatttattattaaatgggtttcgtagtgcaaggtgttcagtttattatggccttatcacctttagttcttgtatataattgatgaaaatcaataatatttcttatggtattctttttttgtgttttttttttctattttttccttttaaagaaaaaagaaaatgaaaatgaaagaattatacaaaaaaaatgtatatatttagagcttgtgtttgttgtataatttaaaaatagttttttgtttttaaaaacaaaaaattattttttaaaatttctaacagtgtttgattgttattctctagaaataattttaaaaaacgaagtaaaatagagaataatttttagagaataagtacgggttgttttcaccaatttttaaaaattaaatttaaaatattggtcattttcgtcttattttttgaaacttgtttttaaaaattattttaaatttaaagaataaaaaacaagttttagcaaacacgatcaaatgggtcatagatatttaaagattttagaaaacctcaatttgataatatggttatcatgcaattcaatatatctcttttacacttcatttttattttttaaaatgatcagaaacatgattattagatttattttccaattataagtttagaaataattagtgcttcacaatgaatctaaaaggttttttaattaaaagaaactatctaccttcaagcttttttttaattaaggaaagcttttaaaaaaaatgatatttgatagaatcatttaataagtgactgtgcacgaatcatttcaagtaatttttcatgttttcaaaagtaattcttaaaataaattttcatatttattttatataaaccaaaaattgttgagacacgaggaaggagaggtaaaaggagaagggagtggaactaaggaatggcaacggggcgggttcgggacgggtcgcccccatcccaaccccgccccgtttattaaaaataattctcatccccgtcccgtttaaaaaattaaacggggcggggcggggcgggtatgggaaattctcaaacccgccccgtcccgccccgtttagcctccttttttttctttttttcttttttttaaaatttgcttttaaaatttttaattacattaaaataaatatatttataaataataaaattattatattttttataacttattttattaatttttttattattatctatatattaaaaatagtaaaataaaattaattttaaaatttaaattaaattaaattttaaaattgattttatatgtaaacggggcggggcaatacccgaacccgccccgggtttaaaaaaaaaatctcatatccgttaaaaacctgtttattaaatttcaaccccatcccattaggggcggggcggggcgggtacccgaaaaaacccgtcccattgccatccctaagtggaaggtcacgattcttcccttaaccggttaagttgattttgttttacgaatttaaaatggatggccaagatgtaatctttcgacatccaatggtttaaataattttcggtacggtaccggagg

SEQ ID NO: 11836 - DNA, 10180 bp, Vitis vinifera
  Intron number 8 from transcript GSVIVT01021009001 (locus G SVIVG01021009001) derived from phytozome v7.0 (chr-ID chr5 ; pos 15393776 to 15403955)
agttcacacaaggcaagcaatctctcaaaaaggcttatatattttattttattattattattttttaacagtgagggatcatttaggtgctatgctgcacaattataacaattttaaatgtgtttcacaatttgaaaagtttaaaatgtattagtttgacaatttaaggcttgtagtctgggtttgtgggtttcgaagctcaagaagcctaaatagtgaatgcattagggttaagtttcacacttcgtattttaaataaaatttcaatttgaaaatgggaaacattttgaaggatgtttctaatgcaatgaataaaatgatgtatgttagttgtacaccttaaacttcaaaaccacaaaaacaataattagttgttatattgagaaaaatattgctcttgatagagtgagggctagaaaatggcagatttgcctcagcttaaactggtgaggagtgataaaaagcgaggatgctggttaactttcattatataatgaacatagaaaccactttctatgtgttcaagttgtattggaatttttattatcaaatgctaaacttagtcacatctggtgtggctattttattatctaaaaactcttaatgattgctaaagagcattattgtgtgttcagttaagacacccaaacactttacgaaagaaaacttttaaggcctaaaagcactttgaataaagctgtggatgtattgtatctgtggaagagcttacagaaaaaggtctcagaatttagtttaatttaacttttttgttattaaatttacccattctttaccctagtcttttcaaagaactactttacttgaacttatagttatactgaacacgattttaggatcaggacttaatattgaggagattataagctttatcactgcccattagaaaggcagatggttgagaaatcgatgattgacagttaaaagcgatcttcaatatataagactggtccaagatgagtacatagaccttttcaagaggataggattagagaaacatcttccaaatggatgagatagagccttggaccctggtgggttgacaatgacattttaccaaaactatcatatcatcttaaaggagcaaaaaaccaaggttccaatagggtaacacccaaaggggggtgcatggatgtatttcaaagattttagtataagatttgagatttttgataggaaacgacaaagaaatatattgaaagaattaagaagtacaaaaaaaggatgaggaattctcccacaaaagcaaacagaattctcccacaaaagcaaactaaacagtttgtagttccaatggggtgtctagctaagacagtttgtttgttgttgttaccttttagcttgttgtttagtataagagttgagatttttaatccaattaaatctttaagaattatttaatcctttttaactcaattaaaaactgtaagaaattaggaatgattaatggcaaacttatgataaaaaaaataaattaatggtaaactaacacacacaagagacaaaaggttttttatgtggaaaactctcacactacttgtgaagataaaaaaccacggggtctaagaccttagataaaaattccactatacgaaattgtaatacacaattttacctagcatactgtcacaggatgcttcaaatgaccctcccccatgggcttatataggaggagggaagcttctggagactcctggagccatctacactaagccattggtgggaagagtgtggaaggttctagaaatgcctagagatgtccacacatctctacactatggtggaaggcatgggaggagtccaaggctttctagagacttctaggaatctcttatatattcttgtacatagggttgtacatagaatagggtaggatgttctagaatattcttgatttgtaaggaaccctccaaggttctagagagttcccttggtgcctataaataggtgagggcctcatttggctaaggcaccacccaaatcacttcctaaccaagcaagtgagcttccaagcacttgtaaaagatttctttgaataataaagagcttccattctttaaggagttgcctactaagcttcataagctttcaagtcgcgagtgtcttagccgagcaagctaagcgttggggatcaaggctgacttagcaagatcaagcatcttgacttgcctaagtgccgcacgagcttagtaaacaactaagtccgtgacaatacgctaccaaagaattgctttccaacacctatatcatgatttacgtccgtgacgcagcacttcgagtgctccaatgaatttgcctcagcctttgaggggatgtaagtctcttcaacaacctagagttcattgaaagaacctttgagagcctttggaaatggtaaggtaagttagggtttttcttgaataaaaacatctgatcctaaaacacatttaggtagggtatatataggtccaaaaacctatgaggttcggaaacaaaattttcttaaaaaataaaatctcaactttccaaaaattaattaagacattttaactcaattttaaaacttttgatccaaccctaccttgtcaaaaaaactaacttgcctttactcaaaccttttcagacttacctgagacagtccagttgattagatgacaaccttgaatcttcaatggagaataagtcaccgtctaaaaagatcctattccagaatgaaaaggaacaaaattatcaacgacaaaaacaaaacataatgccctaacaaggagaatttagtttgtgtttttagggaattttacaatagtagaataatcaaatagggtacaaactcaatttccattgcacttgtccaaaagaattctattaatcttaaggttaaagattttaggcctataggtttggtttatagcctttgtaagataagtgtgaaggttctttatagacaccttcatgagacattcttcatgatatactgatgataaatgaagtaattgataggagatgagaattaagggaggaaagagaagagagtaggggttttagaattagcaattgtccattattaataaggttcttctaggaaaatggtgttggatatttgcgattgagagggagttcttttggaaacgggtaattttaggaaaatattgaaggcaaaggggggttgctgctctaaatgagtgagggaagggttctaggtgggtgtgtagaagacaattagaagtgggtggaagacctttaatggtaaaatcgacttcaagatgggctataagaggagggtggaattttggaaagatagatggtgtagtgacgtatccttaaaggtggctttttaggatagccattgtcaaagatgcatgagtggctgagatgtggaagcatgatgggaaggggatttgttggaaccataggttggcaagatatattcatgatttagagttagagtggatgaaaaccttttttaggaggttgtaagtgcaggctattagtagggatatagaggtggtttggctgaacacgaagagtgacattttctatattaagtctctctattcttctttatcatgcaaaagatggatatgttcctttatagtcttgtttgaaattcttgggtaccatcgagggttacttttttcgcatgggaagttatgtggggtaggatactaaaattagatcaactcaaaaggagatgatgaagcatattgaacaaattctatctatgcaaaggagaaagaacagttggtggagaaagtggatccgaagatctcttcatttattaaatttatagtgcttattaatgtgagtgcaaagattagttagacaccttttatgttacacgggcttgggtgcaaattctaggtgttatatgtctaggtgtcaaattctttgcatcccaaaatcttaggacacatggactcaactaaaaaggatctcaattgttggtgcgggtaattgattatgacattaattatcacatgtttttttattttaattgaatgtttaaacattattggaaattttctacttatctttagatttttaatatattaattctagtacttattttttactatattaattattatatttatctttaaattttgtatgttattaattatcatatatatttttattttaactattaaacattattgaattttttttaaattgtaaatgtgaaacatatttatgataatttttttattttaataggattgtgagagaagctttaagaaactaaatgggaacatatttattatttatcataaatgttgagaactttaaggaaaatatatagtggattaaatatgtagttgtttttgattgaacctttattaggtgaaaatttcaaaaaatttatgttttaattatttacattgaagctaatttatttttaaattttatgaattaagttttattatcttaacattgctatagttcaacttaaccataatttttgtgtaaatatattttttgaatcttgttatttgaagttgataaaattaaattgaatttaatgtattttttcaaaagaacatagataattattatgattttaaaaaattagaaatagataaaagtcaaataacttatattgatgttatttaaaaagaaaaaaaattaagaaatttaaaaaaaataaaataaagaaaaggataaagttgtattcattgcaatccaagtgtgttagacatggatctcacacccgcacccatgtcatatcgtgttggcacgagtattttggttgaaatgaagtatacatgtatcacatgacaccttaaaaggactttgcaaggttaacccttattgtaaagagagttgattgatcatatttttttacattgtccaataactttagggctgtgacacaatctattcagataagaaaagatggattgagctcaacctatgagtaaatgcgaaatggtgatcactttgtttagggagctctaagctctaatagagccctttagcagaccgcttcacattgctttgggttgtgtgacaagagagacatgctcggatctttgaggataggtggaggatgctagagatgtgggatctacttcacttctattcctctttttgggcctcttgtattgatgcttttaatcacatttctttcaatgccatccaatatgtagatcaaaagggtttggtcaacaatgagaggagcttagtctagttttgagaagatgatgtctatgtacaacaattttatgtggtctaacctattttgtatagtttggagttcaattatattttgaaaagtttttgcatttatgggaaggattgctcatccttctcataaacgttttattcatacttaatacatctttgttttttagggaaaaaaaagacttttcaaggtagttgtttattaccctttttcttttggttgtcatagataaggctagaatgtgaccttttttttcccccttttcaacaaaggaacaatgtttacttatcaaaaaaaaaaaaaggaacaatgtttagataaccttagactttttcaagcttttcagggttgtgcttggctctaagatcaacattgaaaaactgtagctgctactggtatcaatcgcttaaactgcatagacagattagttgcctttatgggatatagacagggttgtgactccttgtttaactaggtctgccccttgaagggaaccctggggcgtctcacttctgggttctagtggtgaaggtctcccaatgtctagatggttagaagaaagcctctctgtcacttggatgcaggatcactgtaattcaagtgtgtctggcatatgtcttaacctactgtatgtctgtttaaaattcccattagagtcttgtatcaagaaattcaaagagttcttttagttggagttaggtgttggttggagaagccaccttgtttgatgggaccacattagcagggccacgtccatgggaaattataggttgaggtggatttctttgaggaatattagttctcgctgggtaatgcttgtggtaattccttagagagtaaactctttatggaataaggtgattaagaatatgtgcaatttgcatgataatgggtgggtgctaccatctttgttaggaactcactttgatgcccttggaaagttacaacccaagcttatcttgaccttatttcttgttggtgatggttcctctgttcttctttagggggatctgtagtggggagatcagccttaatctggcttcccttgtctttattgccttcctaggatgaaaggtctccttcttgtgaaaatctactcctttctgtgtgactctccatcttggaatgttgatcttttgttgaagtcatttaaataaagaaattgaagatctgtaagcccttttgttgtttttgcccagtgttcctttccacaggccatctggatgagaaaggtgtttgaccttggtttccaatgccattctctcttaaatatttcttcctagtcctttctgaattgactctccttcttttgctcaaggcaagttcttctggacatctagaactcctgaagatctggacactttcttggtcgatgactaataaagaggaacatactaataatatgctataacttaggagaccccaaaaaaggatattatcccaaattggtatgttctatttctctcctcaattgtccttttgctttggaggtgtggcataacatctttcctcccaaatgagtagttgactacgaatgatggacgtatgtattaatctggttactgtttttggggtttaactgtaagttacagtgctaaatgttcacaggtagttttggaaattgattttacaggattatattgactgtaaagcttatattccatggagattttttttttttgataagtaaacgtatagagaaaaaaatattagaataaagggtgccttaaggctgacccaaagcatacggggttatacaagagtcgtcaaaaagcaagaacaaaaagaagaggggatacaaaaaatcatcagccctcaactagaacccaaccaatcaaaaaagctgattaaaggaagaggtccttcatctacaatcgacttagtccaaacccaaaaattatatacaaaagaacttttcattctatgaatcgaaagctccttattttcaaaagcaattctatttctttccttccaaatcgcccaaaaaagacataaaggggctgctatccacaccttactatgcttcttgcccatattgataccatgccaaacaagaagggtatctttaactgaataaggaaggacccacattacgccaaaaagagcaaacaataactccgataaaactcttgccttggtgcaatgaattagaatatgatcaatagactcttcttctgcacaacaaaggaagcatctattagctaaagtccaccccctctttttaagatgatccaaagttaacacattactccaagaggcttcccaagcaaaaaaacccactttagtaggaacacaaggctccaaatgatgctattaggaaactgaacaacacttcttgaatctagagcactataaagagatttgatagagaaaatcctgtccttagtctctttccacaacactctatcttccaaattaggattaagtctccttccttgtattgtcacaagtaacctctttgcctcctccacctcccaatcattgaaaggcctagagaacctagggctccaaaccccttcctcttttgatgagttccacaactttactaaccaagcctcttttgaagccgttaaggcatacaaagaggggaaagattcacaaagagcaaagttcccacaccatttatctttccaaaatttcactcttctgccatcccccacagaaaatacaactttgttttgcaaaagagacccttccttcatgatttccttccaaaatcctgcgccaaaccccttcctcaccgccctagtacactacccccattcttccttcccaaacttcctactaataacatgcttccaaagagtctccctttcattcgcaaagcgccaattccacttacataagaaggccctattaagagtagaaagacgtctaactctcaaaccacccttccttttttcctaacagacggtatcccactttacaagacgagacttcctctccaaagctccccttcctcacaaaaaaatccctttgaatttgttctaatcttaatctaaccactcttggaatacacaataaagacatcaaatagatgggtatactagacaaagtactgcgaatcagagtgattctccctcctttagagatacattgcctcttctacatggcaagccttttccgaaatatctcctccaccccatcccaagtagccacgaacttgtgttgtgcacccaaaggaagccctaagtaagaagttggaagcctcctcactttacaaccaaactcaagagctgaagcctccagattctctactctccctaccgacaaaatttcactcttatccaaattgattctcatacttgagatggcttcaaactacatcaacaactagcttaaataagccatctaatcttgggaagcctcacaaaagaccaacgcatcgtcagtgaacaacaaatgagagaccaaaaccccatctccacttcttctctttatcctgtagcctgatagattacccccctttcactactctaaagatgagcctacaaagagcctccatctcgatcacaaataagtaaagagaaaggggatcttcctgacgcagtccccttgaactgttgaagaattccgtcgaagtgctatttatcaaaacagaaaacattgtagtggaaatgcacttggaaatccaaccagtctacttctccccaaaacccattctttgcatcactaaaaacaaaaaattctagtttaagtgattatacgccttctctatatccaacttgcacaacacccaactctcattccgtttcagcaaagaatctattgcctcgttggcaattagagtagtgtcaagaatttgtgttccctcaatgaaagcgttttgagctgaagacaccaccttgcccactaccttcttaagcctattagctaacacttttgccaatagtttgtacaagcctcccaccaaactaatcggtttgaaatctctaaggtcctccacgcccactttttttgggattaaaaccaaaaaagtagaattcaaactccttacaaatcttccctgctcatggaactctttaaagaaaatcataacctcatctttcacaaaatcctagcagaactgtcagaaacctagagagaaaccatctggaccgagaaccttatccccattcaaatctgagagagcggaaaaaacctaatccactataaaaacctcctccaatctagcagcttcctcaacatcaattctataaaaatccaatccatatagagatgggcgccaatcactaggatctaccaaaaggttctggagagcactaaccatgccccccttaatttcctgctcttctgttagccaaattccattcaatttgatcttagacatacaatttcttcttctatgggaattagccatcctatggaagaagcccgtatttttgtcaccttccctcaaccacacttttcttgatttttgtctccaagaaatctcctccataagagcccatttcttaaaatcctcttttgcttcctttctagcttccaactcctccatcgataaagaacgcaacttctccttagagtctcagaaagccactatgtctagagccaaactcttattcacccccaccttcccaaaaacatccttgttccaagtctttaaaatggccttcaaagcctttaatttctctgcaaggataaagctaaaggatccgctgaaactgaaaccttgccaccaccctttaaaatggccttcatggccttcatattccatggagaataattctagtttaatggttaatctgcctttatcaggtgattagttttgggggattcctgaattgtcatgatcatattcttatttggcctgtctaaggttctccaagtccttatttactcttttgttggttcttagtagtacgggtagatatgttcatgttatatgtggaccttcatatgtctgcttatgattttgggacttaattgaattctctgtctcttttcttttcctctgcctctctcacaggttcagacagtgttgctgaagtcataattaccgtc

SEQ ID NO: 11837 - DNA, 1220 bp, Vitis vinifera
  Intron number 3 from transcript GSVIVT01037302001 (locus G SVIVG01037302001) derived from phytozome v7.0 (chr-ID chr6 ; pos 16136578 to 16137797)
cggccttgacaatcctgcagatattgatcttgtcagtttctgaacctttcttttctttttgcatgtggttgatgctgctcatactgaagctacaaaagggaacttatgaggctgtgatatttttcttgtcttcttattgtgtctctgtttggtgacaatgctggtatttgaattttagctctcaattaaagcatctcctttttctatgtaatcctcttgttagcataccatgttcaattgaaagaggtatatatagacacacactaatacgataagtgtataaatgcttgcaataaatccgaaaagaatgaaaaaaaaccaaagtcagtccacaaccaacagttagaaattaatctgtgatgtcatataaacaacaattgtataattctaagaacctattctgtttatctcaaacgtctaagatcttggtggacaaataaaaggctaagaaacaagctcaagataagcattcctcctaaacatgcaaatcaagtttcacactaactcaaatgccagcatggttgatctacatgcaaaaatagcaaaactgtcttttgttatttatgggttaataactagtgcacaaaaggcaggcaatctaaccatgtaaatgatcctccaaagatcccaatggcataaagtcatagacaagcagacgttggtccccatcagcgcaataaccaatcaagttaacaaggtttgggtgatgtaagagcctaagcatgagaacctccaccaagaattctctatttccttgaaggccatttcggtcaagttgtttcacatcaactacctgcaaatacaataattcattgaaccaaaaatcattaatgaccagataagacacagtgaccagtgtctatcggtcgagtccataggacaaccggttgttctgtaataaattatggtgagataagcatagcattggttatggttttgcaactaatcaagatatatatacaaacagatgtataaagtatctcgtcgtagtttattatttattaactagcaataactctagttatgtaatttatcagcatcttgtttacattttttcaaggcagtagctcaagtaaaatgcacataacaaaaaatatcatgagtagttgggtattagtttttgtttaagatatttggattccagaaaggaaaaaaaaatctatatatggagtgaatgcaatagtacaaaaaatccacatataataatttcatacaagaaa

SEQ ID NO: 11838 - DNA, 8546 bp, Vitis vinifera
  Intron number 3 from transcript GSVIVT01016299001 (locus G SVIVG01016299001) derived from phytozome v7.0 (chr-ID chr1 3; pos 5378152 to 5386697 reverse strand)
gagtctgaggtaccaacttattgtgaggcaaaatttagttaacccatttgttactcatggctgcagggttgaagtaactagattcatgagtcctagtttggatacttacaaacctagaactgatataattggatcacaagggcaagacgtttcaccattttatatctttataactcctgattatcggataagatgctattgagtcaaaacctaattcacaacttcttataggtaggcatgcagagtagatacaaaatgtatgtgttgaatataatgtatttatagtgtacaatctttttttcctttcttaatataggtcacatatatggtagttagttcaacctagccttgtatatatatttctctattgtaagaagttaatcatatgaatgagaattaaggtttcctctctctctctttcaacatggtatcaaagccaagggagagaactttattctttctggtttacccgtgtaattaattccgggaatctgtccagtgaccgtgtttcattccggtcaccttttccatctcccaaagctttccggtcagccatatcgtggtcagaaaaccctcatcaccgtcaacatttttctggcgatattttccggagactttttttctggcgatattttccgacaccgaccacatcatcaggagcgcaaagaggagatctgcaacttttctgaaagcactgaagccaaaaactaattcacgcgcctcccacgcgccgtttttatctggcagcctgaatcccacgcgccggcgtgcgagggcgcgtggcccactttctggtgccgagcttctaccaacaggctcgtccggcgctgtcttgcacttctaagcctctatcagtcctctccgaaccctacttctccatttttttggtatttcagcctccaacggccttcaacggcagctcctttccttggccgagacctgtgtgtgccttgggaaggcctcttcttcatctctagtcacttttctcctttgtttgggtcccgacataccaggttcttctccacagctgtcatccgacctctctttagggctcttttcgatccaaacatgattcaatctcaggtgaagtggatatggcgactagaaatcctatttttacatccgtcatctctagatctcctactatcacatcggaaaaattgattggtagtgagaattatctctcctggtcagcgtccgtggaactctggtttatgggacaaggttatgaggatcatcttgttacacctgaggatgctatacctgatgttgacaaagtccaatggaagaaaatcgatgcacaattatgcagcgtattatgacaatctgttgatcccaaaattttacatcatcttcgtgtctacaaaacctgctttaaattttggactcaggctaaaggattatacacgaatgatattcaacgattttataaggtggttttttatattgttcatgtgagacagcaggacatggatctgtctacttatattggccggattgcgtctcttaaggaggagttcttaactttgatgtccttcactagtgctaaagctcaacaaatacagattgacaagttctttatggtgttaaccctcattggcctccgtctagatcttgagtctgtccgagatcagattcttgctagtccatcagtaccatcattggatgatgtgttcgctcgtctcttacgcctctcctctactcagaccttgtcgattgatggtccttcagattcatctgtgttagcctctcaaactaactctcgaggaggacgtagtggcaatcggggtcgaggacaacgtcttcagtgcacctattgtaataagcttggtcacactcgagatcgttgctatcagttgcatggacggcctccttgcactgcccacattgctcagtcatctgatcctctgctatctcgacctgactccgctgcgagcttcacatctcagagtatcacccttgctggtagtgattatgatgcctatctccgatatcaggcagccacatcaacttatgttgcttctgttgcccagaccggtaatgtctctatctgctttacttagtctccttctcttggcccatggatttcagattctggagcatctgatcatatctctggtaatagatacattttcttctctattactactacctctgccttacctactgttactttagctaatggttcccaaactatgactaaaggtattggtttggctcatcctctcccttccgtatctcatcattctgtcttttatgcccctgagtatccttttaatcttatttccatcagcaaaataactcgcactcttaactgttctatcactttttctgataaatctgtgatcttgcaggactggagtacggggaagacgattggcatagggcgtgagtcttacggcctctatcacctcacatcatcttcatctcctgcaacttgcatttccattgatgctcctcttctcattcacagtcgtctgggtcatcctagtctcttcatattccagaagatggtccctcgtttttccactttgtcgtcgcttgcatgtgagtcgtgtcggcttggaaaacatactcgtgtctcgttcccaaagcgtttgaataatcgagcaaagtctcattttgaacttgtccacactgatgtttggggtccgtgtcggaccgcgtctactttaggatttcagtattttgtcactttcattgatgactattcaagatgtacttggttatttttaatgaaaaatcgagctgagttgttctctattttccagaaattttatgctgaaatccaaacacaattcaatgtttatattcgagtgttacgcagtgacaatgctcgagaatatttttctacaccctttacttcttttatgtcccaacatgggatcctccatcagtcatcttgtgctcatactccttaacaaaatggggttgctaaacgtaaaaatcgacatcttgttgagacaactcgtaccctccttctccatagtcatgttcattttcgtttttggggggatcttcttacagcttgttacttgattaatcgtatgccctcatctatattacataaccaaatccctcattcccttccttttcctacccaacctctttattttcttcctcctcgtgtctttggttgtacttgttttgttcatactctcacacctggacaggacaagctctctgccaaggctacgaaatgcatcttcttaggatactctcgacttcagaaggactatcgttgttattccctgacactcatcgttattttctctccgctaatgtcaccttctttgaggactctccattcttctcatcctctaaatctcttcccatttctgaagtattgccacttccctatatatcccccccttcagatgcgctctctcgtcttcttcaggtttatcatcgtcgacatcgtgctgttgctcctcccctctcttcagctgaggtacctaatgactcacctcctgtcccaccgatttctcctacctcgaccctgtcatctactgaccatttgcctattactcttcggaaaggtaatcgatctactcgtaatcctcatcctatttataattttttgagccaccatcgattgtcttcatcctattctgcctttgtctctactttatcctctgtttctcttcctaagagcagtagtgcgacactttctcatcttgggtggcgacatgcaatagttgatgaaatggctgctctgcactctaatggcacatgggatcttgtttctttacctcctgataaatctacagttggatgtcgttgggtctacactgttaaagttggtcctgatggtcaggttgatcgccttaaggcccacttggttgctaaaggttatactcagatttatggttgtgactatgatgacaccttctctcctgttgccaagattgcttctgttcgcttatttctctccatggcagctatgtgtcattggcctctttatcagttggatattaagaatgctttccttcatggtgaacttctcgaggaagtgtatatggagcaaccacctggttttgttgctcagggggagtctggtttagtgtgcaagttacgccgctctctatatggcttgaaacagtctcctcgagcatggtttggacgttttagttttgttgttcaagagtttggaatgctttggagtgaagcagatcattcagttttctatcatcataactcttcgagccagtacatctatttggtagtttatgtggatgacattgtcattacaggtagtgatcaggagggtatccaaagactaaagcaacaccttttcaaccactttcaaaccaaagacttgggcaaactcaagtactttctgggacttgaaatagctcaatccagttcaggtgtggttatgtcataaaggaagtatgccttagacatcttggaagaaacaggtatgttagaatgtaaacctgttgacactcctatgaatccaaatgtcaaacttgtaccaggacagggggagcctctaagagatcttgggagatatcgacgacttgtaggcaaattgaattacctcaccatcactcggccaaacatctcttttcctgtgagtgtggttagtcaattttacagtcaccatgtgacaaccattgggatgctgtgatccgcattcttcgatatattaaaggaacaccaggccaaggtatgttgtatgaagacaggggccatacccaaattgttggttacacaaatgcaaactgggctggttcaccctcagataggcgttccaccttagggtattgtgtttttattggaggtaacttaatatcttgaaagagtaagaaacaagatgtagtggtcagatcaagcgccgaagctgagtatcgagctatggctttggcaacatgtgaactcatacggttgaggcaactccttcaggaattgagatttggaaaagatgaacaaataaagctagtatgtgacaatcaggccgcattacatattgcatcaaatccagtctttcatgaaaggaccaaacatattgaagttgattgtcacttcattagagagaagatcgcattagggtgtgttgctacaagttttcttaattcaatggatcaactagcaaccatcttcactaaatctctcagaggtcctaggattaaatacatttgtaacaagcttggtgcatataacatatatgctctagcttgagggggagcgttgaatatattgtatttatagtgtacaatctttctttcctttcttaatataggtcacatatattgtagttagttcaacctagccttgtatatatatttctctattgtaagaagttaatcatatgaatgagaattaaggttttctctctctctctttcaacagtatgagatagttaactcagtgttagctgttatgtgataatatgatcatgttgagaagtgtttgatttgcgcacttgctgccatttgtcaatgaggcagaagaaagaatataatatacatgtcctagttcagaactgaaataaagtctaggtaataaatcagcaagacctatctattagattttatatctcccagatctgtaatttcctatattggatctatattaggacatggattcgcatgagacccttggattgcctttttggtgtgcttaatgattcatgcccagctggtgtatgccctgttgattggtgttcaatcaactggtgtgctttgatttcagtcctcagatgggagtaatcaacaaaatttataaacctatttcaccatatactaaggtagcattagttagcatagcatagtggctctaggatcgtccacaaggatgagttttcaaattacaactgatattagttcaaaaactgaattgatgttttttcttttcaagattagctttaaaagaaaacataagtatgtgtgaaaggttggttttaagtgaaacaaaaaataaagtaactgaaattactttaaaaaaaaaatgcttcttggagttttagatcactaggctcaggttccttatacaaaaagaaagattctggtcacttggatcttttctttgcattagggatttaacaaatagttatttctcgaaccggtgtggtacagatgcttccccttaatggtttcaaacactaaatccctgtcactggatcatcttgcaatggttcatacctctcacccggtattggccattcaaggtgatccttaaccttggattacccgtcaaaagctcgcaagagataactaatggatgtctcctgggagtccaaaagcttaccaagtgttggctattctagataaatctacctataaaccacctcccagaggctcgcaagagataaactagtggatctcaatgaacgaagtccacttgccttaccaagtgttggcccagctgattttaagggatattaagttaactaaaaagataaaaaccattaacgggtcacactttctcttcattaaaaactgaaacaacgaaactttcacttttgtatccggaaccttacctagcttccttcactccgagaaacaaaaagcctagccactcatcctctaggaaaacatcctcagagtttgatttgctagaaataaaaataaaagagaaaacaaaatgagaaggtaaggcagagcagagctttgtgtattactttctgaaaaactatacaaaagttcgtctctgagaaaaactccccagcgatctttttttaaaagaaaattacaatagatattatatagagaagctattcacccctcctgctaacttcccaaccaagaaaacttgtcattagtgggttacaaggagaaaatagggatttacacacaaatatctgaagataaatatcaagcggagtcagtgcgcaaatatctcagattacaggtggatttcgcaagttcaaacgcaacttgcgaaaatttcgcaagttgaaattgtccatttcgcaagttgaaattgtggttttgcaagttgcgaaattgtcctgcaactaatcagctctctgtcctgcagcaattcctttcctcttcctatttcgcaagttgcgaaaatttcgcaagttggattccacaacttgcgaaattgctggatggttgatttcttatgtgattttcttccttgcatcctcgtttggctttggcaaagggttatgaagctccaaagcttagtttcttcatgaatttgagcttcaacttgctttgccatgaactatacaaagatctccctcattcttggattgctttggtgataaaaaagctatgaaaaacaccaaaacttaacacaattttattagaaacgattgcaagggtccttaacatgccaattaagttaaaaggtaataactactagtcaaaagtgtttaaaagagttaattacaagctataaaatagcacattttgagtagtaatcacttaataattcaataaattactctttaatttaattggattaaatatgctctattctgaatgtggatcgtttctatggttactccttaaacagtgaggttctttctacacgctggagctcctttcttcatttaataaatgttatttacaacttgtaatgaactctttggctctacccatgaattatagaataataggtattttacaatgagctctacctatatagtaacagtatttaattatgaatgttagctaggtactggaccctgtttagtccattcttgcaagagtgggaacttaatatttctgctgattttccccacttgatgaataccctttgccaatggggagttgcttatgatcttaaatttaggtgattgtatttgcagtgatggaaaccataaaatcatatacaatatacactttagggggatatgatagatctctttattttcagatcgtgaatgagttggttatattaatgaaaagaactcagatttttttcttagaaactagaataatgagttggttatattcattcctaaactctatgcttagtctggaccttcaacacgactaggatgggaaggaaaagacaggaggaatctcggtttctcttatctggttgctatgaaaattgaaaattattaaggaaaatgaaatatattataaattatttgaaagcttgtacatttttactcttaatctctattcaaaaagtgaataaagtaggacaaagaatgaagaaaaattttattgagttcaaacttactcttcattttccttcattttttctttcttcactctttttcttttctgtatccttttcttcctagtttctgacatcaaaatggagcctgggctttcaccatatatttgatccaagcacatcatggtcctctgagttccctgaactcatttatgcacttcattttttatgtcttctgacccttctcattggcagtaacttgtggggttgagccttagccagttgtatctgatgtcttcctctagacatacagaacacttggtgaagcaccccagtctatgcaatttagattctggattctccttgattatagtactactgcaaagtggatgtatagcagttttcattttgttaattatatgtcgcatatatctgttatttccatgcaggctgtcata

SEQ ID NO: 11839 - DNA, 5758 bp, Vitis vinifera
  Intron number 5 from transcript GSVIVT01013276001 (locus G SVIVG01013276001) derived from phytozome v7.0 (chr-ID chr2 ; pos 5760313 to 5766070)
ttgctcttaaaaagcagtaagttaacatctgttagaaattatccgtggttcatgcaaagaagcagagtagtctcatgcattttcactggttctatttagttgtttgggaccctgtttccacaatttatcgattgtttctcttgggttacgttttctggttttcttaatatttcttattgttagagctgagacatggcatgtgactgaaaattgatggccaatgctttattttctatttttaagttgctgaaaaaatgttgtttgagttcttgtccttttggtagtcttatctaattcacctgctgaaaccttctagaatgtctttcctgcatctctagattttatcagtttccattttaatcaatgaattattattattatttgtttataactaattatattgattcaaaactttattggttctttcttatttggttaagggagaggatttttttgttttttccattgttgtatgggcccttttgtaagggggtaagttcctttattctgtaattcggtgggtctctattttagcacctctttgcaatacaattatatacttattgataaaaaaatcttgtaaaaagaatttacaacctgtttggcaatgctttcaaaaacttcttaaaaacagctcgcaattgttctaagaacaaaattcttcttagaaacttattctttatatgaaaaaaaaaaaggtttgctcaactttttctttatgaaagtattatgcacttatatgtaaagtaaaagttctcaaattattttttatatttttaattttctcagaatactctacaaaagaacacttgaaaaatactttaaatttgttttaaaaaacaacctattttcagaacaaagtctaataaaattggttttcagttaaaaaattgccatacctgttttttgaattagaaaacagttttccattctaaggaccagaaaaaaaaaaaaaaattttttgttcatgtcttgaagaatcttttccttagtaaaccttttttgtgagtaaagttgtacatagaggaaggctcaatgttttaataaattttgttgattggttgagttcttgctaaaggagggagtttttcttgactctttagcacttattgtgtacttcctgtgtactttggtgctctttttttttttacacatgtttatatattgttaattttgcctataaaggaaaggaagaaaaaaaacgttggaaaacagacccttactctttcaggttgttggacagaagctcagtcataggagaccatggttgtcaattaaataataataagagaggacatcgggagcttttgattgtttatactttatattcatataatgttagggtgatgataggggttattttgatttgaggttcctcaatgaagggtgttatcttggtctaatcttttttcaaggagcttgttttgtctttggcctaatcttaagactcctagcttgagctatgagaggctcttgtgtgccaccctttttttttttttttgaatgagaagctttataggaaaagattgttagtaatgaccaagttatgctttgaggttgtgagttgtgatttatgctttaagaatactgagttagttaatcagaacctccttcactatggatcttggtattctctctatttgatgtttcatgaattttatatttttcatgtgttaatactatgtttcttagcttggcagctttgggggaaagagaggagattttggaggatggttccactttgccctttttattgtattggaaaggaaagagatatacatgtgtttgagatagcggaactgttgggcttcaaattgagaggatatttttctgaagtcctaatttttgtgatctattaactcttttggcaatgatgttttttttaatttgaatttattgagagtttagggattgcccagggagtcaggcttggtttcttcttatcttttatgtgttcttccttctttaatgtaggtgtttctcatatccttcctatgcactaagatttgcccccttattgttggacagtgttttcaaatgtgttattgatgtgcacctcaaggcttgctctgacatgaagtgttctcccaaaacatgtcgaggcacaaccaaaagtgctaggctcccaaaaggcgttcacttatggagttggggtgtatgtgaagtgcatttttggatgcctttactgccttagagaggcaagtgatcgaattaaaaaaaaaagaaaacctaaaaatataagaggattgggtttgaggggggaaaacctaactcagtagctctcagtggggtgctatgtcagcatctacaacctctcatatgcggcatcatcaatgtcctatgctctcattgacagctccttctgttttggtttctccttttctccatcttgttgacctcctcttctccctttctttcattcccatgccacagtcacttctccagtttctctttgcatttttattttattttttaatttgagaggccactccacaaaatcaactcacttgccttgcacaccaagttttaggtttttttccaatttatctatttagcttttaacagtccaatcctctcaactctccactcctcttccctactttttatttttatttttattttttcatatatcaacttgaggtcatattttttacctcttatagatcacctttttttcatttaaatcttagactctactgatgctcttttatgccacactcaccttttttttcttctccctaaaattgagattttatttattttgtttgttttatttggattattagttatttatttatgttgaaaaactcactttgggctacacacaggatttccaaatgacattcgatgggaaagagacttaacaggcctgattctagggctttgtagagagacttaacggagaacttcccacatttagtctctatccaaagcaccctatcttccacatcccgctgaacgctcttcccatttgaggcctaataaaaacctgtgcacctcatccacctcccaatcattgaaaggtctagagaaatgtgagctccaactcccttctcccttagtgaaactccaaacatctttcacccaaatgtccttggaagcagttagagcaaataaagtaagaaaagaaacacaaaaaactgaatcgccacactatgtgtccttccaaaatttcaccctttgtccattacccaccacaaaagagagtctactacttacgacatgccactccctcctaattgctttccacaaccccacaccatacacatccctcacttccttggagcaccaacccccttgcttctccccatactttccccttatcacttgattccaaaaggcccctctctcatttgcaaacccccaactccatttgcataaaaatgtcttattaagagtagaaagacacttcgccccaatccccattttcttttgtctaagcaaacaaatacctattttactagaaaaggtttccgctcaagagccccacatttgatggtccttggtaaagaaagcacatacatgaaataaatgggcaagctagccaaagtgctccgaattaaggtgatcctccttcctttggagatgtattgtctcttccacattgccaatctctttctaaacttctcctccactccatcctgggcagccatggacttaaaaggagcacccaacgacaatcccaaatatgaggaaggaagactcctgaccttgcaaccaagttctgtagccattgcctccgcgtttgggattaactcatttttatcaaaattaattctcaacctcgaaatgccctcaaaccacattagtgtccaacttaaatacatcatctgatcttgagaagccccatagaactaccatccacaaaggtattttgggccttagaaatcaccttacccaccatcagctttaactaattggctagcactttagttagccacctatacaacccttccaccaaactaattggctcgaaatcccttaaatcttctgctccccctttttttggaatcaaaactagaaaggttgcattcaaacttctaacaaagcaattatggtcacaaaactccttgaaaaaccccatgacccccttcttcacaaatccctaagaaaactgccatggtaaaaccatcaggcccagacgctttgtccccactaaagcccttaagagcctcgaaaacctcatgctaaaaaaaaggctcctctagcctagccttttcaacaacctccaaacttgcaaaagacaagccactaatgctgggcctccaccctcatgtagcaaacaacataaacttaaactcattcaccactccttctttgatctcattttcctttgttaatcaagtaccactgattttaaccagagccatcatattcctcattctgtgagcattaaccatcttgtggaaaaatctagtatttctatctccctcttttagccacacttcccttgatttctgcttccaagaaatttatgttaggagaactcactttttaaaatcctcctttgctcctctcctagcttactcatgaacaacaagtggccaaactacctttactttgtcccaaagttccacttgattcaaagccaacgctttattaacttcaactttaccaaagacattcctgttccagtctctcagtaatgacttcaaggctttcagcttcacagccaaaacaaaactagtagacccactaaaattgagaccctcccaccaagcctgcaacttatccttgaagcctttctccttcaaccacatattttcgaaatttaaaaggcattgggtctctcctcacgcctcctctatccaacaaaattggagaatggtcagaaaccggtttagggaggacgcattgaacgacccttgtaaagtgaccttcccaattctctgagaccaaaaaacgatcgagcctagaattagactgattatttagaccacctctccacatgtaaggacctccctgtagaggtaggtcccttagctctaaatccttgataatctcagagaatctcctcattgaagaggttaatctgcctcccttgctgcactccacagggagtctaaccacattataattgcctgccacacaccaagggccaccccatagacttctaacaacacctagctcaccctagaaaccttccctctccttcttcattgtaggaccataaacccctgtaaaattccagcaaaagtcatcatcacagttcttaaatcggcacgagactgagaaaatccccacttccacatccaacaattgtaacaccctattgtccaaaaacaccaacacaccattggaggctcccctcgagtgaacaacccccccatgatcaatatataccctattatcaatatatatttcgtttttgataaagatttttttttttgtacataattttgttgtttctccaaaatttactttcattttgacatccccactattttggtgaaataccttagtcttaaattatgacctagtcatatatgattccattagttgaaaattttagtctttattaatttaagatttttgttcaatttacggaataaatcaagaaaatgattcattgttgatcctttatagttttcatgttttcattctgaatatatatttgaacttcaaagcttgttcgattatgtgcatagagttgcagatttaattttatttagatgttttatactgattcttaattatatcatgctgttgattcctttcctgggcttatttttatattgttttggatggtgatatagat

SEQ ID NO: 11840 - DNA, 3555 bp, Vitis vinifera
  Intron number 4 from transcript GSVIVT01016363001 (locus G SVIVG01016363001) derived from phytozome v7.0 (chr-ID chr1 3; pos 4479752 to 4483306 reverse strand)
gcgtaaggcttgagttcaccatgtttccagttaacgttctggaggtgcttagcggagacgacggtgaggtcgatgtccagaggacgagatgatgccataggttggttctaacgtgcgctgcttggggaacagtgtaagggataggccaatgacggacactgttgtcaacgtaatatgacactttgcacttggctgatcacacattcataatagaggtagaagcgagcctttacgttgtgtttctggctttggtcaaaatagttttgccttcgtcgagcatcatttttatattatttgtgacatttgtccactcacctttaatgcttaacatgctgctccgccgtttaggctttgaaacacaaacggtttactttaaccaactgaaagcagtattggcatcattgacatgttttggcacaattgttgcatttaattttggggtgcaacttttacaggttggcccaacctgatccgagctcaacatgatgtttgaatgaaattgggtaaatattttcattatttggattgagattgagttaaattttctcaatcccagcttaatttaggttgggctcgaggttccaacaacattttgatatttatgtaatatttataatgtttattattctatatgataatatttattttcttttcaaatttttaaaaaaatatcatattagaattatatcatatttttttatatttttttaattatataagttaattttacttttatatcatgcatttttttttataaaaaaaaaagatatggaaatttattttcatttttgtattatcgtcttgaacctcttgtgttatttattatttaaattttattataaatataaaaaataaaaataaaaactattatgtgtggattttaaatcatacaatctaattaagttaagggtaactcgatcaacttgagtttaacccaatcaacccaaatctaattcgatcgagtttaacttgaattttaaaaaatgaaattggattgagtagctcgaattagaggtcaagttaaattgagtttgagttaattgcattttaattcgaattggacttggatcgatcatcaatttaatcaacttatccagttgcaactctaattccattagaataacaatttggatcataaccttttcactaagataaatgcaaggagggttaagtgccttctttattttaagaactttcacatagatgatatcaaacttcaatagtttaacatcaaccataactattcaacacgatgtaggaaaaacaaactttattcatgaatcataacaaacaagaacctctaaattgaatttatatgatttgattgcaatgcttaagttaataagtttttaattacaaagtatgaaatagatgcaaatgaagaaaaaaatattaaaagtaccttgttcaaaagggttaatcatttgtattttttttttaaatacatattctcttttgtacatatattgacgcgttatctaaaatccataaaatccacatacctaattttcaataaccctcaagcttggctgtattgatatgacaattatttaaaatcattatatataatttgtggactttattagtttccaaagggtcatcctcactgaaaacaataggcacatattgaagtgggcactcgagtaaccacgataaagacgacaaccaagcatcctagtttgatagctacacaaaccatccatgaagaaaataactcgaaatcaatcgtgttaatgcaaacacgatttcattccaaatcctgaataatattttccagttatatattagattaatgaaaacacaacacatgaaaagttgtttagctatatataagggaaggttctaaaacagggcaagcaatgacaatgcaccaacacccatgaacattattaatatgacatttgagaagtatatgctattgaattattccttttggaggtacgttatatctactttgctactagtacatcttcttttgatcatggcgctctagagtcgttacgagtcttatcaatgagaaattacaataagctcatacctctctaaattttttctatatcattttcccacctcttatcaaattcaaacaccaaagcatttatttgtataaaagttttccatgacaattctataagcacaaagatgagtataattttgagtgctccagggttggtgcaatttttatttttggttctgttttatttgacctttatatctcgccaccggctccacccaatcctagtcggttcgagccctcattggtcgatgccgatgaaaacgaacttccgagcaattctctcattccgaaccactccgaattgccagtcaatgagaacgctcaaaggtacatttttcctcattggtcctttgatttgaaaaacggagttgtttctagtcataacatcatttttaacgtactctgtgtagtggaaagatttacagtttttttttttgagggtttcatcgtttgaatttcgaaatttccgaatcgtaaaatttatttgctgaatcgtggaagattcacaatccaggttgactatcggccagatcaaagtgggcaagggacgatgcagcagacgcctcaggttttgttttgttctattggagtttccgtttccatttccattgcgatcacttttaaattcttgtatatcgtgcattggctgtactagaaatgtcttttttcttttcttttcttggttttcttgctctcgattgttttttttcgtgtttattgttttcattttgttttattttgtgtgtgtgttttggtttggttgatcgatgatcagaggaaaagacaggaaaatttggaatcttacgattaccatttcatttttaactcgtgatgtgattccaagtttcctgtatttttctcctggtttctacataacacgcagaccgtttatgacatctctcatagtactgggaattggtggatgttttcttttgcattttagcaaggtttttgttggtttacttgaaggtaagaaatcaaagtaatcaataaagaatatgagttccaatttatttaagtacacaatgaagaatatgagtttcaatctttgacttgcaaatgtagttccgagatccttctattttgaggcagaatatcaagagggtgattttgggcctttattcgaatccttaatcgcaattacatattttatccaacaaaaaagtgagaaaaaagcagaatattattattactcattaatcatgtttcgctgctgtgtctctggctccatggtagaagttttgctctatatgggagattcaggatgcatttctttagatactcctagctaataaaaggaaggggtggttattatggaaaaacttatttcccatgacccatctatggttgatgaataactttacctgattaaatattgttctaggtatttaggcttggcaaattatgaaaggaaattctttcataatgaatttgaactctaaattcaattagattattaaagaatataatgaacctgagcacagtggtcatatgacaaaaaagggtgtataaaagtctagaagttaaaggagaaacac

SEQ ID NO: 11841 - DNA, 5413 bp, Vitis vinifera
  Intron number 6 from transcript GSVIVT01029985001 (locus G SVIVG01029985001) derived from phytozome v7.0 (chr-ID chr8 ; pos 2744238 to 2749650)
ttggttttgactcagtcaccagcactgctgaggaggtatgagtttcagataatagaccagttttatggaaatgagaatagagtcaaacagcaacctcctatcttaattttcaaataatctgtttttttttttttttactaagaaaagtgcaatgttatggaaaagtatgatgagcaagatattttcttgatttccatattttatagtcagacctgactgattagcttttataggattaatttatctgttctgtacgttactactggcataatgaataccacctttgccttctatatgagtaaaaagaaaaaatactacctaggaccatgccaagtaggtagtaccatccaacttcactgtaggagattagcagtctaaggtaatcactgatgctgttttcccggatgtttatttgaatattatcatagtgccagtcctagatgttctagcagtgtgaaatttttattttttataatatacaaaatggtacccacttacatggaattctgtgagtttgtccggtacaggggtatctgtgttgggttcatcgtggtgttctcctagatattttcttcaatatataatgtgcctagtctttgacatactattacattgaaatttgcatttccaatatccaaaatagtacccaactatatcccatggacttgagtaaggagtatctgtgctggatttttctattctctaaatattaagaagcagcagcatgaattttataagttttgtctaataaccaacttttcttctttaatatcttagtgcaaaatgaagttagtgagtgtgagatattcacatcatccattcataattattcatctactagaggaacgtctatacacacacatacacacatataatgatgatgaagaataattcatatatttctggatgaattagtacatgatctatattggacttctctattctgaaagggaaaataattacctagcagtacaattcctaaagttcagggatcaatctctaagaatcagggattagattggtcaaattattgtaaaggggaaaaaaaattacaacatcagaaattagcctaaattaaatacaaaatatacagttcattcctaactttgaattctgttaacttttcaacactcccctttaagttggagaatagatattatccaatctcaacttgttagtgattgcttgaaatgggtgattagccaatcccttaagtaggatatcagcaagtcgccctcttgttgaaacatatggagtgcaagtcaacccattatctagtttctctttcatcaaatgtctatctccacgtgtttagtatgatcatgttgaaacgaattgtgagccattatggcggatttgttatgatagtataacttcattgttctttcccatcttattccaagattatcaaaaatgattttttactaaagcagcttggaaatccctatgccattgctctaaattttgcccctgcacttgatttggcaacaactaattgcttcttaccttttcaaataactagatttcctcctaaaaaagtacaataacctgatgttgacctttgatctatcactgatcctccctagtctacttttgtataagcttttaagtttagttcttcgttcttaaaagagaattcctttttctgatgtagctttcatatagtgagaactctatatgctgcttttagatgtgcttccctgggagagagcatgaattgacccactacacttatggcatgggctatgtctggttgtgcatacaagtagatttacttcccaactaaatgttgatacttcccttgatctaccactattggtttagatgaatcacctagcctatgattttgttcaattggcacttcacatggcttgcatcctagcatccctgttttttttttaaggagatcaagagtgtacttctattgtcacacaaaaataccatttcttgtgtgtgcaacttcaattccttgaaaatacattaattttcttaggtcttttatcttgaactccttggccaactgctatttaagctattttatatcctccaaatcatcactcgtgacaatgataccatcaacataaactattagagcaatgacctttttggaataagagcatttgataaagagagtgtggtctgcttgattttgccaaaattccacctctattatagccttggtgaaccttctaaaccaagctttgggagattgtctaagtccatacaatgtcttcttaagtttgcatacatggttagttgtaaaccgtttgttaaaccctagtggagcatccatatacaccttctctaaatcaccatgtaggaatgcgtttttgacatcaaattgttggaacatgtaataacggttagttgccaatgattatacaattctaacaatattcattttttccattggtgcaaaagtctcttggtaatccactttgaaaggtgaatctcaataatggactacacctagagggggggtgaataggtgttgttgaactataaaaaaatttcctaccaaagattacctaactttagaatttctcgatgtcaataaacttttcttccaacaacttttcaacaaagcataaaatccataagccagtatgtatgcaccaacactctcccaacaatttataaatgcaattcgcatgcaaatgcttcaacactcctcaaaattaattcataagagcaattctctccttaactcatttccaattactacaagatatcattaaccaaaatgaacaaaaaatttattcaagatatccaatggataatcacacctatttcaacttatttttcttctattcaacatatatgcccaagtaaccaatgatatcaaaaattgaaaataaatcaaatagtggagaatgagagaaagagacaatgacaccaaattttaatctggaaaacctctgaagagatcaaaaaccataggcctacaacctatcgaaaacatccactatgaagaacaaaaactgaatacaaagttttacctaactcaagtctaccaatccttctgagaccacttgactagtactttccactttcagcttctccccttcttcttctggaggacacttggagtccacaccaagctcaatctcgacctcttcttgaatccacacaaaaagaaattgagtttttacccaaacccaaatggattagaaattgagagatgaatgaaggaaggaatcaacccatttttttctcaagaaaatctattgaaaacaggttggaaaacaataggaaagttggattttcttggcaatcaaacaccccaaaataggaaaggagaggagaaccaaagggaatggttgcgttgtgtgtctctctctacagcacaggaagcaaggtttgggtttttaaatgaaggaagtccttgatccaaaagatgagatttcatcaaagaggtgtaagttggattgatccaacctaaagttggatcgattctagaatagggtattttgaatacttaaaaaaaaaaaatgcttcctaaaccttcctaactccataaaaaaaacttcaagaaaaaaaacaacatttaaatacaatggttgattcaaattcatccaactccaacctcaactacaaaccttggtcttttgacaaattcaacgaattgatctccattagccaagtagttggtagaaggattggaaaaattgagttaggagacacttaggaatttttgtccagaattgccaacctagctaaaaacccacacacttgataagtttgggcattgcccttggcaaccaatctagccttatacctttctaaagccctataagccctatactttatagtaaagactcatttacatctcattagttttctttaggaagttacacaatctcccatgttttgctttttttcttaagttttcatttcttcactcatggcttttctccaattctcatccctaaagttatgtttggttctcaaaaaatttgagggaaatagtgaaggaaagaaaatagagaggaaacgtagaaggaaagaaaataaaaaataggtttaaagtcaataaattatttttatatacttctttggactcattttacttatttccctctattgtataaagattaaataattttaaaatatataaattttaaactaattttaatcatatttgatttccttttttatttttcatagcgaaaccaaatatgagaaaatcattttctttagcattttttttctttccttactacttttcggaaaccaaatgtagcctaagtgcctcttggactgtttatgggatttcaatgggatttagttgtgtgaagaaggctcagtgtgatggtgacagttcatcaaatgaaaaaaattagagataggatgttgggtacactttctagttcttttcttaagggcaatgggtgagagtaaatcttcaacaattagagatggtgtagatgatgacaatgaaggtaaggttgaagttttagtacctgttacatgattggattcttggactcgcatgggttcaagtatgggtagtttccgccttgagtgaacctatagtagtgggggtgactaaagggtcaactttctcttcaatttcactatcggactttgaaatggaaggtataggtgagtcggaattggccagttgagagttggtgcactgttgtttctcaaaccaataacaaatccaaaaagaaacaaactgctatagtaatagcagtttggttgatcccatagagaatcagggtttacctattcaattgcttgtcttaaatggattaattattgtcaaaaacaattaacctaatttgaaatcaaacttaaactgaattaatgatgaatagaaggaataaaagataataaaaacatccacagatgggatgctcctaagtttatgattgacctactttctatcatgaactctccaggtagaggcacagttgaactgattggacactgcgtagaacacttttctgatcttatctgcagttcaatttctggaagactaattatataataattaattttaaaatatttttttttctcattcagttaatggcttaactgaggttcaaagaaaaaaaaaattgctgacagtatgaatttctctaggaaatttcatgccttgagtcactcgttttatggtatcatgcaaaggatttgtttgcagtcagagtctcagaaaatctctgttatcatgccaagaatttgttccaacattagaatcctctgtgtgtgtgtgtgcatccgcatgtgtatgtctatgtggtttgcctaggtcacctaactcttatatgtcatgtgataaaatgtcctacatacttgagttgctggactactcttttagaacttttatgccttaccatcatgttttattttttatttttattttcatgcaggtaaagaatcctcaaaaagatttgccacttggcat

SEQ ID NO: 11842 - DNA, 8805 bp, Vitis vinifera
  Intron number 8 from transcript GSVIVT01026766001 (locus G SVIVG01026766001) derived from phytozome v7.0 (chr-ID chr1 5; pos 6685818 to 6694622)
tggtcttgcaactcattttgtcccttcaacagtatacttcttgtctcaccatgcctgtcgtatactatgccttagttttagtgctcaaaaatcaaataaaacccaataccactctctagtgaggaataatactggttggaaattgtgaccagtgtgagtgtgcttttgttggaatgaagacactagagatggatatcattgttgtttgaagtttttcccatgcctgtctaattagtgcaaaatagggatgtagctagtcaacttgggtttttttagaggggagagttttagggtctatttagcaatgatttttaaaacagttctcaaaaaatgttttttgagaacaattcataaaaacatgtctcaattgtttttaggaacaaaattttgtttggaaactcaaatatgaaaaattgttttcttgagttattctacatggtaccatacactacaatgcaaaagttcgtaaaatattctctacttttttaattgttgcttataacactttataagaagcaattgaaaacacctctaatttgttctaaaaaacaatatgatgatcaaaaaaaaaaaaaaaaacgtgttctttgagttagaaagctatttatgttctgaagatccaaaatatttttcaagagcagtttccaaacaaacttaagttttttatgcaacttaaactactctttaccgtgttctatttcttttctaatgctatgcattgaaggagaacaatcgaagtctacaatctctcatagtgatgcaatcttcaattttgagttacatcatttgaagaaataatacatccatgaaggtttatgaacctttttgtatatatgtgtctctctgtgtgcgtacgcttgtgtggtaggtaataagcaatatataaaggacttttaaaggggtgtaacttacattgatcataggctacaagtaacaccaaagaaaagaaaagaagaaatggcagccataggtcttaagcctcttccaaagcgtcaatgagatccataaaagacaatatcctccccatggtagaattcactaaccaataaaatagagatttaatttaagaaactatccttcactttcaggtctagtagcattggcattcaaagggtgtgtgatttctctctctccaaagttaccaagttaactcaagtagagcattctacaaaacaacaatctcttcttcacaaatcaaccattctctgcaatccacacgtccttcctcttcttcactaatgttgatgccaactggcaagattttctttaagaaaatgaggcataacttacaaccccaaataggacaagcaataaagaaagggaattgttccaagaacatgaataaaaaaatagctaatagactcctttcttttcttgcacctagaaaaccatattcttgataatcctcccccttttgattagctacttattagttaagcaagttgcctaagaagggtggagtagtacaatttccaatttatgttgatgataaaatgttattatgatctttagaaagttcactacattgggggtctattgaaaaacaaaccttagttaatttcctaatcattcttccctacccatgccacacaatatgaaggaatccaccatttccaactctcaatcgtgaaatctaacgaaccacaacttctaatgccctttacgctccatggtctaataatttgtgattgtggcttttgtgttaacctctaaataagttttgatatctttcattaagctagttttaacatttatgtagcccatttcatatcaaaatccttgttgattcccaaaattattccactatatcattttgaatttcaacagaactttccaatattcccattcctctcccttgagcacattgctcctctttaacaaattttccctatcactacttctttctcttctctctctctctctaagtatgtgtgtgtgtgtgtgtgtgtgtgtgtatgtagatatgtaatctgtaatttttatgagaaaccatacttgaattcatagtaagaaaaagatatacaggaaagatgaaagattctttatattcatgcatagggaaactagaaaaactagaaagagaaaagagctccttataaaagaaatttatgcttcccacacctaaaaggcaaaggtgaggatggaataccaaactcaaggagacatgaagtcttcaagaaattctacaaaagggacctcccttattaaccagttttttggctctagatttattgacctaggtttctaagcgactgaacaattaaacctctagggaagtccaatatcctcagcccagttcatatctccatggtcctctccattcttttgctatcatgaatcttctcattttcaaacaatgttgtatggctaatatccgaggtcaagcacaacaggatgcacctaagcttagctttaaattaaaccacaaatcctactgttgaaatggaaatacccacatgaataccaaggttgatttcagctaaataaatcagtggataagaatatttgtctatttttcatgtaaatcatattcataggaatataagctgaaacatctcttgattttggtctcaaccatttataaagaagtaaaaaatccttccctgaaaggagaacttgatttagtaattctttccataaagcatcaatgcaaatgaaaaacatctcctagataagctttggtattagacagtccttctaatagaagagatatatgatgataagcttgtgcttgtttggagggatcataaaaattaattaaagtgtgtcatttatggtacataaaatattaaattaaagccactcctgtataagggtcttggtattgtaatgtagagagtcaaccgttttgagtcccacaattgcatattctattgcaagaaattgctccttgttagctccataactcaactacattattggcgaacattaggtgtgaaatggtttttcttagcccagccttaaaactgtgaagaaaaccaagttccaccactcagtcaatgaaataattaagaccttaaccaaaacaagtggataggggtacgggaaacctttgccttggattaatgaacctttagaagaaacctatggggttaccattacgaacatcaaggcctggtttggattagcttttgggaagctaaaaaccctctttttaattttattatttttgtgtgtgagtgtgtgtgagtgtgtgtgtttatgttgttaagtccaacgaaagcttctagatgtttttgggtaatataagtataagagtttattagttaaaaaagagcttactcgggaagtaggacaatattacttctcgtggaagcttttttttgcttatgaaggaagtagtttcatgtttaatgaaactatggaaaaagttgattttcattgatgatcaataattgagattacatagggatgtatacaaagttggatgtatattctagtaaactatataatctgtctaggcataattcttgggtcaatgacaatctatatatttacaagatcactaccatttagggtagattacatacaaggaaagatacaaaatcatagagaatgtgatctcctaagattaaggagatttccaatgacagaattttaacagaaacatttatatgatcaaggttgctcctttaaaatcttagctttagcttcaactttcaacaaaaagcaaaagtaagaagctatcccaaacaaggttgaagaatctaacattaaagatgtaagttttatccaaatagacaatttcttgctgaaactcattctcttaagaaaataaataaagaagtgtcaattaacataatcatagacttaaaaaactactttcttgatcaccctctagaatctattagctaaaatcttggttaggcagagaagctccttgcctcatatcttggatttgcctttgggagtgttcataagtcttgtgcaagtattgaacttagtaaaggaaatatttgaaaggagatggacctaatggaagaagcaatagttgtctaagagggagagattaacccttataaagattgccatgtccctatttgcaatacctaggaaagtggggattagattagaaaaaattagagagactttttgtagggaaatcatttagagagaaggaaaatgtgtatagtaaggtagtttttatagtttgcaaagataaatggtttggacatttgggaattaagaggttggatgttcaaaatcgatgttcattagggaaatgatggtggagatatggtcttgagtttgatagtctatggaggaagtgtagggtatcccggatctttccattacctatcccagaattaggttaggtgcatgaaaacttacctagggcatccaaaccctagcaacggaagcaaagatacaaattttaacaataaaggatccggatttatggtttcaaaaacattactgaatatttggatattcctaaatcaattcctttcgataacaattaatcctgtagcctccaaaaatcttgtaaacctaagatattctgcctaatggctcttccctagttacttagcactcaaacagcggggggaggttagggttctctctctctaggtggtggaagaagacaaaagcttaaaaccttaacccctaaggaggtatttataggtttgctactaggcttaaatgacttaagtcccaagggcttggattattaaaattaagctaaaaaatggtctaaacaaattaattaattagcgcaatctagagatgtcattcactaaccctgtgcaaccttgcgaaattaccaaaacctcattatgcacataagtgaaccaagagttgatctaacccttataaattgtgttaacaaggtatatgagctcaagcggggaccactatagagaatcaactacactctagtactctatgtaaataacaatgagaaactaagtgtttggatccgtgacttattatcccttgtatgcaatctccctatgaagtggtgtctgtagtctaataagttgaaaattattagcctctcaagactgcctctactatccttgagtttagatcctcttattatttgatcaattgacatatcttagcttataaagagcttatgtcaagttccacttaaggaactattatgaccatagttgacatgaacacacctcattaggatcacccatgagaatactttgtctcgatctcatgagatatcatagtgcctttattgagaatacctattgttaccatcttccatcaacaatgactcaattcataggaaatatatgatcactttagcatcttacctctaggtcaaagtcactgctaactttggcacaaactcaatattctcttacagttgagaaacaacataatgtagcaacttggtgaagttatgacttcttgatagtgttatgtcattttactgtaggtcatgtccaatgtataaccatacacactagtgcacttaccataagaaatccatcctgatggttaagacaagtcattcttgcaattagaaggtagtgcactacaacctctaatgggttgcctaaccccacaaagtggctataaacaattcatctatttgcaagggacccatgacttggatcttccgtgcaactcctactgtacccaagtcatgtacaatgcaaaagatgcatgtcagaatgcttataaagtacaatgcatggaataagaatagataaaagtgaaactggaactttattaataaataataaactccgaattttgttacattatgtcatacttttaagagctttatcctaacaggaagatcatccaaggaaaatttgggaagatgggtgggcagttgagtattctaagggtgagatagacttttggagtgagttatgaatagacattgaaacaagatgggaagaatatagtttctggattaccattcagataaaaaaaatggaatgagaaccaaattcggttttgatagatgggtgggtgaaagtcctttaaaaggggctttcctttgcatttcatattatcctatgtcaagaatgctacaaatcttttagatgtgtgtaatagtggagaccaatggtcttcatagttcaaaaggcaccgtaagggtgcaagaataaggatggacaacttactttggaaagagaatggaaagggaagtttccaagtaagtcttattacaatattttatatgctaacattaatgaattgttccctaccaaagaaatttagaggtcatgtgctcctttaaggacctggttttttttttttttctttttttggctgaaaaaaacatagggggagattgtaacaatagatattctcatgaggaaaggataaatgataataaatagatgcaacctctataatagtgaagcatagaaatcacatctaatccattatgaaagacaaaatggttgcagaattttcaattagcaatattaaattaagtgtttccatcctaatggatgggatgccaacatttcagttaggtggtcacacagatgaccctagaaggctattgcacaagtgttttaggacttttccatgcatcttcgctttgtggtggggaatggggagagaatccatttttgggaagatttatggtggggagatcaacctttgtgtacacaatttttgagtctttatagagttgtctcaatgagaaacctttccatctcagtcgtccttgggaattcttatctggtttcttgtaattttaactttcgatgcaatctcattgactcaaatattgtacttctcgaaagactcatgtcttcacttaccttattgcacttgtctctttttagtgaagattcaagagcttggtacttatcttcttttggtttattctcagtaagatctcttttcatagtcttgtccaagtccttaaatccaatcccttccttctggctaattttgtttggaaatcaaaagccccttcaaagttcaaggcctttgcttggttagtgccgcataagaaggtaaataccatcaatatgttgcaagtgagaagaccatacaaatctctaagtcctcattggtgcattcttagcaaaaggagtgaagaatcagttgaccacttgttcttacattgcccaataatgttggggccttggcttaagctctttgcgatagctcatttggattgggttctccctcagagtattggagatatgatggttatttcatttagagggttggggaactcaattagaggcaagactctttggcatatctcatgccttactgtattgtggattgtgtggcaagagcaaaacactaggattttttaggataagtacaaaacaaaagtgatgttgtggaatcttattcacttttacttctccttgtgggcctcttgtattgtcgcctttagaggaattccacttagtgttattcaaccaagttggtcattagtttgtaattcaaaaggggtggataatgattaagagtttgtttttggtttcttgtgatattttgtacatgtcttcatctgtatttaccattgtatagtggaggagtataatcttactttgatcaggttttgtatttttaggaaggacctctcatccttatcatgaactttataattatcaatatattttctgttgatcaaaaaaaaaaaaaaaaaaaaaaaggtaggtgtttctagagtcactaaaaaaccttctaatgtggaagattagggacttggataagaggcaaagtaaggtttggtgctcagctcctctttgcttgtttggtgcatgtggagagaacataatagaaaatttttcaatgaagatttgtcaaatcaaagattgaaggtgatcttcattaagtccctattcaagtgttcttgtgcttcattgggaatggggaatgacacatagttgggccactacctaacaatttaagcttttaggaaagttgatagtagcttaacatggtatgaaagccttgtttagcggggatgcatgagttagaatctcatagcatgtttgttttccccaatttattaagctcacatgcaagtttgaagaaggtagccaatgagacgaggtgttagggtaaggcccaaatgagtttgatatgtattgttagccaattatctaatagtttaagctttgaagaaaattggtggcttaacatccttaattatggatacttaggtctttatgatgattatattgtctagaagtttcttgttttttctttcttttcttagtatcctttgtacaccacttgtgtgcataggttgctcaattttttgttagggtttaatatattctctgtttgcctattagctaataacttgtagctcaccttggcaaacttaaggatctaaactcctaaaaatttttatccactgcttgtcttatagattagcacaataaggtttgattcagaacttttctctaaagtcccttagcctaaggttgcttaacccttgacttcaaaggtagctgtctaaaaaaatttcagcaatcacttgcctgaaattccagcaaccagtaacctttgactccttgccttaaatcataacatttaatttccatcttcaacctaaaccataatctttacttggcccatcaatagagagattatagatagcactgtttagggtttaagtgttatcttgcatcataattattctttatatttaatattgtgtgccataatagcaaaaaacaaatgcatggttactattgaggaacaacatagtgccccttttccttgcatattaaactgtctcatatttgaccttgttggaattttccattcacattctgtttttaattttcccctcttaatcaatggatagaggttattgttgttagaagcagcactgtgcaagtt

SEQ ID NO: 11843 - DNA, 2928 bp, Vitis vinifera
  Intron number 4 from transcript GSVIVT01036114001 (locus G SVIVG01036114001) derived from phytozome v7.0 (chr-ID chr6 ; pos 20547159 to 20550086)
aggaggaaaaggctgctgaaaatatctacattaaggtgactgccaaaattccttcagtacatttccttctggtttttcaggattttgaagtttggtcactggtttttgtcaaatttcttggttctatagctccttttcaaattgggatttgtcacagagaagtgacaaactgtgacaaatcattttggttaatgatccaggaaagcagtggccttgaacacacaaattatgttatttatgaggcagagatttgcacttttacttaatcctcagagaatttccatggttttccttttggtttttcattgactacaattagttgtcatttttagcttgttgcttgtgggaatagattgtccatgttttgtcaggtgttttgagtgaaatggtcatagatctgcacattgttttattttaaagatgttttattaattttttttgaaacgaatacctgaattttaatgtctctcataagtagagaagcatatttcattatgattacatgctcttgttgtggttttaataactcttgtatgttgaagtagccttttcctttcttatttctcttttaaataaatactattttttgggctcccaattcatgaaattatggaaaagcattttcaccttgtttgatacttaaagctgatttttagatgttatgatatattataattcaacatttaacattttagaatttgggtgttttgtttctgtaattttattggttacacgtgctttgagcatgttttcttggcatcatgcaatttgttaaaacatttcttcactaaatgttgtgtaaacattttaactgcaaagtataaagttaattgccaaaaaagatattattgaagtttatattagaaactcaaatataagtttaataacttgagtcttcgttggagatgcttatccgaatgcatgacattgatgtatggttgatgacattccacttcaagttggtataaagtgctttttacatctgccacaacatgcatggtcacatgcaagagttgcatgtgacactcagatgactgaacgctagcttcatttttgtctctcttgagagctttgccttaccggaaaaaggtgtgagatatatccctctaatatttctaatttttttggaaagttttggagattgctcgcttgtgcttgttctagaccttacagttgaaccaagcaatcaaatctcattttatgtctatttttttgggaatgggttagagtcattcactgtctatggaaggttttatagatcgattgaacttcaaataaggagagagggtttgtttttttgtttactctttccttggttagcccttaggcacctattgtatacatcgtgttaactttggtgcttctcctcttaggtgcttttaatatttatttttttattgcctataagaaatccctctaattttccatacatttttagaaggggaaaaaaataccctaaagaagtcttggtgcacaagaattatgaaattgcaccccccttaagttgtatttggattctaaacttaaatttcttaaactaattccaacatgttctaattttagtctatgccaatctcatggctaagcacttgcttttgaaagattataaagattgccctggtgcaacaatttattgacccacaatatcaagtgatagtatgtggagaccaccaaatacaaacacagtcaatggtaattattaaaaatggggattatacataagttggtttgcatttgatttttgcaaatccaggtttaagacattgttgtaatgaaaaaagtttgtattttctgtgttcgcactttcagtatttttacacatgaatgataatttaatgcatatgtgcgtgttaaagaatgtgtattctttgtatatatatcaaagaggaccatgacaaataaacctgaagcctagttggtactcatgtatttctttgaaattaatttttttatcttcagactgcatgtatgagaattgatttggtactattatcaaaggttgttattattttgtgactcatgattcttgtgaaaatgtgatgacaactgtaagatgcaaaagtaaatatgaaatgtaaaacttattgctcatgaggacaggccctccctaggaattctagctatatgtttcaaatctttcccaaatatgagctgtgggaaacaaatcttagcacatctgcgtggacaggaaatagattcatgaccaagtgatgcgcaacagaagtgtccaaaaaatgcatggaactaaagagaagttttgatgtgaaaatgacatcaaagttcgggtgagacaactaccttttaaggggcgtaatgtgatacttgagccatcaataaacaaaaattttagtaaaagaaattatttgagtcaaaaacatatcagcaaagttgttacctcaaatattacctttgttgtgctaatctgatcaaatattgtattcctgcttttgaagtaggatctgactgcggatcaatatctatttggtctttgtaagtagtaaatctggaattaaccgcaatagatgttcttctttttgtctgaataatagtaaggagtaaatgggaaagactgaacttattggtgaaactatatttgcagtagtattattagattctgtgtgaattacatagtatgtatgttgaccttctcacctgacagtaaactacacactgaacatgataaatttaaccacaaagccagatttgaattagtgattctctctctcaatggtgtcagcagtgcactaaccaatcgagttacgaactttcaaaattttctgtgtcacctgtcttgagttgaatgtgtctttgctatgtagtatcttcattttttattctatttcatttgccataatgatgttacaattgtattaacttagttgtatcactgcagaaagctgagcaagagaaattagagaagcttgcacg

SEQ ID NO: 11844 - DNA, 5420 bp, Vitis vinifera
  Intron number 4 from transcript GSVIVT01013340001 (locus G SVIVG01013340001) derived from phytozome v7.0 (chr-ID chr1 2; pos 12356775 to 12362194)
gacacattgggcaagcttacaaaactacgtttcctgtatgaatacacatccttcaggaactttcttcaatcattaaattttcttaccttctagttaatttagcttccttcatatttctttttgtgtctactaattaaaaggattgctcacaataagctagtttagcgctgataattcagatgcttgtacttagggcaattgtgtttaaaaaatatcttttgggtttgttctctgcttcatctaatcatgatggtaaaaaatttgatacacgtgtatttaattttaagaaatgcattagcatacattattgatcatattgagtctaatatagtatatttctattttgatagaaatgcatagctctttatttccattgtgtttgagacatcatattgcatttttactattttgatttcttaagtacaaatttaatcttcatttatttatactatcttaggggaagggtcttctctgttcacttttataccttacaactaactttttgcattaaattgtaatatggcataggtgtaaacttaaacagaaattattagtaggttgtttagttcccattcctcctttccttctctataggaggtgtaactctcttttgtacatgcaggacatacattcttctagttgtattttatgacagagaaaatattacaaattgataggtctagtttattgtatttattccttccctttttcaaccaatccatacaaccatttggagagtaaacatctattttggacaacctagtgtagtccaagagtcaattgtttggataattgctgattggtccccttagaactcattaccactgatgggggaaaaccttttaaagtctattcaataaggaaaaggaagacctaagtaaactttaagtaggattaatattaattagaattgaattaggattagtatttgttggagtcaaattaggattagctagttaaattataacataattagagtttaagtcttgatagattattagagtcctagtagactttggattttataattagaattagagttataataaattattagagtcctagtagactttgaatttcttagagaagcctaaaaataggttaatcaatgtaaagcaaatggatgaattgattgatattaataatattatgttttcttcattgcaagtgttgaaatcctcaatgttgagactccataaatttttcttctaggtgaggtcctagagggccttagtgagactctaaggttttcattttttcttcctcgttcttctttctctctattttttttttctttaccataaaatttattcatagttcctctttttatactctaaaatcaaaaccctagcccacctacttttgagtgtaggcaaccatcttagggttgtcctacattggttttggtattagagtaaaagttcttggcttgaaggcatatgcaattgaggagatgagcaacttatgcaagcatgagttccaaaaaaacttctaacaatcaagatgccgtacaacaatcccatcaagatgctataatataattaaatagaaaacttgatgagatcatgaagttattagaaaagagtaaagaaaaaagaccaattgaagatgagattagaagtcatcaatttagacaattgccaagtcgatcacccgaagaacaagacaattttatgatggggaatcaaagaaggggcaaactctttgagcaagatgatggtatgacaaaaaaggtacaccttgaagttactgaattttatggaaaattaaatccaacgacttttcttgattggattgtgttgatggaagattactttgattgatatgcaatgctcgaaaatagaaaagtttgttttatgaaggcaaagttgaaagaagcaacatgtctatggtgggataatactaagaatcaacttcatagaattggccaaccacctatagacacatgggaagagatgaagttgaagatgaaggagcactttctcccaactgattatgaacaacttatgtacacaaaattgttttcccttaaacaagatacttagtccgttgaattaatacagataaattccatgaattgagcatttgaaatccagttcgggaaagtgatgctcaacttgcagcccgttataaagttggactttgaatgaagattcaacttgagatgatagctacacacacttatacaatagacgatgtttatcaactagcccttaaaatagaagaagggcccaagtttcaagcttccagacatccaaattcacaaattgggagcactttctccaactggacaacaagtaaacctttaggcaccacaaatttccaaacttctaaccatgtgaatagtgaaggcaataataaacaagcctcacatgtgcctactagagatgctaataagggtaaaacttcaatgaacattgaagacaaaaaggtaactatgactcctttatgctttaagtgtggtaggcatggtcattatgctgttgtgtgcccaaccaaaggtttacacttttgtgtttaagaaccagaatctgaattggagggttacccaaaggaagaataaacccacaatgaaaatgaacttagtgaataatgtgactactatgatggtatgacagaaggacatagtcttgcaatacgacctttattagttgtctcaaaggtaaaaggagaagaagattggtgacatactagcattttccagacaagtatttcttgccaagggagattatgcaccatgatcattgatggaggtagtagtttgaacatagctttgcaagaacttgttgaaaagctaaaccttaaaatagagatgcttccaaatccatttcgagtaacatgggttaatgacacctctattttggtaagtttttgctacttagtaacattcctttttggtaaggactttgaatagtctgtatggtgtgaggtcttaccaataaaagtaagtcatattttacttggaataccttggcttttttatagaagagtttaacatgatggttgcaaaaatacatgtactctcatacacaatgggcttaagaagatcctttgtccaatgaaagaagccccaccaattaagaagtcaaaggacgcacaaccaaaaagggtgcttattatgcgttaatttgaaaagatacgagaaaaaatcaaaatcagcaatgagaactataaggagacaatagatgcgcatcaaagttatattcactttcaagaaggtgatctagtaatggttcatctacgtctagaaagatttcatccggacacatatcaaaagcttcaagctaagaaaatgggtctatttcgggtactaaagcgattgggtgagaatgcatatttgttagaattcacttcagacttgcattttagtccaatatctaatgttgaagatttgtttatttaccatggccatcaaaatgaggtaagtggagaattggatctttaattaccacctactcttagcccatgtcttgagattgagtatgttcttaatgatcaacgtgtgtctacttaacaaggtgtatggtgtgaggtcttacgaataaaagtaagtcatattttacttggaataccttggcttttttatagaagagtttaacatgatggtttgcaaaaatacatgtactctcatacacaatgggcttaaaaagatcctttgtccaatgaaagaagccgcaccaattaagaagtcaaaggacgcacaaccaaaaagggtgcttattatgcgttaatttgaaaagatatgagaaaaaatcaaaatcagcaatgagaactataaggagacaatagatgtgcatcaaagttatattcactttcaagaaggtgatctagtaatggttcatctacgtctagaaagatttcatctggacacatatcaaaagcttcaagctaagaaaatgggtctatttcgggtactaaagcgattgggtgagaatgcatatttgttagaactcacttcagacttgcattttagtccaatatctaatgttgaagatttgtttatttaccatggccatcaaaatgaggtaagtggagaattggatcttcaattaccacctactcttagcccatgtcttgagatcgagtatgttcttaatgatcaacgtgtgtccactcaacaaggtggataccaagaatttttggtgaaatggtgaggcaaaccatgttctgaaaatacacggattatgacaatagattttcaaaagcttaaccccgatctctattaattttatcaaacatctaactcgttagagtcgagttctttcaagatggggggaattgatggtgaaaaaccttttaaaatctattcaaggaggaaaaggaagacctaagtaaactttaagtaggattaatattaattagaattgaattaggattagtatttgttggagtcaaattaggattagctagttaagtcataatataattagaatttgagtcatgataggttattagagtcctagtagactttggatgttataattagaattagagttataataggttattagagtcctagtaaactttggatttcttagagaagcctataaatagtctaatcaatgcaaatcaaagggatgaattgattgatattaattatattatgttttattcattgcaagtgttgcaattctcaatggtgagactccattaatttttcttctagataagattcctaaaagtccttagtgggactctaaggtttccatttcttcttcctcatttcttatttctctctatttattttattttatttatttttttgccataaaatttattccttgttcctccccttatactctaaaaccaaaaccctagcccacctacttttgagtgtaggcaaccatcctagggttgtcctacatcaaccattgtgcaaagagttttgtttagtttctttgttgtgcaagtatatgttgattgtgttaaagaatatgatatatatatatattgtggacccaaatcctacaagcttaagcttttaggaaacttggttatctaacatagtattagagcctcatttggtgggaggtcatgtgttcgagcgtcattacatttttctttccccaatttattgaatccacatgtattaagtctacatgcaaggtcaaaagaggttaattgtggttgtttgccttcaggtctttatgtgtgcatgatctcgtgtttgagcctcatcacacttttatttccccaatttgttgggcccacatgtaagtccaaaagaggctctttgcctacatgagagagggtgttaaaaacatgatatacattgtggacctaaatgctacaataaaattggttgtctaatagattatatgtctttgctttgtttgttgtttgcttttcaatgattattatgaaacctaacagtgtttattttgtaaactgtctgcatggaaataggcggcttaacaaca

SEQ ID NO: 11845 - DNA, 20106 bp, Vitis vinifera
  Intron number 16 from transcript GSVIVT01035168001 (locus GSVIVG01035168001) derived from phytozome v7.0 (chr-ID chr 11; pos 12510928 to 12531033 reverse strand)
gtttcccaagtaagtctaaatggttttgaatcaattttttttggatacgaaatgttctttccactgtatggtaaaacattaaatgtaaatgtataggtatgaataggtgttttacttggttagtttccctaagccacctactttatatcccttaatttgtttggtagtggaaatgatcatctgtttaagtttgaccaagttgaccttgaatactcctaccatgttctcctgattgaactctatacacagcaaagtaaaatgaatttctattgtcctgtagggtacttgttgtcaaagtcatattagaaattatattagtcttaacatagtagaaaatttgacttaacgttgtccattggaggaggcatctatgtagggaatatctcctctactaatatagtagatgtactaaccgtgttccaatctagtagtatcatgctcaaaggggtgcccacaaatggagcactagctaatgtccaaagtgaagagaaatatattacatcttatattctcctaaagtgctctgttgtcctaaaaaactcattgtcctctccctccatatagtctaaattactatgagaataacaataccccatagtgacttccctttaggaagacctccaaaaccctgagaagcaatggttatcatctccaccacactccttggtggaacccagtcaatccttgcaaatccaaacaacttactccataatgtcaatgctactaagaaatagaaaaagagatgatccattgattcttcactcttctcacattacacaccatgttgacctaagggcttttgcaatgtcattagtattaaccttcatatttgccaccaatcatgcgaaggtcttgactttgagttggactttagatttccaaatgtaatttgcaagaggaaaggatctaaagctagtagaaaaagaaaaggctttagagaacaaactgacggataatagacacaatgatgtcaatgaccaaccctcaaatctaggacagtggatgataggtacacattggttaaagtcaacatcaagatagtagttcctcaattttgtgatcgaaaaggttatgttagaaattggaatttcaagacgagggagaagatgagatcaaagctgaagatacattagaatttcttaatctcaccattctataaagccttcaaatttaacacaaaagcgttggttaccccatccaatatcttcctaaaaccaaattttagtatcatcacccactaaatagcaagtgaaacatgagaagagagggacaccttgagtagtggccttccaaggacatcaatgagatcatctaatattcatattagcatctcatccattagaatttagtccacagatacttaagataatcttgtgccataaagcattacactcccttaggaacctccattgccacttacttaagagtgtcctattcctcaagcctatctacactatacctagaaccccttcactctttggtttacacccttaatcctaacccacaagataatttaagctttcttcttgtctccaatgcaaaaacacaaaaaatttctttacaacttctcaattttgttggctgctttggttgatgttaaaaatatacctcccccactccctccaaataaataaatgaagaataagggaatgtgggcaagcacgattaaactagggttattctaacacctagggatagtaagcttttttctaactatctaagtgatgtaatattctatccataactagatctcataaagattcaactctagaattcctaccttaccccaaagaaagacccagataagataaaaggtcaattgcaatgtttacattcattctaaagtggcaaccaaatcaagaagtcggtcttggttcactttgatttctagtagggtactcttgtctagatttatctgtagtcttgatatgtatctacaaaaaaataaaaaaataaaaaaagacaaaaaaaggactttagatttcataactcatttagataggctcttgaaaagaaaatgatgtcaccggcaaacaatagatgggtcacccttgttcccctattgcccactaagaatctctcaaagataccacattgctctactttgagcatcaatttatttcgcacatcttcataatggtaaagagaaaaggacaaagcaaatcacattgtcttgaaccccttcaagcctgaacccatcctttagcacacgcttttattagcattgcaaaacttacagatgatgaacaaccacaaatctaagatagtcatatttgtctagcaccttttctttctaaagcataatctagaaactcccaatccacatgataataagccattaatccacaggatctagaaactattggagattttttcagataattgagattatctaaatcagttgaagaggtttgaattaattcaaattatccaaacaactttggatatttgagttcatttgaattattttaaatttgttttatccatagagtagttagagattaattcaaattaatctcctagtttttaggatgtttctggtttcctaaaataaaggacttaggtagtacctaagtttataaattagtttgtaatttagttcaataatagattagagcagatgaggagatcatctcagccatttaatctacttgcaggtctttgtttaacgacgggagagagcgagagagagagagtgggatggagaggagggagaaaatagctcggcatctcgcagaagaaggaaggagagcagcttcacagtggagtccaaggcgttcgacatcgttgtagatgaacggaaaggaaaaccctaagttctcatcgtggagaagaagggagggatttcgtcatgggtccgactgggaccggaaagcttagggtttttcatagaaggcctaacccaatgcatcaaggacgagaaagaagtaagatggggaaggaaatggaaggaaaatgggagattgtattccatgacgcgagggataaacagagcgggggggtttatccggctaggggttattgatctggaaaggaagagtttttgcatcttcatcttgagaggcagaggggacaaaaggggatgggtgattatggcagagaagcttcatcaactggtaggagtttttggtagaaaatcaaataaccaggaagcaagggccgtggggaagtctgtcgtggaaagctcatatgcgacagtagtgaagagaccaatttagggaaatacaaactcaatcgcagtgaaggttaaaagggaggaaacactaggaaatctacaaaaattggaacattgcgttgtggcgggttggaaagccagtacagagggagaagaagatctcgaaagtttgggaagattatgggcaaagtcttggggtctaagaggaaatttaaggttggctaagttggaaaaggatagattcttgttggaatttgaagatctggaagaagcaaaacgcatcgtatcctcagggaattgctcgatgggaggattccaggtagggctggagcattggaaccctaggaatggttgctgggtagaggcggatgtaggaaatgaagtctgggtgagaatcgttgggcttccaatctcgttatggagtccgatgattttgaaaagagtgggggaagaatgcggtggttttgttgcagttgatgaccagacaaagacgatgggtgagatccagtgggctagaatcttggtcaatcgagaggagacgtcaggccgagtgtactggaaatcgaagtggaggaggatgtctatgctctgtcactgtggtgggagtgtcgaccagtgttgaggaaaaagttcagcgaagaggctggacaaaagagcgacaaggttaagggtgatgttgcttcacgctcggagcagcacgtggaggaggagcgggtaagcgtgaggtttgagacgctgaacttgtcagatgaagagatgggtgagcaggggggcgggtcgggccgggtgacggtaaactgagctcaaaacccgacaatccgggattgggcctcaaccggtgagttattgtctgggtcgtcttccttaggcccaatcgtgggcccaaaagaggcgaggagggttggtgggtttggcctggctaatggatctttgggcttaaaaccgaaaggagtggcaactagagaggatggaccaagagtaggcccatcgtcaaggaggtgggctgtcatgcctcaagcaaaggcccagtcacgtcaaaagaacaagccttaagcaaaggcccaattatttcaatgggctgccaaaagctgattgaattagaaggaaaggtaagggctagcccagtctcgccagcagcccaagcctcgagcgatgactctcaggagaagggctatatgttggagcgcaccatttccagaaatgggaattcctcatagatagagccctttatcgcatgggagtcagaggagctaaggaagcaacaaacttttgctagttattcagtgacagatagggcgcttgaagaggaagccttgaggtatgggtcggggttttgttcaaggggagaaagggttttgggggcttctcatcttaatccttttcattttgatcgggctccgaagggggagttttacgatcgttctggggatatagaggaggaaattcgggttgataaaacaatgtggttaacagtgtatgagggatacaatgagaaggttagtggctgcagggatttgggagtaaccaagagaagcaatgataaaatcagggggacagagggggcctttggcacacctgaaagacaagctgtgagaaatgagcctgaggaaaaatgggaggagagtagtttggaaaaattcagtcatttcttgggattcccgacggagagattgaagaaggaaattctgagttttttgattaaaatcagaaagagatgggagaagatacatagtaaagagcttctagaaaagtcaaagttcgaaagggagttaaagagattggagtgttctataaattatgagggggggaataagcagaaaggctcggtacagggcaaagggagctaaattgtggttgtccaatgaagctaaaagtcatgagctggaacgtgaggggagcaaacgatagctccaaaagaaaaattattaaggcttttataagaaacaagagggtggatttactttgtattcaggagacaaaagttcaatctatgtcggagggtattgtgagaagtttaggctctgggagatttttagattggaaagctctaaatgcggaaggggcttcgggaggaattctaatttgctgggacaagaggtctttggacattctagattgggaggagggacattttactttatcttacagatttaggaatgtagaaaatggggctgtttgggtgttcacgggagtttatggcattttctccaaagtggaaagggatgaactatgggaagagtttgggccaattagaggcctttgggaagacccctggtgcctagggggggattttaacatcaccttgttccaaagggaaaggagcaatcagaggagaataaactcaacgatgaggagatttgctgagattgtggatgatctagggctggtggatcttcctttacaggggggagagttcacctggaatgggggccacaataaccaagtttgggcaagattggacagatttcttgtgtcccctagctggttagaccaatttagtggggttactcaaagtaggttgccttggccgatttcagatcacttcccaatcattctagtggggggtgggataagacgaggcccaactccatttagattcgaaaatatgtggcttaaggttgagggattcaaagaccttatacatagctggtggtaggggatcgaagttaggggtagcactggctttaaattgtctgctaagatgaaggaaatcaagcagaagttgaaagtttggaatagagaaatttttgggaggctggactgcaacaaatcttcagccctgcaacaagtggatttctgggaccggatggaaagtgagagaagcttgactatggaggaaacaaagttaaaaaaagaagcaaaagaaaattacaaaaagtgggtgcttctggaggaaactcattggagacagctttaaagggagatctggttgagggagggggatagaaacatgggtttcttccatcgtatggcaagtgctcatcgcagaaacaattctttggacagaattaagatcaatggggaatggctttcagaggagcaggaggttagggaaggaattgctaatgcttttcatcagctgctttcagaagatacggggtggaaggcggacattgggaggcttcagcttgatcaaatcaatcagcaagaagtggagaatcttgagagtctttttacagaggatgaagttcatacggctttgatggagatgaatggggataaagcccctggtctgaatggctttttggcaaagttgttgggactttgttaaagaggagatcctagaaatgttcaaggaattccacgagcatagctcattcctcaagagcctcaacaatacttttctggttttgattcccaagaaaagtggggctgaggaccttggagattttagatctattagtcttctgggggggctttataagttattggctaaagtgctagctatcaggcttaagaaagtggttggaaaggtggtctccacttctcagaatgcctttgtgatgggaagacaaattcttgacgcttctttaattgcaaatgaagatagacttgtggcagaaacaaaacgaaaagaaaagggtcttatttgcaaattggacatagaaaaagcttacgacagcatcaattggaaatttttgttgaaggttttgcgaaagatgagctttggctctaagtggttggggtggatgtggagttgcttgtcttcaaccaaattctcagttttggttaatggagtgcctgctggcttcttccctaacactaagggccttagacaaggagatcccctatctccttatctctttgttaagggaatggaagtgctggatgttcttattaggagagccgtggaggggggatttttattagggtgcaatattaggggtgacaccagatcctctttgaacatctcccacttattttttgttgatgacacaattgtgttttgtgaggctagtaaggagcatctaactcacttgagttggattttatactagtttgaagcggcttcaggtctaaggattaacttagccaaaagtgaaattattccagttggagaggtggagaagattgaagagttggctattgagttaggttgcagggtggggtccttaccctctcagtatttgggacttcctctaggggctcctaaaagagctccttatatgtgggatggggtggaagagagagtaaggaggagacttgcgctttggaaacgacaatatatctccaaagggggaagagtcactttaataaaaagtactttggctagcatgccaatctatcaaatgtttattttcagaatgcccaagattgttgctagaaggctagagaaagtgcaaagggacttcctatggggaaggggaaatttggagggaaaattcatctagttaattgggaggtggtttgcacagacaaggaaaagggtgggctaggccttaggaagctagccatgttgaacaaagccttgcttggcaagtggatatggaggtatgcttgtgacaaagacaatctttggaaacaagtgattacggtaaagtatgggcaagagggatggaggccaaagaagactaatggggcggttggagtaggggtttggaaggagatttggaaagaatcagattggtgttgggataccatgatattccgagctgggaagggcaccaagatcagattttggacagatgtttggtgtactgatacagcgctgtcccattgctttcctcatctcttcgtcatagcggttcaaaggagttcaacggttaaggaaatgtgggaccaaaattctggtcaaggaggttggaacctaaatttcttgagggacttcaatgattgggagctagatatggttggggacctgctccatgtgctgaggggtcataggccttctttggaggaagactcatttatttggaggcaaggaagaaatggtcagttcagggttaaggaagcttatagcttgttgaccaatcctaatgatatcggcttccttcaagaagtatttgggtggctagggtgccaactaaagttgccttctttgcttgggaggcgacatgggagaaggtgcttaccttggatagactccaaagaagaggggtgcaacttccgaattattgtgttttgtgtgggtgtgaagaagaaaatgtaaatcatattcttatacattgtatagtggttagggctttgtgggatattgtccttgggttagtagatgttaaatgggtctttccagaaactataaaggaggtcttaattagctggaggggctcctttgtggggaagaaaaggaaaaaggtttgggaattcattccgttgtgtattttttggatgatatggaatgagaggaatagactagcttttaggggggggtgttgaatattcagaagttaaagaatttttttgtttgtaatttttggagttgggccaaattgtatttaggtgaggaggctttctctcttataggcttcctggagtgggtagcatccacttaaggggaggtgattctttttgtctttgttttttgaggccctagccgccttatataccccttgtatgctttgtggctttttgcctctttattaatgcatttctttttacttatcaaaaaaaataaataatagattagagcagtgtttgagtttttcttcctactgcctggaaacatggtatcagagcaggctgtgtaattgaagaaaataccatggtaaaaactgtcatgataggaacaagcaagggtgacgactcaaacgtgtcttcaaaaccttctcaattgacctctacaattgtccccactgctatcgatcactcatcccttcaaataactactcacaagcttaatggaaaaaatttccttcaatggttaagggctactcagatggttatttgcggacgcgggaagataggatatgtccatgacacaataaagaagccaaagaagactgatcctacatttcatatctgggatgccaacaacttaatcattatagcctggctcgtgaactcgatggaagaaaacattggtgaaaattacatgtattactcaactgcaaaggagctttgggatactgtgaatcgtgctttttcagaccttgaaaacttagctcaaatgttcgaactaagagacaaagttcgaaatctgagacaaggtgatatggatgtaatacagtacttcaatattttcaacaaattatgtcaagaaataggtatgtttcatgattgtgtgtggagttttgctaaggatagtgaaagatacaagaaaatagtggataaagaacaaatatttgattttattgcttaacttaacaaggaattggatgaggtttggggactggctacttggaacaaaaccattgccctcaattgatgagatttttgcagaagtgaagagagaagagtattgtaagtgtgtcatgcttggagaataggaaccactgcccacatcagacaacttgtgacatcccacatcagataggagggaaagttcctaacactatatcaatatggactcttcgtaaccttgtagacgcgttttaaagctgtgagggcccctttgggttcaaagtgaacaatatctacacggttgggagtgggtcgttacaaatggtatcagagccgatccctgacctcggtgtggggtttgtttggcctcataagggtgtttgtttatttggctccgcaatctcgtgggacacaacgaggacgttgtgtttgcatggaggggtgtttgtgacatcccacattggatagggggtaaagttcttggcactatataagtatggactcctcgtaaccctgtagacacattttaaagtcgtgaggacccttttgggtccaaagtgaataatatttacatggttgggagcaggttgttacaaatgatactactttgtcacgccccaaaacccactccaagggcatgacggtcatttcacacctcaagcccaaaggttcaaagcggaaacgacacaacattcgtattgtaattggaaatttaccaattaccaaattcctgtttagagtagtaaaataaataaattctatgatccccaattctcaactttaaaaactaacacatcaaccagagttgttattgtccaaataacttcaaattcaaatgatttaaacaagtattaaattttaacatctaaaaaatgtccaaaattaagtttgaaccaaaatcctaacaaagaaaaattccctagcctagccatcactcctcactcgaattgagagtacctgaaaaattatcaacgaaggggcatgaacttcaagctcaataaggaacatcaatatagtttcatagatcaaacatttttaatcatgttttcaaataggggatataatatatacttattttcataaaaacttttgaattcaaaatactaatacattcaaacttttcaacaaaacttttttcgtatccatttcaaaacaatttctcatcaaaactaaatccaatgcattccaaatatctttaatctggttatcaaataacaaatgacgcttagttaagtgggattttacaaatgagtggctagtttcaaatttgttccattaaaggtgaacaaaacgaaaggttaacaattataacccgttgactagggctatataacatcaactattataactcgttgactagggtcatagaaatgtcaataattataatttgttgactagggtcatagaaatcagagtcaaacaatttatttcattaattcaaacttgcaaaacaaaatatcatatctccaaaatttttatttagtcataaacaaataaaatgttgaaacatatttttcatacaaaatttatatttgatccatgtatagaaataaaaaaataacatttttacacatttcaaaatacaatataaaaagaaaattatttccttttataaaatccgcattaatatcccttactttgaaaaagcactcaaaattttgaagtatttatctctgaaaaatttcctcctaacctaacataatatcatacacaatattgattattgattatttatctaaatatataaatttgaaaatcttaaaaatattttatttagtattagggatactaattaatttctcatactaatattattactactcaatattatttttcaacttactaaataataataaattaatttagtgagtttccaaattattgtaaaattcattttcttttctaatcttaccctcactatttatttctttatatacttgaattaaattaaaacctatacaggaaattattattattattaatatttcatttgttagcttaaaactaaatattataatttttattaattttcaaattcaatacataaccaacccattaccctcctatcttcattatatgcacgaagccctaagaataaaacagtaagcctcatgtttcttctcattatttattattataataatatatttacatatacaatcttttccgatgcctaactcaacaccttggcaacaagcgtactccattttattttatttttcaaatctaaagcctacacaaatgatttatttatttattttctaaatctaaaatttcttttcttccattgattcttcattgattttgttttctatttaattgaaattttctaaattttcctattttcatcacaaattaatccacattcataaatttctagtcttttgatttaaaaattaatttaacaaaccctaatttagattgagatcttccaaagaatatctaaagtttttaaaactaattaacgaatataaaatattaatttaaggattaaaatcttacttgaaaaattgatcttcaaaccctaaacctccaaatctttagctctattatctgatttttctgatctctgtgtaaaagggttttctaaataaagaagataggaaaaatctaatttatatatagggattttaaatacgaaaagacctttttacccttattaaattactttaattaattaataatttgtaaattatgattttactcctaaattgggtttgaggcattacatcttcccctccttaacagaagtttagtcctctaaacttgacatacatgagtcttgaaataaatgaaaatgtttttctcttatttcttcatctacttcttaagtgacctctcgaatactaagattacttcactagacctttatcaaccggacaataatagaacatagtatcttttccatctcgcaccgcataggcataaaacccttaataacctttcccaagcaaggaactagcccataaagccaagatcatacacaatggtctaaccacatgttttcccttaaaactaaacttatattggtcaggaatatggaaatcacccttttaccaaaataattaatagagacatagaaggaaactaaccaatccatctcctaaatcacatcaaaatcctaaaggtcaagaagtactaagttacgtaacatctccatataactagtcatcataagacaagctccaaacattatattatccacaatagaatgtcccataggaatagcaacaatcaaatcaaagttttggctaccaacaaacatacccaacagaccaacaaaagatattgaaacaaagagtgtgttgagtttaggtcaatcaaggctctagcaataaagtgtaaattcgaatagtagttgttgccacatcagaagtggcttgagcatcttgatgagtcatagcaaacatccgcccttggactctaggtttctgtttatcctccttattctcctccttaggcttcccaattataaacttcttattctttggacaatctcgaatcatatgtccatgcttcccacaaccaaagcaagctccatactctttatagcaaggtttaccccaatgtttcttactacaaatagaacaagtcacatctaaattttgcagtacttcccctttaatctgactctcagttgaaacaaacctttttggtgcttggttatcatgagcactatcactcctactcctcttcctttgttgctctctgtactgctgaaactctttattatctttttccgctataagggctctatctacaacctttgaatagacactaagcttcaaaatagatattttgttcttcagatagggtttcaattcatcctgaaactttaatgccttttcctcctctgtagcaatcaattatggagcaaaacgtgacaactctgtaaatttagcttcatactgggccaccgtcatatccccctgttccaaacgaacaaactctcctattttttgtcgtctaacactgtcgggaaagtattttttgtaaaatgtctccttaaactgtctccaaactataggtccctgatcctctaaaagccttttggtcatctgccaccaatgatttgcttctttatctaacataaatgctgcacaagaggccttttgctccttagagcaatctataacatcaaagaatttctctatcttaagaatccaagcttctacttctgttggatttgaagtaccagaaaagtaatgagaacctaacttcttaaagtcatcaaatgagctacccctagaagatgagggttgtccaagagcttgagtctcaatagctctagcttgatgctcaaccaaaccagttaaagtctcaagatacctataaagcccttctgcattcctgggaggcaaaccctcaagtggaggaggtacatcattattagcctgactgtttgggaggatgttggtcttcttggtggcatgttgtcctataaagcattaggtataactaaattagtcactagaaaaccaattagacaatttagattcataaggaagaataggaatttatacaagatgaaactgaaacttaaattaatgcgtcactcatccatccccaaagtaaactaaaacatgttcccaacaatatcataacctagtgctctgataccacctgtaacgactcgctcccaaccgtgtagatattgtttgctttggacccaaaggggccctcacggctttaaaatgcgtctacaaggttacgaggagtccatacttatatagcgtcagaaactttcccctttatccaatgtgggatgtcacacaactcagctctagctgttcgtggttcaaactcggcaaacaaaggagattcccatagcaattggagaggaaatcggcaatggtgcgatcattgtcaacgtccccatcatacccgtgacacttgttggaaaatacatggaaaaccaacaaattagaaggagaaagtcaacaaatctgattcaaaaggttatcaaactgcagcaatatcgagccctaagccaaatgatagcaaagttagtgtttcccttactaaggaacaaatggaacaactctacaaattgttgaaaccaacatcattatcaaataattcaagtacatcacgattagctcaaaaaggtacattttcatttgctttgaatggtgttacacaaagacaacaatcatggattattgatttgggtgcaacaaatcaaatgacaaggtgttcaaatttgttttcaacttatacatccaatctcagaaattttaaggttaaaattgcagatggttccccatcaacggttgtaggcatgggtacatcaagctcaggaatgttaaggtttgtaggggataaatgtatacctaaatttggtttagacaagtgaccatgctgaaggttcactaaattctctactccttttgaaatattcctctgtgaataaacacgtaagtcaggctgtagatgcaaatctccccttgtcgttgatgttgaggatttgttgtacagtcatcattggctttggattggaaggctcaagtaagctgattggtggactggaagactcaggtaagctgacttgtggattggacagtgaattcagtggtggttcaggttgtggtatctgcggctttagaatttttggagtttctggccgatttaaggattatggtgatgctggtatacctatggatggtggaacagaaggcagggtaacattccaaaaattttcttcacctaagttctccccctaaagggaatttttggtgtaaaagggctgattttcaaaaaatgtaacatccatagagataatattttcttttttttggataataacatcgatatcccttttgaatggcagaataactgagaaatacacacttaagtgctctaggttccaatttgctacaggtagggtcatgaatgtggataaatgaggtacaaccgaatattttcaatggaagggaggtgaaggtttgtgtatgtgggaaataagattgaaatttttttaaaggtgtttggaattccaaaacttgagaaggcatacggtttatcacataacaggccgtaagaactgcatccccccgaaaggttttaggtacatcggtggtgaacattatggaacaggctacttcaagaagatgacgatttttccgttcagaaatcccattttgttgaggactgcgactataagaactctggtgtatgatcccgttttgttacaaatatttgcccaaaattgtattaaagtattcacctccattatcgatacaaaaaacttgtatttttgagttaaacagattttggaccattagatgaaattttttgaatgtttgttcagtttctgatttgtcaccacaatccttaaatcgaccagaaattcccccttcttgcaggtataccaacatcacagctttctgttccaccttccgcatgtataccagcatcaccgcaatccttaaattgaccagaaactccaaaaattccaaagctgctgacaccacaacctgacccaccaccgaattcactgtccagtccacaaatcagcttacttgagtcttccagtccaccaatcaacttacttgagtcttctagtccacccaagccaatgatgaccatgcacaacaaaccctcaacatcaacgataagggatgatttgcacctacaacctgagttatgtttattcacggaggaatattataaaaggagtaaagaattcagtgaaccttcagcatggtcacttgtctaaaccgaattcaagtatacatttatcccctacaaaccttaatattgatgagcttgatgtacccatagcattgaggaaaggtgtgagaacttgcactcaacacccaatatcaaattttgtctcatatgatcatttatcaatttctcttcgagctctagcaactaatctggtaggtgttgatattccgagaacagtacaagaagctttgaaggaaccaaagtggaaaaaggtagttgaggcaaaatacatgctcttgaaaaaaatgaaatatgggatttggtgaaaaagcccgaaggaaaaattccagtaggttgcaagtgggtattcacagtaaaatacaattcggatggatcgattgaacggtacaaagcaaggctagttgcacaaggattcactcaaacatatggggtagactatcaagagacatttgcacctatagctaagttaaacaccatccgggtctttctttctctagcaacaaacaatgattggcaacttcaacaattagatgtaaagaatgccttccttaatggtgatctagagaaggggtatatatggaattgccaccaggttttgatgtggcaagggaagatggaaaggtttgtaaactgaaaaaatctctttactgactgaagcaatcgccaagagcttggttcaatcgatttactaagacaatcaaacaaatagggtacgaacaacctcaaatggaccataccttgttttacaaacacgaagatggtaagatcactgttctcattgtttatgttgataatattatacttataggagatgacaaacaggagatggaagatttaaaggagaaattggaaagggaatttgagataaaagaccttggaccaatgaggtactttctcagcatggaagtggctagaaatcagaaaggtatatctgtttctcaaaggaagtataccttggatcttttaaaggaaactagaatgatggggtgcaaaccggttgatactccagtggatccaaatttgaaattgacagaactccaaaacagcagcgtttagtggggaggttcatttatctctctcacactagacctgatattgcatttgtagttagcgtggtaagccaattcatgcatacaccatacaatgaacatatggaggctatgtaccgaattctaaaatatctcaaaggggcggttggaaaaggtctacactttgcaaaaaatgaagcaagaacaatagaagcttatacggatgctgaatgggcaggtttggtgaacgataggcgatcaacttctggatattgtacctttgtatggggaaacttggtaacttggaggagcaaaaaacaaaatgtcgtggctagaagcaacaaggaagctgagtttaaagttgttgctcaaggcatatgcgagttactttggttaaaactgctgttggaagagttaaaagtcacatcacatcagccaatgaagatctactgcgataataaagctcccataaacatatatcataacccagttcatcacgactgaatgaagcgtgttgaagtagatcgtcatttcatcaaagagaaactggaagaaggaaccatttgcatgacatacattccatctgcacagcaagcagcagatctactaacaaaggcccttgcaagaccaatatttgagaagttatgagacaagctgtactcaatatttttatcctagcttgagggggagtgttggagatttttttcagataattgggattatctaaatcagttgaagagttttgaattaattcaaattgtccaaacaactttggatatttgagttaatttgaattatttaaaaaaatttttatccatagagtagttagagattaattcaaattaatctcctagtttttaggatgtttctagtttcctaaaataaaggacttaggtagtacctaagtcaataaattagtttgtaatttagttcaataatagattagagcagtgtttgagtttttcttcctacttcctggaaacagaaactcccaatccacatgatcaaagtcactcttgcaaacaaccctctcctcttccacacatcttttcccatctgccactaatactgtatccaaaatttgtctaacttgaaaaaaaggctgcttatgaaggatggatagttttatgcaacaccttacatagtaattgagacaacaatttagctattatcttgtagaggctagtcactaaactgataggtttgaaatcaataatctattaatgtaaattttttttaggtactagagcaataaaagtggcatcagtactcttatttatgactccactgtcatgaaattcaacaaataccttcagcaagttgtgtcccaacactcctgatacaaagctaaagtgactgcatccagatcaggggccttctccttgttcataagaaaaattgcttctcatgttttcttttctgaaaaagggtgttccaaccactagcactctcctccaagatgggggaccactctaaaccatctattctccatgagtcctcatttgatctactataacgtttgctaaagaactcaagatctctaaaattctagcttggtcacctaacaatgctccattctcatccactagagatttaatgaacttcttctttctcctcccattagctattctattgaagatatcgaaattgcagtcccccttcttggcccactttacttgagatacttgcctccaatgaacctcttcccttaacaacaattctagaaagtccatttttttggtagctcttaaggatgctaattcattagtgagagatccctccccctcaagaatccaccatggcaatatccctcattattgaatccgtctgctctcttgtatccctacaagtagccttgttccaaattttcaattcactctaatgcctagcagtttttgcatgaacttatgaccttcccaaagtgaaatttgtatctctctccaccatagatttatactctctttgaaatctagatgtctcacccacatatttttaaacctaaaaggagctggtaccgatctaaatggattggtgactagacatatggggcaatggtctaagatgggaagaggtaaggcttcttgaaggctctatggaaaactaatgtcctaatctatactcccattatattttttaatatcccaaagtaaccctcataatttttcatattttccaaaattttaaattcccattcaaacaaaacacatcttgtttattatgttccctaaatgtgaagcatgacacttgaatttatccctaaattgttgcatcattaggttatgggacaaacatcaaacttgcacctactttctttatcttttgcaatagatcttagttctctaagccttgcatcaaatttattatattcttttccaacaaatttttagaaaagctactaaaaatgctttgaatgtgaattgtcagaaagcttgcataggtgaggagaaaaagaaagcaagaactgctgctatgtttagccccttgtgaaagcttgaaattttatataaatttaattttctcaaaatttgtgtagcttttagaataaaaaatataatcactgcagtaatgttattgcttgatctcatttaaatctccattttttacttaagtggaccttgcactttaagtagtagtttcttgaggatctatctttccacactttttgcatgagtgatacataaggacaatgtatttgaaactgaattggacattggttcttataattatttgtaattttaataatatataatttatatatttatgatgtcatgcagacatcatagtttgaccatagttcaacaatggtctgatcagtgaactgtgtcctagtaatttttctagttcaattactggtttgattctaaaaatattgcatactgatcagtatcctcttggctgctgactgaatcttttcttggccagggtgtccct

SEQ ID NO: 11846 - DNA, 6497 bp, Vitis vinifera
  Intron number 5 from transcript GSVIVT01031710001 (locus G SVIVG01031710001) derived from phytozome v7.0 (chr-ID chr3 ; pos 3631393 to 3637889 reverse strand)
atcaatctgattcagagtaagtttgtagagcagatgtcaattccactaccttgtttaatatttaatattatgtataaaagattgatctgaattaccgccactgacacatctgccatgtgactgccacctttatcgatgctgtcactactacctccttcaccactctgccattgacagtgccgccatcatccccaccatcgccaccttgttactgccatacctccgtgatgctgtctccaccttggcctccgatccatcacatccatcaatgccattgctttacctctatgttgtcttgtcaccactaacaccacctctcgtccgccatgccactgctgttgcttcttccattgctgcccaatcaattccatcttcattgtattgactgcccttattgtttaacaatgaacttgttatcatctccaacaccaacaggagaaaatttcattacctccatcaagactaccttcattgtagtacctccatctcttcaccaatgacaccattaccatctttgttgcatactccactttcagtcatatggcaccgccattattgaagatccttaaaaaaaaaaaaggaaaaaaaaggaagaatctagatgtagagagccttttgtattcttagttttacgacttagaaatctacacgacttgagtttttttgtatctaatggcagagccttaaggaagtttgaatgtttagtgttgaacttgaaaccttaataatgaagtaggatttgcaagggtcaagtcccaaccagtaatatgttttatcaaaaggatttattcttcgattaagcaagcttggagaaacatctgagggaagtggagttcaagggatggatggaggatgcagttgattttgtgttgaatcaaaatctttcgagattttgatagaggtgattaaaggttagagaattggaaaaaatttgaagagaggatgagggctttcctcttggactaggtttggtgagagggatctcttattggctataaaggaaagaataacatgtgctttaagatggatcagaaagaaggtggtaagagcctacaaactggagctttgcagcaaccaagaaggaagatttctattgtgttcagttttatcagcagaggaaaaaaggttcttgttagtcttccctgaagggaggggcttcctagggggatggaagattattgctaataagctgagaattgctggtgttgctctttcgttgaggattgtagaggcaccttgggaggctatcaaacaattagaagatagtggtaggggacttttttgaaagataatttcttttgcggggacggtgaataaaggccaaggtaaggttggcgatgcagtttggatttagtttgaaatgaaggaacttaaggaaaatttcaagcccttgaaaaagtgcctggtgggtagatgaggagccttctcaaaccaggtgtcaaatttgtttcacctgaaaaattaaaattaggcttcatacaattggagactaaagggaaacctccatttggctatgttgggaggttctgtcatcctgtttgagtttaggagagccattgaagtcaatagagtattatagcatttgggcaacatatttttcaaagcggaagggggtgtagctagactagtggggttttgaagtaggatgtttcaagaaagggatgcgtgctaaagaagctttggtgggagtgggtgggctacctcttcatttggggggaaaaaattgtttaaaggttgggtgatgcttgtggagaattatggtagttgatgagggtaatgcgattcattgtcatcttcaatgggctaagattcttgtaagatcttacaggaggaaggtgcctaggatcttgcatgttgtagttaggtcaattgtctttgctactcaactatggtgggagatatctctatgcttgatgatggtggctcttaatggaagttgcagagtaaaggtcaaggatgaatctaacgaggtgaaatgtgttctaaagggaaaatgggtgtcacaagaggagcatttgtggcttgctaaaggagtggcggggttagccttttctacctagtgcaagtagttggtaaaagttgggtcaagcgaggaggttggctcattgccaaaggagtcatttagtggccccaatggttgttttagtgggctgatggttcaaagtgtttgtgcctatgatcctcttaagggctggattgtggaggactagcaacctttagttataagggcttgctcaagttgagggctcgtcttcttaggttcgagcttcttgtgaaaagggggaaggggggagggaggattttgtggaggcgggatgggcttgcaaggcctcttgcaatcaacccactcttgcaccattagtgggcttcctaattaaagaggggtgatcaaccccattttactctcaactagaggaatcgtcaaagctctatgtttgaagacctttgccttctaatggaatctcgatggctagaagtgagagtttcctttgtcgatgaaactctccttaatgaagctatcagactttcagatatggctttgactttttcttctctattgaagggcagggtttcttctacttcttttcgcactatggatgggagccctttgtcggatctcactaaaggcttagttctttggagggagttgaaggggggtgatttcttatgggcttgcagtgatggtgaagggcactacaaatgcttttttgtgaaggcatgatggtgggggtaccaaggaaacttaaggaacgggttaaagagagtggaaattgttgagtagtgaggtggtgggcttgtgtaaggactgcctttgctaggacctaaagggggaggagttaagttcaagattcgtctttatgcaagttggcctctttcaacaattttgtggaattgtctgaggttgtgagtagggaattttttctatgttgtggaaatcaaaggctagaaaaaggagtaaagtggtggtgataggtagagagaggagatattccaacttctccttttgttggggaactccgaaaggtagagtactcaattaactatagccaggcgcatggaaaagcgacaagatgttagaaaagtggtagggaacttgtttctaactatccatgcaattaaggattttatcttgaaatgttggggttaatgacaaggaaaaacgaaaaactatcaaggctctgattagatctcaatgagttaatcttgtgtgtttgcaagctacaagggtctaacaaattaattctcaaatggtggaagttagaataaattaagttttgcttttcgatgagtttgacaaaaaagaaggtaggggggcaagagccgttcaaaatctcctgtataagcttgggacttcattcatcgaggagaaagttcaagtcgctttgtttagggatgaagctccaagactagatggcttcactaaggcattttgacagttttgtgggaatttgttaagcaagaggtaataggtttcttcatggacattttttacaataggttttttgagagaagtttgaatgtcactcccttggatttggaagatttcaaaccaattatcttagtggagggccttttataagcttttggcaaaagttttagccagcaaactcaaaaaggtagggggaaatgtggttttaaactaccaacatatttccatttttgtggagggtaaacacattcttaatgcaattctcatagctaatgaggccatagactcaaagttgaaaagctccattagtggagttatttgcaaaattgatattgagaaggtgtatgatcatgccaattgggagttcctattggtgatcttagagaaatcaagttttggtcataagtggatcatatggtttaaaactttaaatgatgcatctcctcaacaaaattgttagttcttgtcaacatgaccctatcaaaattctttcgtagttcttgtgggttaagacaaggggatcccttttctccctatttatttatcttggctatagaggggattctaaggagaactagggaaggggtttccttcttgggtttcaaggtgggtggtagaggctatgagaggttagatttgaaaatcaatctaaagaaaagtgagctaattctagttggaggagctgatgatgtggaggctcttgttgctactctgcgatgtaaggtagggcatctacccaccatatatctaggtttgcctttgggagctcattttaaagcaatgaggatgtgggatgaggtggaagaaggatttcaaaaaaggcttgctatattgtaaaagcaatgtagggagacttacctatttaaagtacattgtcaattgttcattatcccaaaaaacatgtctaagattggtgcagatctaaaggaacttcctttggggaggggttgcatcagtgaataaacctcacttggttaattagtccatagtttgcttagacaaaaagaatggggggggcattaggaatctctcttctcaaaacaaggtgcacctaggcaagtggtgctgaagatttgcttatgaaagagtgtccctttggaaaagtgttattgcacagaaattttaggaaggggaatggtgttcaaagtttatgagggatggatatggggtgggtgtgtggaaggctattggaaatgggtggaagtcctttgtgagtagaactcatttcattgttggtaatggaagaatggtcaaattttgaaaatatagtgtggtgactcatctttggaagaatccttgttgtatttgttctctctagccaatgataaagactcttaggtaggagaggtgtggaagcaagtaggaggaggtcggtggggcccttgcttctccatgcaatttcttgattgagagattgaaggagtaataacctttcttcaaaacctggagaaaagctcaatttggagtgaggaggaagacaaaaaggggtgggaggagtccaagagtggtgttttcagtcaaatccttctttaattcttttgtacaagaaagaggtgggcctttcccctctagcattgtttggaatccatggttacctgtgaaggtggaaatctttgcatgggaatgaacttggggtcagatttttaacaattggtcagctttaaaggagcggatggacaatgcctagtcgatgctaatgtgcaaaaatgaggtaggatcgatcggtcatttacttcttcattttcttaaagtatcccgtgacaacttgttttctcttttcatggagtaatttgggtgaggcacttcactgtaaaaggaaatattgatctggcatgaattttttgtgggaaagaaatggaaaaggattggatggtctctgtgcttgtctaggacattatagaaagaaagaaacaggaggtcttttgaagattcagaacaattagttccaaaaatcgaacccattttcatgagtatttttttgaaatggattggagaatacataggtgtcattcctagaactttgttgattggctaacttaaaataatgagagggaggttgttttctgcatttctcttcttttaaagtatgcctttggtgggcatcaaatgtattcactgagtgtgtattgctgcaccttttgcttaggcattttaatataaatttgctattttcctgtacaaaaaaaaaatgatccgcatgcagcaaaataatgtatttatgcgtatgaatttggcttccatatttttattttttccatataaatgcagattttaaagtatatgtatgctgtttataacttgaaactcataatagcaactagaagtcatgtgcatgtgtatacatatacatgcatgtatatgcagtttatattcaccatctctgtaatatagatctacatttatttctttaacatgtatgattgcgagagaacttggcctaggaagacaaagacaaaacctctgaagagatattgggaattgaaagtgcttggaggaaaatctcgtatcaaaagagttgctagaaatggagtcataaatatgtatactttgcagtgtcatttactttgcaatgttgtgcagcgaatgacatttgccatttttcttgcgatttgaatccctgtttcattttgaattcaagtgtgttttttctttaaaaaaaaatattgaagaacttgagattatgttttaattgtctatcttttcgttaataagcttcgaaatactgccatactcgtgtcatattttcattgtcatcggtgttgtattctttagcatgttacttttggaatcttgctcatttctaaatcttaagttgaagctgatttattatgactgttgatattttatttttatgcatttatcctattgccttctttttctaaaatcccatccatgatttataatggatctggctatgtttttgctctctgtgctcttgtttttaaaaaaaattctttttcaagctaaagctctctttacttgtttcatactctgatatcatctgattttttttaattcctattatttagcaggtacggctttgtgcttcgtattgtccttttgttgg

SEQ ID NO: 11847 - DNA, 23296 bp, Vitis vinifera
  Intron number 3 from transcript GSVIVT01030467001 (locus G SVIVG01030467001) derived from phytozome v7.0 (chr-ID chr1 2; pos 5851542 to 5874837)
atataaaaaggggaagccatccaactataatcaaggtatgttaaaagatacaactagctgatatgtttacttattattaccattattaggtctatttggattgatttctcatatgctaaaaagcaaattttttaagttcactgacaaattttataaatatttgataaattttatgcttatggcttaagaaagtgctcaatataaaagtcttgaaaatgtcatattctttgtttaataaaaactttacgatatcaatattacttttaaaaaattataatcttaggtttaattttatgttgcatataaagataaaaacaaacaacctcagacaggttctcaattattacataataagggacactaaagctaattatatgagattaaaatgatagtataaagctatttgtttttgcctttttctatattataggtcatatgcaatgaaaataggaattatgtcatgattcaaaacaaagaagagggttagaaaatacacaggatttccaacaagaaatttaaagagaaggaaccaaaaacttgttagttcataataagcttaaatccgaccatgtaggcggtacaaaataaaaaacataaacttaaaaacaaaacttaattaaaaccgaccatgtaggcggtacaagaacataaaatgaaaaacaaaacttaaaaaaccatccatataagaggtaatcaaaacatacttatattatacataaggagaaatatcttacaatggacaggggtaggaaagcttgaagaaagcttgaaagcttgaagggcttacatgatgagagagaaagaaaagagaatggagaacataagcttgggagagaaacagaattaaaatgaagcgtgcttacaaatgaggaccgagcctccttaaataggcaaaaaaggaatcttgaatagtaaccatgaacagtagacccgtgcttgaatagtgaatagtgaatagtaagattcacttttataccgaaatcccccaaaaaaaccctctttcggctgagaagacttctggcaggctgctttatactgtgtagacacaagcttgctactttttgaacagaaacactataaagcttgaaaaatattcttgatggaagacaaaaggctgatgattacttagatcttcttattggaggaaggattccttcacagtcatcaccattgtctggaaggtagcttgttgaatcatccgactctgcataagaattttcttgggggaaacttgagcttccttcttcaaggattttctggaaatcttgaggggtcttagctgctacgagcatggcttgtaactgttgctttttaaggagaaactgagacatattatcactggctgagacttgtgtggggttctggaggaaatactgcttaactgtatcaatagatgcatcattttttaaggcatcccaccattttgttttaaaggtccttcccagagatggaaaggctgctgattcatctgtaatgataatataatcccactggactatccaagcaaggccaaatttgctgaagaagaatagtaaagggggaaaagctgaaagttctctggggatatcaaaagaacttctaaatagctcaaagccatccaggatgggcttgggaagaatcttaatagttggaccataataattccaccaactgtagaaccaaaatgggaaagaggaaagctgattcttagatggaaaatagaacatccatgaatgatggaagtccctattatggatcagaaaagcattaaaccatgctctctgataatcccaataattaaaaaaccttggctttgatggttcagaaaattcccttgaaagagtaggatttcctccccattgcttgatagtaagaatcttatagatatggtaggtggagaatgccaaactcatattgctgaatttgtctgcattatgcttaattttaacagaaccagtttttgtaaggactgcttcataaaactctcttgttcttaaaatatcaccagagagataatgaaaattttattgaaaagcttttgcaacaatttctctggggttttcagagaaaaattctctttctataaccaaaagaggttgatttaaatcattttgccaatatcttgattttgttgaaagaggtgtggggttggcagccaccacaatttgcttgtttgaaaaagaggagcttgatgctaattccttttgagagggattagccttaatgacttgcttgaaggtctgagaccctgaaatggctggatactgagtggccttgactggattagctggatcggaatgatcatagtacaaggtcatcatcttgttaggcataggtttagaagaatgaagccttgcttcttcttcttcaacttgttggctccatagcattttatggggagaaggagcttgactggattgggttttctagctaggagcttgggtattctttttaggggccatggtctcgtgaaccctgcaaatttcatgagttgagtgattaggaatgaaactttctcctttaataatcttgatttgaaaattagggtttaaaataatccaatcaattaaattatacttaaaagaaatatacttaattgttttctcagatgtgaaaacaacttttaaaattccttggttcaaaatatcaatttgaaattttgaaatgcataaaggaatgcttaaaatatcatttataatgagattatgaatgaattgggtacctaatatcttaggtggatcatctattctaacaatattaatttcttgatcacatcgagtgatgttttcaataggattagaaaattcaaaaagaatttccttatcaaaaaactttgttcttataccttggttatctacccacaatggataaatagagcttaagaagggtattcctagaagggctttttcattaaggtccttaacaaggataaaggtttgcttaatacagatgtcatggttacggatatgaacatctgttaatttatacttaatggcaagtcttttgccattggctccaaatagagactgactagtctcttcgcataaaggaataggtacaagaccttcttgaaggcaattttcagctgctcctgaatcaatcaaagcaataatatcaaagacaaatttatctttgactactatagtaagggagacttcccacctctggaagataaccctactcacagtattcaaaaaagtatatgtctcattatcattaacatgagaagattctggaatatccataaggtttccttggttgaccatcttattgatttgatcttggagatcagagagacctaaacttatgaattgtcttaactctttaatctcctttttatgctgcttaacttcttcatgaagttccttaatgctgacatccttgggagactgttggtcaaacctgtttaagatatcattaaagttataaggattaacagtcttcttggcttctaccttgacaacagatttcttaaaaacttcataaagattttgcttagtcttttcatcttcaacttttcttaaagtatctaggataaattcctgatcttggcttatgacatttatagttttaggacggcaattacaatttcctttaatacattctgcttagtcactagaagattggctgtaaacttcaccactactgtctagttgattaatgtcatcttcattatctgaatcagtccttgattcagaatctaagtttaacattaccttacaaagcatattttttaagtcatctgagacacttaagttattaatcttttgcttaactctacaatcttttttataatggccaactttgccacatttaaaacagatgattggcttgacatctaaaggagtttctacctttttctgggtatctttgttgatccttctttggatgtgccttgaatgcttagtatcattcatcctatagttgtcatgggtacctctcttactgtggtaaaacttatctttgttaggcttcctacttggtttttgcttagagggaggcatagtttctttttggctgaaaccaaactggctacagaatgatccaaattcattcttgtagatttttttgttcattcttcatttgttgcttaagcttgaagtcattgcacaacttaatcccttcagctatgacaatgcttataatctcaccataggttaacttatcataagggatttgaccattatactgttcccttatcttgatcctaattctctcagagaaaagcttaggtaatcctgagatgaacttttctttccaaaaagactggttacaatctgatcttagcatgactttggttaggaagactttcttataccacctaaaatcatgaagcttgggacacttaaggttggttaagagatctgcagttttatccttaatttttgcaggatctccaatgaagtgcttggatattgagtagattaaagtagccactgcatcctcaatatcttggtcatcttcgtccttaacaacttcattactctcattaatcctataggctttaaggatactattcctatcatcaaaagtgagataattatcccaccaacccttaagctgacctgtaaatctagcaacaatggtctgagctacagcatgatctggcagtctattgtttaatttataggctgtacttaccatggtcatctcttgaagcttagtgagtatgttatactcggtcataccatctatgttccattcatagatagtaccactggtgtatgaggcttgagtatactgatttctttcttcaaactgcatgtcaggaaaagtaggtctaggataataattcctagtcttaaaggcttccaagttgttaataatttgattatggggttcctcaaacatcttaattagttcatcagcttcttcttctgaactaatatcacctttaaccatattgattctcttatcaggctgaacagtcaaaggggcaacaagattatccttaatcttctgattaatcctatcaacaaaatcctggttgatttggggattttcttggaattccttagaaaattcaaaggactcagtgctcttcgtgttattaacacgcttataaggataatctggatattcctcttgtttgaagatttcaaaccaaatccaaaacttaatatttttcttttcttatcttaagtaggcatagaattcctcttggtaaatggttctaatgaccttagggacagtgctaaagaaccaatcatttctttgcttattgacttcagaatagaagccttttcttaagagatccttgttgatctcaaagtcctcatcacttaggcttattgtgttaatcatctgggaataggtaggagacataacatgggactcatcctgttgggattcctgagtagactcattttcttcactgtaaaatggtctagccacgttggtgtgacttctaacaccagttagcttaatgttcttagggtttcctgagctggatccttcttcttccctagtggttctaactgggatggaagagcttgaagctctagagggttcataaacataaactctagggctgctggaatgtctgaaagagttggagaaaaccaattctcctcctccatcaggatattgaacaatttgttcaatactttcagaacgctgtgctatggctggaacagcaaaatgccaattttcaggaaactcaacatctttccacaagatcttcttgggaatgatgaaatctgacttatctagcatatttgaatgaaagtaagtggtctcacctttaggactggtgcaaagagccccagatccaacgcttgtgttcatgctcttataggcaaacctggttatgatagaaacaggactgtttcctggtttgatcataaagccatgagtcttaatatgcaaaacaacggaatctaagatgtctgcatctcttattttaactgtgaagttaggatatcactggaaataaactgggccatcattcagtccagcttggactgcgcctataatagaatctcgatattcgagatgcctattatcccttaaacacatgacaatagaggtgtttaaacctaatcttgtcaaaggcttagctgctacttgaatcataccaaagtgtatgaaattatagccatctttcttatgcttatcaatggatctgttatctagaagtcttatgacttggtcatcttgttctaagctgacagacatttcagaggtcttaatggtataatctgtgaagaacttaaaggttcctttcttataaatttcttgattagacaccttgggtaacttccaatcatctaaatcattttggatcttaggataattgatctcttcactgtttacaatagtatcttgagaatcactggatctcctagacatggttatgaaaattgaactcattttagggtttttgaactagagcctaatagcagattgacagaccttatgagatgtcaccccaaccctcttacagcctaacaaacgcctatccacggctaacaacggctcaaccggcaaggctcgcactcccaggcacactgctacctatcctaggataggccaagaacacctaaaacaagacccaacttccctcccacatggctctgataccatagacacccaggacaaggtcatatgcaatgaaaacaggaattatgccatgattcaaaacaaagaagagggttagaaaatacacaggatatccaacaagaaatttaaagagaaggaacaaaaaacttgtcagttcataataagcttaaaactgaccatgtaggcggtacaaaataaaaaacataaacttaaaaacaaaacttaattaaaactgaccatgtaggcggtacaagaacataaaatgaaaaacaaaacttaaaaaaccatccatataggaggtaatcaaaacatacttatattatacataaggagaaatatcttacaatggacagggataggaaagcttgaagaaagcttgaagggcttacatgatgagagaggaagaagagagaagggagagcataagcttgggagagaaacagaactaaaatgaagcgtgcttacaaatgaggaccgagcctccttaaataggcaaaaaaggaatcttaaatagtaaccatgaacagtagacccgtgcttgaatagtgcttgaatagtaaaagtgaacagtaagactgaactgtagcacttttgactattgactcggaatcttgctttcggctgaaatgactattagtcaattaatcaaggaggaatatattccgagcggtgatccattaggagttgagtatcttgaatagtggatttgaacgctaaaggatcaatctttttgctgcagaagatctgatgacgggaatccgcagcaatgagataccccatgtttttagggtaggcttcaaagtctctgttgataactctaactctccaatgcttaatttgtttaataattggttcggcgcaaatctcattttgcaataaggggtttaacaaaagtgtaggctttctattttgataatgaagattaacataatgctgagctggaagaacattgccattagaaatccattcaggagctttgctgaagaaaatggcatctgcaaatttcttatttaacttaaagccttgggttaagcttaagttaatctttctgccaaaattgcttgcttgactaggatcagaacaaataagctggtagactaacccgtactcaagaagcttttcaggagttagggttataactcctcccttgaaagcgatgttaattggctgataatgctgaagatcaatagaggctctactgatagtgaaatttctattgcaattgcacaaatgcttgttgtcatgctgatgcagaagtggctcactaatatttctgcaaatctttgaatcatcaaattccatctccttaattaaatttagtcctggaacactgagaccaggaatagctgagagatagatatgcagatcctgaagataggctgaaatgaaaacttgcatttcttctgcactggacttggccttttcacaaattagacgataaacatctggcttaagattatataggagttgattcctatgatgaaacattctaaagagaaggcaatcttgctcttccttacttaatttttttctcattcaccaatggggtgaatggttttttctcacatttttccagtggggaaaaagaggcttggcttatatctcccttaggaaagttagctatttctagcattctttcgagatccctgcatttagcctgcaaaacatgaatacttttttgaatagataaggggttagtatcaaaattagaggagtttatggggatggaatcctccacaaaaggtagagaatccaaactatttccttcttcccaagcaggggaggaaggatgcttaagcactggaggaatgtaagaagaagatgatccatgggaatctgaggcataatacatgggtttgaatttttctgataaggctgactgggatttcatgtaggatgatggtttcttaagggattgcttttcttttttgggagccatattctcgggaatcctgcaaaaattcacgagttaagaaatcagggatatagttattttctcctttaatatattcaatttgaaaatcaaaattgcttaaaatagcttgccatctagcaaatatatgcttagaagctatatttttaacatcttttttcaaaactgattttgttgacaaacaatcaactcttaataaaaattcttgatttaaaagatcgtcttgaaattttgaaatgcataaaacgatgcttaaaatttcctttttgatggtgctgtagttgagttgggcatggttccaagttccagaagtgaatctaaccaacaattcttgattattacttttttgcttaagaataccaccaaaacctatgtcaaaagcatcagtctcaataatcttaaaggctttatgatcagctaaggcgagacatggtaaggttttgactctagattttactattttaacaatcttggtatgatcctcattccaaggaactggatttttcttaagtctttgtcttaaaggggcacataattggcttaaatcttgtatgaaatctgacacataattaaggcttcctaagaaacgttgcaattgtttcttatccttaatctcatcagggaacttatcagcaaactcaattgatctttgaatgggggtgaatgttccttggtgaatatgatgacctaggaatcttactttagtttggaagaggttaatcttagtggctgacaagcttaaaccattgctcttaacagtctcaataaatctattgagatgtttccaatgctgctcaatagaatctgagtaaatcaaaacatcatcaatgtaaacaataatgaaatcagaaaactggttaaagatttcattcattatgttttgaaactcagaaggtgcattcttaaggccaaagggcattacattccactcataatgaccaaatgggaccacaaaagctatttgtacctatctttttccgcaatctggatttgccaaaatcctaatttcatgtcaaacttagagaaaactttggacttccctaatctttgaaagaggtctttttttatttgggataggatatctaatccatcttaaaacatcattgaggggcttatagttgatgactagtctaggtgttcctctttctagttcagcttgtttctgaacataaaaggctgaacaactccaagaggatttagacataaaaggcttgtttctgatttcattattgtttacattgatgatgttttgatttactcagattctgttgagcagtattggaaacatctcaatagatttattgagactgttaagagcaatggtttaagcttgtcagccactaagattaacctcttccaaacgaaagtaagattcctaggtcatcacattcactaaggaacattcacccccattcaaagatcaattgagtttgctgataagttccttgatgagattaaggataagaaacaattgcaacgtttcttaggaagccttaattatgtgtcagatttcatacaagatttaagccaattatgtgcccctttaagacaaagacttaagaaaaatccaattccttggaatgaggatcataccaagattgttaaaatagtaaaatctagagtcaaaaccttaccatgtcttgccttagctgatcataaagtctttaagattgttgagactgatgcttcagacataggttttggtggtattcttaagcaaagaagtaataatcaagaattgttggttagattcacttctggaacttggaaccatgcccaactcaactacagcaccatcaaaaaggaaattttaagcattgttttatgcatttcaaaatttcaagacgatcttttaaatcaagaatttttattaagagttgattgtttgtcagcaaaatcagttttgcaaaaagatgttaaaaatatagcttctaagcatatttttgctagatggcaagctattttaagcaattttgattttcaaattgaatatattaaaggagaaaataactctatccctgatttcttaactcgtgaatttttgcaggattcccgagaatatggctcccaaaaaagaaaagcaatcccttaagaaaccatcatcctacatgaaatcccagtcagcattatcagaaaaattcaaacccatgtattatgcctcagattcccatggatcatcttcttcttacattcctccagtgcttaagcatccttcctcccctgctttggaagaaggaaatagtttggattctctaccttttgtggaggattccaaccccataaactcctctacttttgatactcaccccttatctattcacaaaagtattcatgttttgcaggctaaatgcagggatctcgaaagaaggctagaaatagctaactttcctaaaagagatataagccaagcccctttttccccactagaaaaaggtgagaaaaaaccattcaccccactggtgaatgagaaaaaattaagtatggaagagcaagattgccttctctttagaatgtttcatcataagaatcaactcctatataatcttaagccagatgtttatcgtctaatttgtgaaaaggccaagtccaatgcagaagaaatgcaagttttcatttcagcctatcttcaggatctgcatatctatctctcatctattcctggtctcagtgttccaggactaaatttaattaaggagatggaatttgatgattcaaagatttgcagaaatattagcgagccacttctgcatcagcatgacaacaagcatttgtgcaattgaaatagaaatttcactatcagtagagcctatattgatcttcagcattatcagccaataaacctcgctttcaagggaggagttataaccctaactcctgaaaagcttcttgagtacgggttagtctgccagcttatttgttctgatcctagtcaagcaagcaattttggtagaaagattaacttaagcttaacccaaggctttaagttaaataagaaatttgcagatgccattttcttcacaaagctcctgaatggatttctaatggcaatgttcttccagctcagcattatgttaatcttcattatcaaaatagaaagcctacacttttgttcaaccccttattgaaaaatgagatttgcgccgaaccaattattaaacaaattaagcattggagagctagagttatcagcagagactttgaagcctaccctaaaaacatggggtatgtcattgctgcggattcccgtcatcagatcttctgcagcaaaaagattgatcatttaccattcaaatccactattcaagatactcagctcctaatggatcaccgctcggaatatattcctccctgattaattgactagcagtcatttcagccgaaagcaagattccgggtcaatagtcaaaagtgttacagttcagtcttactgttcacttttactattcaagcactattcaagcacgggtctattgttcatggttactatttaagattccttttttgcctatttaaggaggctcggtcctcatttgtaagcacgcttcattttagttctgtttctctcccaagcttatgctctcccttctctcttctttctctctcatcatgtaagcccttcaagctttcaagctttcttcaaggtttcctacccctgtccattgtaagatatttctccttatgtattatataagtatgttttgattacctcctatatggatggttttttaagttttgtttttcattttatgttcttgtaccgcctacatggtcggttttaattaagttttgtttttaagtttatgttttttattttgtaccgcctacatggtctgttttaagcttattatgaactaacaagtttttgcttctctttaaatttcttattggatatcctgtgtattttctaaccctcttctttgttttgaatcatggcataattcctgttttcattgcatatgaccttgtcctgggtgtctatggtatcagagccatgtgggagggaagttgggtcttgttttaggtgttcttggcctatcctaggataggtagcagtgcctgggagcgcgagccctgccggttgagccgttgttagccgtggataggcgtttgttaggctataagagggttggggtgacgtctcataaggtctgtgaatctgctattaggctctacttcaaaaaccctaaaatgagttcaattttcagaaccatgtctaggagatccagtgattctcaagatactgttgtaaacagtgaagagatcaattatcctaagatccaaaatgatttagatgattggaagttacccaaggtgtctaatcaagaaatttataagaaaataacctttaagttcttcacagattataccattaagacctctgaaatgtctgtcaacttagaacaagatgaccaagtcataagacttctagataacagatccattgataagcataagaaagatggctataatttcatacactttggtatgattcaagtagcagctaagcctttgacaagattaggtttaaacacctctattgtcatgtgtttaagggataataggcatctcgaatatcgagattctattataggcgcagtccaagctggactgaatgatggcccagtttatttccagtgctatcctaacttcacagttagaataagagatgcagacatcttagattccgttgttctgcatattaagactcatggctttaagatcaaaccaggaaacaatcctgtttctatcataaccaggtttgcctataagagcatgaacacaagcgttggacctggggctctttgcaccagtcctaaaggtgagaccacttactttcattcagatatgctagataagtcagatttcatcattcccaagaagatcttgtggaaagatgttgagtttcctgaaaattagcattttgttgttccagccatagcacaacgttctgaaagtattgaaaaaattgttcaatatcctgatggaggaggagaactggttttctccaactctttcaggcattccagcagccctagagtttctgtttatgaaccctctagagcttcaagctcttccatcccagttagaaccactagggaagaagaaggatccagctcaggaaaccctaagaacattaagctaactggtgttagaagtcacaccaacgtggctagaccattttacaatgaagaaaatgagtctactcaggaatcccaacaggatgagtcccctgttatgtctcctacctattcccaaatgattaacacaataagcctaagtgatgaggactttgagatcaacaaggatctcttaagaaaagacttctattctgaagtcaataagcaaagaaatgattggttctttagcactgtccctaaggtcattagaaccatttaccaagaagaattctatgcctacttaagacaagaaaagaaaaatattaagttttggatttggtttgaactcttcaaacaagaggaatatccagattatccttataagcgtgttaataacacgaagagcactgagtccttagaattttctaaggaattccaagaaaatccccaaatcaaccaggcttttgttgataggattaatcaggagattagggataatcttgtatcccctttgactgtttagcctgataagagaatcaatatggttaaaggtgatattagttcagaagaagaagctgatgaactaattaagatgtttgaggaaccccataatcaaattattaacaacttggaagcctttaagactaggaattactatcctagacctacttttcctgacatgcagtttgaggaaagaaatcagtatactcaagcctcatacaccagtggtactatctatgaatggaacatagatggtatgaccgagtataacatactcactaagcttcaagagatgaccatggtaagtacagcctataaattaaacaatagactgccagatcatgctgtagctcagaccattgttgctaggtttacaggtcagcttaagggttggtgggataattatctcacttttgatgataggaatagtatccttaaagcttataggattaatgagagtaatgaagttgttaagggcgaagatggccaagatattgaggatgtagtggctactttaatctactcaatatccaagcacttcattggagatcctgcaaaaattaaggataaaactgcagatctcttaaccaaccttaagtgtcccaagcttcatgattttaggtggtataaggaagtcttcctaaccaaagtcatgctaagattagattgtaaccagtctttttggaaagaaaagttcatctcagcattacccaagcttttctctgagagaattaggatcaagataagggaacagtataatggtcaaatcccttatgataagttaacctatggtgagattataagcattgtcacagctgaagggattaagttgtgcaatgacttcaagcttaagcaacaaatgaagaatgaacaaaaaaatctacaagaatgaatttggatcattctgtagccagtttagtttcagccaaaaagaaattatgcctccctctaagcaaaaaccaagtaggaagcctagcaaagataagttttaccacagtaagagaggtacccatgacaactataggatgaatgatactaagcattcaaggcacgtccaaagaaggatcaacaaagatacccagaaaaaggtagaaactcctttagatgtcaagcctatcatctgttttaaatgtggcaaagttggccattataaaaaagattgtagagttaagcaaaagattaataacttaagtgtctcagatgacttaaaaaatatgctttgtaaggtaatgttaaactcagattctgaatcaaggactgattcagataatgaagatgacattaatcaactagacagtagtggtgaagtttccagccaatcttctagtgaccaagcagaatgtattaaaggaaattgtaattgtcgtcctaaaactataaatgtcataagccaagatcaggaatttatcctagatactttaagaaaagttgaagatgaaaagactaagcaaaatctttatgaagtttttaaaaaatctgttgtcaaggtagaagccaagaagactgttaatccttataaccttaatgatatcttaaacaggtttgaccaacagtctcccaaggatgtcagcattaaggaacttcatgaagaagttaagcagcataaaaaggagattaaagagttaagacaattcataagtttaggtctctcttatctccaagatcaaatcaataagatggtcaaccaaggaaaccttatggatattccagaatcttctcatgttaatgataatgagacagatacttttttgaatactgtgagtagggttatcttccagaggtgggaagtctcccttactatagtagtcaaagataaatttgtctttgatattattgctttgattgattcaggagcagctgaaaattgccttcaagaaggtcttgtacctattcttttatgcgaagagactagtcagtctctatttggagccaatggcaaaagacttgccattaagtataaattaacagatgttcataaccgtaaccatgacatctgtattaagcaaacctttatccttgttaaggaccttaatgaaaaagcccttctaggaatacccttcttaagctctatttatccattgtgggtagataaccaaggtataagaacaaagctttttgataaggaaattctttttgaattttctaatcctattgaaaacatcactcgatgtgatcaagaaattaatattgttagaatagatgatccacctaagatattaggtacccaattcattcataatctcattataaatgatattttaagcattcctttatgcatttcaaaatttcaaattgatattttgaaccaaggaattttaaaagttgttttcacatctgagaaaacaattaagtatatttcttttaagtataacttaattgattggattattttaaaccctaattttcaaatcaagattattaaaggagaaagtttcattcctaatcactcaactcatgaaatttgcagggttcacgagaccatggcccctaaaaagaatacccaagctcctagccagaaaacccaatccagtcaagctccttctccccataaaatgctatggagccaacaagttgaagaagaagaagcaaggcttcattcttctaaacctatgcctaacaagatgatgaccttgtactatgatcattccgatccagctaatccagtcaaggccactcagtatccagccatttcagggtctcagaccttcaagcaagtcattaaggctaatccctctcaaaaggaattagcatcaagctcctctttttcaaacaagcaaattgtggtggctgccaaccccacacctctttcaacaaaatcaagatattggcaaaatgatttaaatcaacctcttttggttatagaaagagaatttttctctgaaaaccccagagaaattgctgcaaaagcttttcaataaaattttcattatctctttggtgatattttaagaacaagagagttttatgaagcagtccttacagaaattggttttgttaaaattaagcataatgcaaacaaattcagcaatatgagtttggcattctccacctgccatatctataagattcttactgtcaagcaatggggaggaaatcctactctttcaagggaattttctgaaccatcaaagccaaggttttttaattattgggattatcagagagcatggtttaatgcttttctgatccagaatagggacttccatcattcatggatgttctattttccatctaagaatcagctttcctctttccaattttggttctacagttggtggaattattatggtccgactattaagattcttcccaagcccatcctggatggctttgagctattcagaagttcttttgatatccccagagaactttcagcttttccccctttactattcttcttcagcaaatttggccttgcttggatagtccagtgggactatattatcattacagatgaatcagcagtctttccatctctgggaaggacctttaaaacaaaatggtgggatgccttaaaaaatgatgcatctattgatatagttaagcagtatttcctccagaaccccacacaagtctcagccagtgataatatgtctcagtttctccttaaaaagcaacagttacaagccatgctcacagcagttaagacccctcaagatttccagaaaatccttgaagaaggaagctcaagtttctcccaagaaaattcttatgcagagtcggatgattcaacaagctactttccagacaatggtgatgactgtgaaggaatcattcctccaataagaagatctaagtaatcatcagcctttgtcttccgtcaagaatatttttcaagctttacagtgtttctattcaaaaagcagcaagcttgtgtctacatagtataaagcagcctgtcagaagtcttctcagccgaaagagggttttttgggggatttcggtataaaagtgaatcttactattcactattcactattcaagcacgagtctactgttcatggttactatttaagattccttttttgcctatttaaggaggctcggtcctcatttgtaagcacgcttcattttagttctgtttctctcccaagcttatgctctcccttctctcttctttctctctcatcatgtaagcccttcaagctttcaagctttcttcaagctttcctacccctgtccattgtaagatatttctccttatgtataatataagtatgttttgattacctcctatatggatggttttttaagttttgtttttcattttatgttcttgtaccgcctacatggttggtttaaattaagttttgtttttaagtttatgttttttattttgtaccgcctacatggtcgattttaagcttattatgaactaacaagtttttggttccttctctttaaatttcttgttggatatcctgtgtattttctaaccctcttctttgttttgaatcatggcataattcctgttttgggtgtctatggtatcagagccatgtgggagggaagttgggtcttgttttgggtgttcttggcctatcctaggataggtagcagtgtgcctgggagtgcgagccctgccggttgacctgttgttagccgtggataggcgtttgttaggctgtaagagggttggggtgacgtctcataaggtctgtcaatctgctattaggctctagttcaaaaaccctaaaatgagttcaattttcagaaccatgtctaggagatccagtgattctcaagatactgttgtaaacagtgaagagatcaattatcctaagatccaaaatgatttagatgattggaagttacccaaggtgtctaatcaagaaatttataagaaaagaacctttaagttcttcacagattataccattaagacctctgaaatgtctgtcaacttagaacaagatgaccaagtcataagacttctagataacagatccattgataagcataagaaagatggctataatttcatacactttggtatgattcaagtagcagctaagcctttgacaagattaggtttaaacacctctattgtcatgtgtttaagggataataggcatctcgaatatcgagattctattataggtgcagtccaagctggactgaatgatgacccagtttatttccagtgttatcctaacttcacagttagaataagagatgcagaaatcttagattccgttgttctgcatattaagactcatggctttaagatcaaaccaggaaacagtcctgtttctatcataaccaggtttgcctataagagcatgaacacaagtgttggatctggggctctttgcaccagtcctaaaggtgagaccacttactttcattcagatatgctagataagtcagatttcatcattcccaagaagatcttgtggaaagatgttgagtttcctgcaaattggcattttactaatgctgttccagccatagcatagcattctgaaagtattgaacaaattgttcaatatcctgatggaggaggagaactggttttctccaactctttcagacattccaacagccctagagtttctgtttatgaaccctctagagcttcaagctcttccatcccagttagaaccactagggaagaagaaggatccagctcaggaaaccctaagaacattaagctaactggtgttagaagtcacaccaatgtggctagaccattttacagtgaagaaaatgagtctactcaggaatcccaacaggatgagtcccctgttatgtctcctacctattcccagatgattaacacaataagcctaagcgatgaggactttgagatcaacaaggatctcttaagaaaagacttctattctgaagtcaataagcaaagaaatgattggttctttagcactgtccctaaggtcattagaaccatttaccaagaagaattctatgcctacttaagacaagaaaagaaaaatattaagttttggatttggtttgaactcttcaaacaagaggaatatccagattatccttgtatgcgtattaacaacacctctacaaaagctaagatatggaaaacgagtgacaacattgttatagaatccattcatcctcctgaagctaagatagaaaagaatattaatggaaccatagtcacagcttcaccttttaagactaagccagaggataaaggaactgctagtgcatccgatattagaaggattatggaacaaatcaattatactaatatgtttctcataacccttggaaatcaagtcagccgagttgaggagattattgaaactcaggatcaccttaagaagccttttgttaagaatgataataagcctttgtttaagccttttgaattatctaagaaattccaggaaaatcctcaaattgatcaagctttcattgatagaataagccaaaaggttaaagataatcttgttatccctgaaacacctcaaacttttactatccatgaaacacttctaccttcccataggagaatccttttggttaaaaggaatattagtccaaaagcaaaggataatggactaattaggctaaccagagaaccttctatccaaaacacttttaaggatcatgatgataaacaagagaaaaggattatccttaatgccctgactattaaagatcttcaagaagaaataggacagtataagaaggatattgagaacctaagacaacctacaagcttagaaatccctatccctcaggattatatcaacagggtaggtttttaccacagtagtcctaaaaaggaagactttgaagaagttcttgaatcttcacaagataatagtgataagataaatgcatacttaaatactattagtaaagttatcttccaactgtgggaagtctcccttactatagtaattaagaataaatttatccttgatattattgctttaattgattcaggtgcagctttgaattgtctacaagaaggtcttgtacctacccaattttatgagaaaactaggcaagccctctttagtgctaatggtaaaaagcttattatcaagtacaagctatcgaatgcccatatttgtaaccaaggcatttacattaagcaaaccttcattcttgttaaagatctcaaggagaaagttctccttggagtccctttcttaagctccatctttcccttgtgggtagatgatcaaggtataagaaccaagcttttagataaggaaattctgtttgaatttgccaatccacctggagaaagaagtataaacaccataaaagatcaggtgattaaggctaagcaaaatcatattaatctcttaaagcaagagattgctctggttagaatagaagatcaattgaaggttaagaaaacccaagatgccatagaaagccttaagaataagattattaaggaagtatgttctaacattcctaatgctttttggcacaagaagcagcatgaggtagaattaccttatgagcctgattttagtgagaaaaaaattcccactaaagcaagaccaatccaaatgaacaaggatttattaagctattgtgaaaaggaaatccaggatctcttagataagaagttgataaaacttaattaaaaccgaccatgtaggcggtacaagaacataaaatgaaaaacaaaacttaaaaaaccatccatataggaggtaatcaaaacatacttatattatacataaggagaaatatcttacaatggacaggggtaggaaagcttgaagggcttacatgatgagagagaaagaagagagaagggagagcataagcttgggagagaaacaaaactaaaatgaagcgtgcttacaaatgaggaccgagactccttaaataggcaaaaaaggaatcttaaatagtaaccatgaacagtagacccgtgcttgaatagtaaaagtgaacagtagactgaactgtagcacttttgactattgacccggaatcttgctttcagctgaaatgattgctagtcaattaatcagggaggaatatattccgagcggtgatccattaggagctgagtatcttgaatagtggatttgaacggtaaaggatcaatctttttgctgcagaagatctgatgacgggaatccgcagcaatgagataccccatgttttaagggtaggcttcaaagtctctgctgataactctagctctccaatgcttaatttgtttaataattggtttggcgcaaatctcattttgcaataaggggttgaacaaaagtgtaggctttctattttgataatgaagattaacataatgctgagctggaagaacattgccattagaaatccattcaggagctttgctgaagaaaatggcatctgcaaatttcttatttaacttaaagccttgggttaagcttaagttaatctttctgccaaaattgcttgcttgactaggatcagaacaaataagctggtagactaacctgtactcaagaagcttttcaggagttagggttataactcctcccttgaaagcgaggttaattggctgataatgctgaagatcaatacaggctctactgatagtgaaatttctattgcaattgcacaaatgcttgttgtcatgctgatgcaaaagtggcttgctaatatttctgcaaatctttgaatcatcaaattccatctccttaattaaatttagtcctagaacactgagaccaggaatagctgagagatagatatgcagatcctgaagataggctgaaatgaaaacttgcattttttctgcactggacttggccttttcacaaattagacgataaacatctagcttaagattatataggagttgattcctatgatgaaacattctaaagatatatatatatatatataaaggtaacttttttaattaataaaaaattgtcatatgaaaaaaagtctcatctctctgtacattgatttatactccatttctttgtacttgttgtatggttagattaaaagttcaatatgatactaaatttaataagcttgccatgatctctagttatacacaaaattaaataacattaattttgccagtggattagtattttttttttttaaaggcaaccaatttaagctataaccatttggttacaacatgagagggctagggagtggtggtagaggaagtatttgacaacatttctataaccatgaatggtgactttgtaggttatattggagaacaaggagagccgctctg

SEQ ID NO: 11848 - DNA, 19897 bp, Vitis vinifera
  Intron number 2 from transcript GSVIVT01023397001 (locus G SVIVG01023397001) derived from phytozome v7.0 (chr-ID chr1 4; pos 12593274 to 12613170 reverse strand)
ttgcaaggtttattaatcataggtaatcttaattttctttgattgtcttttttttaatacaatgcatttatatagttttatttgttggttttgaatcatacctttgtttcaatatggaacatatcctatgtagatctaggtttaaaggctaaaattcctttctatgataattctttttcatacatgcaaattttcgctaattttttttgccaatataaggactggttttattgagcatttacgttgttactcttaccaatttcattgtttgtaatatctgctgaacaagttcttaaggggtacataccagatcttatcattggagctaatttaatgtaaaagaggttagtatatggttttcatgctcttggaagagaatggccaaggtgttcctctgtctattaaggagagatgtcatggggccctatgtttcactggggtttgacaaagatggagtgggatagttgcatcatttacaaaagctttactttaatgtttttaggaggttgttcagacaaagcatagatgtgagaatccattttctttaggtgggtatggatagaaaatgaaaggtttagtaggattacttagttcatgaaagagatgaaccctattaatggtgattctggaggaaacagtttgatgtggctgggtacacctaacattcctgattgattcgtacttctataacccactttggttgatgaaaagagctgattttgggaagacagggcagtggcaatgtgaggacacatgtagtttactcaaagattgttatccctgatggtaatggaaaagaaatatcaaatctttggtggcaggctgctgtgtgatggagatgaattcattaagtagttttgaccttgcagagacattgatgattcaactgcagcattacacttcgatgatgaatttttcaaatagctcacttaggaagaagtcgttaagattagggtgctcccttttcacatctgaaacttgaacctttaaccttgaaagttctcttagtgttggaaatgaggaaaggtggtagaaattaatactaaactctaaaagtttctattgtttagtagccaaattcaaggttaagatgggggatagtaaagagttgtcggtgattatcatattggaagatttttattctctctctaccttaataaagaaataatcttcttggatcagccaactagtttaagcccatgatatccaacctctttaactaaaccaacacacaataccaacacaacatggcaaggacgtgggcattagatccttgttggatttgctttcaataaaactattttgatttttgattttttttatgtgacataaatatttgtaggctatatattttttatgtgatatgtacaaagtctcattaagattttttttccttttcattttgcaatgccatgccaaagatgtgtacagccccttaacttgattacatctaatgggaaacatgtatgatcaaaacatgaaccattcatggatgattgagggctctgagatatggaggtattaattggattggtagtgacgcatcagttttttaagaggagagtttgtagttttagggaaacattctttagaggagagtaattttgatgaggtttggagaaaattaaggttttagatcttttgagagggaagggatatagggtgattgtaggacatccattaggcacaggtgaaaaagatggaatgattttctatttgaacatgtattttgttaggtggtcattatagatctagattttggattgtccacatttggtgagtctttgttggtggtttggcttccttctttgttctgtactgctaataatttagatgttagctgatgggtttgggataaggatggtagaggggactgttggaattgttggtttccatggagttatgattaggtattgagatggtggagtggttcattcattgaatcaggcagcgagggtgagaaatagttttgaggatttcttagttaattataacttctatattaatctttttataagcctttaccatatggcggttcaggctactgctttataaagaaattatggggctcaagaacccctttaaaggttagtttctttggtttgaaggcaatgtcaggcaggattttcacggttgactataatgacccatgttaatattgttcgctttggaactattggttctcatgtctttaaaactcactaggcacgtactagttgagtcacctcttacatgtgtcaggtgtcaaaggacagctttgctgtccacacttctttccttattttaactcacatttctttccttattttagcctacaattgtttccttatttctccatttattattctgtacaattagcatatattatttgacagattatagtttacatgtataggactagaatcatgagggaatttatttgcttttatttgctttccatgtatagcatctttgtaaagtctatatataatatacaaaactcaaggccaaggtattcggccattcacacaatattttgacatggtatcagagcttgtattttgaacctagagtttacacgctttctaggtttttctttgggttttctcggatttagccctaggggctctcggatttagccctaggggctctctgatttagccctatgggcccatggatttagccctaagggctctcggatttagccctaggggctctcggatttagccctaggggctctcggatttagccctaagggctctcggatttagccctaggggcgctcggatttagccttaagggctctcggatttagccctaggggctctcggatttagccctaagggctctcggatttagccctaggggctctctgatttagccctaggggctctcggaaatagccctaggggctctcggactctagcccagctttagtttaagatgtttgtgaaaagtaagaagcaagacagagtctttaagtcatctacggaatctgagtactgggcgatgtctcttgcttgttctgaaatcatttggcttcgaggtttgcttgcggagttagatttttctgagaccgatcctacacctctacatgccgataatacaagtgctatttagatcacggccaatcctatctatcatgagcgcacaaagcatattgaagtggattgtcactctatccgtgaagtctttgaagctcgtgttatcactcttccactgacttacaaattgctgatatcttcaccaaggctctccctcgtcatcgacattgcttgctaagtagcaaattgatgcttgttgatcaacctgcatcaatttgaggggggctgtcaaaggacagctttgctgtccacacttctttccttattttaacccacacttctttccttattttagcctacaattgtttccttatttctccatttattagtctgtacagttagcatatattatttgacagattatagtttacatgtataggactagaatcatgagggaatttatttgcttttatttgctttccatgtatagcatccttgtaaagtctatatataatatacaaaactcaaggccaaggtattcggccattcacacaatattttgacagcaaagctgtcctttgacagcccccctcaaattgatgcaagttgatcaacgagcatcaatttgctacttagcaagcaatgtcgatgacgaggaagagccttggtgaagatatcagcaatttgtaagtcagtggaaatatgtgaaagagtgataatatgagcttcaaaggcttcacggatagagtgacagtccacttcaatatgctttgtgcgctcatgatagacaggattggccgtgatctgaatagcacttgtattatcggcatgtagaggtgtaggatcggtctcagaaaaatctaactccgcaagcaaacctcgaagccaaatgatttcagaacaagcaagagacatcgcccagtactcagattccgtagatgacttagagactctgtcttgcttcttacttttcacaaacatcttaaactaaaactccctactaagatagtttttgccattgaaacgaacaatagaatattctccagacattacaaaaacagaaatagcctaggaaacaaaaaaaaacatcgtcaaagagcctaaatctgataacaaacctccaaataatcgaagatctccaagagcctagaatcccaaagaaaactccaagatcacatcacagatgtgttgtcacaaccaccagaaaaaaaaagaaaaagaactgaaagctaggctagagtccaagagcccctagggctaaatccgagagcccctagggctaaatccgagagcccctagggctaaatccgtgagcccttagggctaaatctgagaaaacccaaagaaaaaaactggaaagcgtgtaaactctaggttcagaacacaagctctgataccatgccaaaatattgtatgaatgaccgaataccttggccttgagttttgtatattatatatagactttacaaggatgatatacatggaaagcaaataaaagcaaataaattccctcatgattctagtcctatacatgtaaactataatctgtcaaataatatatgctaactgtacaaaataataaatggagaaataaagaaacaattgtaggctaaaataaggaaagaagtgtggacagcaaagctgtcctttgacatcaggaacttcacctctctaagcaatatgcgatttcacattctcccttccatcgaaacatgatgttctcatcatgactcataaggctaattagtgatcaaagtctacatgtattttagttgggaattgactctaatatcatctatcatgatttgtgtagatattgtttagttttggctcaataaccttcatagacttaatatatattttcatgtactagatgattcaatccttataaatagtagcaacaaggataccacattgaataacttctaaggagaaattggcacttggctactagaattttttttttttttggtgggatcctatcataattttatttgtttttgaaaagtgtcatatttgttgttttcattatttgggatcctttaggtgctctcaagatcaatctaggatttgttactcacttaggaattatttcattggtggaaagcactaaggtatggggaaaccaaagttcatttgatgatgttgggaaccctaactaggttttgaatgtttacaggtcctagattttgggttggggagttagttagattccctataaaacatagattaaaaaaatcccgcaaaaatgttattgtaaatttgtatctagaaaatcataaatattgtctaaaattattacaaaacaaagatgataaagaaaatttgacaaattttttttttaatttacttatatatcaaataacctagagtagattagagtttaggctttgaatttgttgttgtggaaatttaggttttttttttttcttcttcttgtatttttcttttgataaataaagaagaatatatattaaaaagaggttctaaaagagcgacccaagtaatacaagataaataaacccaccctaaacaactcaaacaaaaaggaagctgcaaaaagaagctacaacaactccattctcaacgacagcccaaccaatcagtgaaactaactagcgtcaaaggaccatcatttacaaacatcctagtttctaaccaacaaaagcaaacaaaagaacctaaagcctttggatggcaagcatgtcatcttcaaaagcaatcctattccttaccttccaaactatccaaaagatgtataaagagtttgctctccaaaatttcttgcgctttttgcccacaaacaaaccatgacaagccaatagtgtctctctaaccaacgagggaaggacctaagacacccgaaaaagagcaaagaacatctcctataaaatgcttgtctttacacagtggagaagaatgtgatctttggattcttcatatatttggaaaagataacatttatttgctaagaccaccttcttttttgaatttggtccaaggttaaagtttttccccacattgcctcccaagtaaagaactcactgtaggttgcacccctgatttccaaatgattttcattggaaaagataccgaattgcctgactctaaggcattgtggagagacctaaatatgaacttgccgctctttgtctctatccaaagcatcttgtcctcctcatctctatgcactctttgcccatgcaaacgcaatagaaaactctccacataatccacctcccaatggttaaaaggtttagagaagctaggctctaattcccccctacaatttgaattccaaatattattcacccacacgaccttggaaatggctaaagcaagcaaagaagtgaaggaaacgcacaaaagtgtagccccacaccacttatctttccaaaaattcatcctctgcgcgttacccatcaagaagaaaagtctactactgacaagaacccaatccttccttaacttttcacaacccgacaccatacccctccctcactttctaagaacactactggtctctttcttccccatacttcccattgatcacttgattctcaaaggtccctctcttatttgcaaaacgtcagctccatttgcaaaggagagccatattgagagtagaaaaacacttaacccccaatccccctttccttttgtctaagcaaacagttgcctactttactagatgaggtttctaaccttaatctgaccatccttggcgtgcaaaacaaagatatgaaataaatgttcaagctagacaaagtgcttcgaatcaggttgattctccctcctttggaaatgtattgtctcttccacatgatcaacctcttgcgaaacctctcttccactctatcccaagttgccatagacttaaatagagcacctaatggaagccccaagtaagcggaagggagacttcccaccttacaaccaagctctgaaaacagttcctctacattatccactcttcccattggaattaactcacttttatccaaactaattctcaaccttgaaatgacttcaaactatataagcaaccaacaaaaataggtcaaaccacataagcaactaaccatgaaatggactctacatttcttcttctttcatgagatctccatttaacttttttctaaatcatgtccttgcattcagaaattctcatttgcaaagtgcaagttcatggctttttgtcctgcatttggacctcataacaattaagagactttttttttttccagaaaaagtgttcttggaagtttagttaggtcttttggttgctttactacaaggtctgtatttgttagaatataatatttggagtctagaagttttttttggtacggagaagaggtgctcatagatgtttgttaggtcctttagttgccttgctataacttccttatttgttaacttaataattagtgaatttttatatttaatatccaatagttagtctatgatgctacatttttattttccacattgttgaaccattacttttgatgatgctacttcagccccacgacaattaggagtctttcttttgtaagaaaaaagtgactttggaggatttatgagttttatgccatttaattgctctactttgagtttcttatttcttggaatttaataattagtaatgttttttatttagagtctaaaatagaaaagaaattcaagttgttgcagctagtgatttactgtgtttatattgttcaaatagctgtattattcatgataatattgtggaaaccataataatcagaaggctcttttggtatggaaaaagtgtgcttggaagttttatgccattgaattgctttaatatgagttctttacttgttagccaagcaattcacatattccttgagctatagccctaaattctgtctttgcgctagagggagcaaccgtcaggtgtttcttacttctccatataactaaattccctcctaagaaggcataataaccagtagttaataacatatttatcatggttccaacctaatcagcatcgtataagcctttagtttgagcccattagttttttggaataaaggatccctgtccaatgttcctttcatgtatataataattctacaaacaacatcaagatgtgatttaactgtagcatgcataaactgatttacaacacttactgcacagactatgtatggccttgtatgtgataaataaatcagttttcttactgtcctatgatacattccatgatcaaccattttctcttccttattttatcctaacttgtggtttggcctaaatgaagtatcaatgtgttttctatccagtatatctgtctcttggagaagatcttggatgtgtttttgttgagaatgaagatcccatgtttagatcaagcaacatctgttctaagaaaatatcttattttgctgaagtcattgatcttgaattcttttgcccagtaggcttttggtcattttcaatatcataaccattaacaataatagcatttacatatacaatcaaagcaactacttttctaatggaagaatttttaataagtttagatcaacttgaatatgaaagtacccgtctttatcaatgacttggtgaatctccctaaccaaagatcatgatgactgcttaaggccatagagagactttttaagtctgcataccttgttctttcatgatttccattcttatcttggtggaatatctttatagatttccgcttctaagtccctgtgaaggaaggcattcttcacatcgaattggtgtaagtgccaatctttatttgctaccaaagagaagaatttttattgtattcattgttgtcatcagttcaaatgtctcttagtaggctataccatatgtttgggtgtaccctttggccataagtcttaccttgtaactatcaaaggtgccatcaaccttgaacttgattgtaaaaatccatttgtaaactcacccattattttttgttttggtaaatcaacaattttctaggtatggatttttttttttttttttttttgtgtgtagtgtcctcatctccttattcatagcctccttccatggttttgaggtcaaaacttcttggattgatgtgggaatttgttaggaaaatacttgagagtgaaagtttagatatagaagtgatacttttttttatggtttttatggatacaaaattagatatctggtgcttggtataaattgagtcccttttttaagagcagtgggcaaatcaagatcattattagaatgattttttgagattaaaatagaattttgattatttgtttttaatgttgatgattagagtaggtgaggtaatgatggatatttttttcttggagtacacattgaaagatggaatcttaggtctcttatccatagttttttcattattggactaattggaattttgattggatttttaggagcatcgaaagagattgcaacttgttcattggaaggatgggtaccaagactagcattcaaattagggtcgtctcagtttggatgtgatgttcaccaactgcaacttgaatgtcttgagtaacttgattattttcaaccatgacaatttgaccatctgaatccaacatccatagctccaaaatcgcacccttatctaccatttttgagttattctccccctaaagataggtgttttcaaataaggctgttcttccataacaatagcatccacaatgacatatttcctccttgttgaaggatgatagcatttgtatcctttttgtgttgaagggtaccccaagaaaacacacattacaactgtaggatccaacttgcctcacaaatgttgttggatgtgcacaaatgagaaacatgtgaactgttggtgttaaagagccaacccctttgaaatttggaaaaaaggcagcaagccttttaactggtgtttgaaattcaagaactcttgtttgcattctatttatcaaataggctattgtcagaataacttcttcccaacagcttttaggcactttcttttgaaacaagagagcaagagttacctcaaatagatggcaatttttcctttcagccaccctcttttgttatggggtgtcaacacatgatgtgtggtgtaaaataccctcacgttccaagtaacatgtcccttcttgattagagtactctttatcattatcggagccaagtgtatgaattttggcttcaaaccgagtgttaacaagtttgtgaaacatagggaaactagatgagacttcaagtttggatttcattaagtaaacttaagttgttctagtaaaatcatctatgaaggttaaaccggttagtcctcgaaattttaatgatacaataagggacctaaacatctggatgaatcaaactaaatggagacacaacttatactcttttattaaaaaactcacatgatgttgtttagcaataggacatggctcacaataaaatatactaatattatattggttgcaaacaaggaaggaaatacatttttcaacaaaggaaattgtgggtgtcccaattggttgttccaaataaaaatctgaccaggttgtgtttgagggttgaaaccaagccttaaaccttggattaccactcttccaattaaccaacaagtagtaaagtccatctctaaacaacaattctcaatcatcttccccatcgtatggccctgaaaataacaaccataagaagtgaacacaacagtaaaattgggacctttgtgatttttccgataaacattaggtcgtatgataaatttggaacatgattctcacttttaagatgtgagggctagatgcagagacagttctgcaaaggagaatttgctggtttgggattgaattgaaatcttttgagttttcgatagaggaagttaaagggaagtcgattggcaagataatggagaggggtcatgggttttccacttggattagatttggtgatagggggttagcaaggttgctggaggtgtagaagcttgttgtgaaagtggaaggggctataagtccttcaatttggggtggaatgaaggtggaaggggctataagttggatttcatagcaacaagccagggagattcctgttgtgctttgtgtcgtcttcagaggtgaaaggattctcctcagtaaggaagggatggcccaagggcttggaagacccttgcctcaaagttaaggggcattggtgttgttcaggagcttaggcaggtggagtcttcaaaggaggatgtttgtcttgtggtggacagtggagaaggaggggctccccctaagggtaagcctgcaaaagtagtgagcagacgaaagaaagagttaggtgaggcagtttgggtttagggtgagtcgaatgaggtgtcaaaaaattaagagcttttcaaaaagtgtttggtagggagatgagggaggactgtttagactagatatgggatttgggttccttaaaagcttaggctaggcagtcttggagggggaaatgtaattttcatctctccttgctgggggactctctttttttttttttttttagtttgataatattgagaaagaagaagatagagaaaaatataacttctcattctcattattgatgatgaatatttatatataaacatatttgagttctactataatttaaattctatctcccattctgattcaaactaatagtagacttctactctaattcaaactaataataaatagataaatactaaaatttaaattaaggatgaacatttaaatcataatattactagatttttgatacctatcaaaaaaaaataatattactagattttcgatacctataaaaaaaaataatattactagattttcgatacctataaaaaaaaaaaatattactagattttcgatacctatcaaaaaaaaaataatattactagattttcgatactcaccctcaagttggtgcatagatatttatcatgcccaacttgcttgttagatgttcaaaacttggtcaatgaaggcttttggttaggatgttagccagttgctaggtagttggaacaaatgacatgcaaataatatcggtttcaaaattttcttttatgaaatgtctatcaatatcaatttgtttagttatgtcacattgaattggattatttgcaatgctaattgtagctatattatcgcaataaagcttgaaagtgtagattgttggttgtctcggctatttcaggactagcttaggccacagtacttcacaaaccccatgtgtcgtcgctataaattcttcctccgcactactcctagccactacactttgttttttagttctcctagtaaatttccccatataaacatgcaatactttgaggtcaatctcctattagttattgaactaacccagcttgcatcaatgtatacctcaactccccgctgctcattcttcttaaaatagtcattttcttggtgtattcttcaagtaccttaaaattctataaattgcttcaagatgtacttcaaaaggtgattgcatatattgatttaccacactaactacaaaggcatatccgatcgagtgtgagataggtaaatcaacttatcaaccaatttttggtaccttatagtatccattggaatcccaacttctacctttccaagctacattaggatccataagggtatgtgaaggtctataaccactcattcctattttctttaagagatcaagaatatattttcattgtgaaacaacaattccctttgttctccattccaagaaaatatctcaaagcttcgatattttttaatttcaaatttagtagttaggcacttcttcaaatgattcatctcaaccatattatctcccattagaataatgtcatccacagagactattaaaattgtaactttacctcggggagaatatttcaaaaatagggtgtgatttgtttgtccttgacaaaaacttattttcttcataaaacaggcaagtctctcaaaccaagcacgaggaaattgcttaaggtgatataatgacttttttagtttacaaacctttgagcgaacccttttatcaaagctgggaggtagatccatgtacacttcctcctttaggtctcccttaaggaaaacatctttagcatccaattgttgtggtggctagtctagatttgcaacaattgataaaagaactctgactgtatttaattttgcaatgggagaaaagctttttcaatattcaattccatatgcttgtgtaaatcccttagcaacaaggcgtgccttatacctttgtagagagccattagaattatatttgatagtgaacacccacttacagccaacaatagtcttccctttaggtagagttaccacttcccaagtcttatttttttcaagggccctcatttcctcaagaacaacctccttacactctggaatctttaaagcgtccagtacattcttcggaatttctatactagaaagttgagaggtaaatgcgataatggaagatgacaaattcttataagacacaaaattggacatagaatgttgagtacatggcttaacatctcttcgaattgcaatagggacatgaagatcactaagagactcttcatgtttaatattggaagaactatggtttagatggaggcttaactttttcaagtgatgagattagatttgtttttgggacatattcatggccttgctataaagtgggttcctctattctttgaatatatttctcattgagtaggcacgaaggtcttcattgtttttatttctattttcacggaatttagtattttcatgatcttgatctgtgttggcattaaggcaggttgtccaacattttcaatagataaatcatttgtttccaaagtttatctactaacggaaaactcatcaagcacactgttgtttttctattctttttgaaggtttttctgggaattttctcggagtttctgatcgctattgaactaatgggggttggaacaattggtctaactcaaacacctcacttggaatgaaatctacacttttattctcccattgaggatgatcatgactaaaatagggtttagtttcaaaaaaggtgacatccattgttacaagcattcttctagtatgtggatcaaagcatttatacctttttttgtgtttaagaataataatatcaaacaaatatgcatttggatgctttagaatcaaattttccatgattttgattatgaacataaatgaatgcagtgcaacaaaaaatttcaaaggtaacgtcattgaaatctatggagtagagaaacacatattgaaaaaatcaagtggagtttaatattttaaaaccttagtagtcataggtggcagttgaaatagcttcacctcaaagacatttaggaacttttgttgaaaagataagtgatctagcaacttcttaaaaaatgtttattcttttttccattttccaaaaagtagtttcctcataattgattaaagtattcttctattccattattagttctaaaaatttgaatatttgtttaaaattgtgtttgaccattttgtgaaaaaatttaaaccttatgctacttctaatttttcttttagcaaatacacccaagaaaccacccttgtatgatcatctataaaggtgataaatcacttttttcttgaaaaaacgtcaaccctagaaggcccccaaacattactatgtattacagaaaagggtttagaggatttatagggttgtgaaggaaaaaatgtgcaatgatgctttgcaagtttacaaatttcacaatggaatgaagattgatatttattaataaacaactttggaactagatgtttcaaatattgaaaattgggatatcctaaactaaaatgccataacattatttcattctcattagttactaaaacaaattcaaaataagtattatgagcttgtctacctagattgattccatcttcaaagaaataaagtcctacactttgtctagcattgctattcatcttcctctagttcaaatcttggaattcacattgagatgagaaaagtttagcttgacacttcaaatcagaggtgaatttgctaactgacaatgaattgcaagacaaattaggaacatgaagaacattatggagtgtaaaaagtgagaaaattttgataaatccttttctagcaatagtcgatagtgatccatctgctttttttatttttttgtttcctacacaaggactgaaaaaaaattgaagaactaatgatatggtcggttgcaccagaatctatgatccatgggcaattaatgaaggctaacaagggctatgggaagatgattacctttttgggctaagtaacaagaagaggattgatttgaagagatttgagactaaagaagtttgtatggttgctctatttgatccttagtaaaaggagatgtttctaaggttgatgctcctgttcatcgctttcgccttgggaggcatgactttccctaccaggtttcttcttccaatttgatggcttgtcgtgaatcttctaataggtgtcacgagtatgccatggtttcttgcagtggtcacatcatggtttgttaccctttttagaattccttttttctccttcttgatcaaatcccttcagaactattaaattctgttctagcccttggtgactcaaggttcatcataatggatcttctagcctcttatcttctaacttcagaaactctaggagagatggcaatggttttctccctagaattctacctctcacttcatcaaggtctttgttgagtctcactaagaaaaaaagattatcattctctactcatttcatgtaccttgcactatccctagggttttcttattcctcttcataatacaaatctaacttatgccataaaatcaatatctcattataatactcagtcataccacgatcccttgtttggattgtcacaactttgattttaaattaagtatcaaagtagaattttctagatctgagtatgtttcttggactacttgccacacttccttggttgtttttatgaaaagatagggcttccttattttttctccatcgagttgatgagttaagttgtaatcagggaatttttttatctccatgctgccaactttggatcatgcaccatggttgatgatcttggaagcggtgggaacaatgctctttttgtgccttgatgtggcagttgggatgaggggttttttagcctttgaagtttaggaagggactctgtgtgtgtcgagccttgttacaacccaggctctctaatttaaagggggcctatgtgtgataggcctttcaacaacccaggcaatccaagttaaaggaggttggtgtttcaaaaggcctacaaaaggtttcttgttaggatgacccaaaggttttaagttgaagctcagtcttgaaaagccctgtgatgggtaggttaaggagggatctagggctcttgtcggtgccattttggagaaagggttgcaacactctaagacttcaagagagaaagtaagtaacaaggaggtttgcatagatccccttacacgtgagtggtatcggggtttagaggaattttgggggtcaatgatgttcttttggttgaagcagtagggttaagaggtggtaaagactcttttctagggggagagttgtcccttttctcttttcctttggttgcatcggttgggctgccaatcaatggaggtagggttctgatccaacccatggttaaaggtcatggctaggaaaagaatgcttagttgaaaaaggggcttccttgtggggctttggaaggcggaagtcaaccgcttaaaatgttgttgaaggatggttctctattggagtttccatagaacctcaaggaaggtccttttgttaaagacattgttgctagttttgtgtagtgggacttttccaaggtgatatcaagtagttcttttgtgggggaggtgcttcctttaaagagtctctttgataagctcactaggttcagtagctttttgagaatgccagtgatgggttttgaaaatgagataatttctttgatgaagaagatggatgcaaggaggggacatggagacaaggcgttaggggaaggagaaaggaagctaaaagcatcgtcctatttcaatagggggatccgaaagttggagtgctcggtcaataggtctcccttgttagctagggattgagtgaagagcattggggaccaaactattattaagtgagaagttcaagttgagttagtaattagggaggcttgtagggggcttaagaacggctttgtagaattgtttcttctggggtgttaggtactaggtgtgaatggagtccttgttgttctttttgttttttgtggtggtgcattttgtatactaggtgtgtatgttgttttgccctttgggcttttaatatattctcactttttatctgtaaaaagaaataaaaaataaaaaataaaaaataaaattggaacacataggagagaacttaaggacaaggtaagagtaactttttatcatcacatttttcttttttcttttttctttttttttttaacatggtaaatagcttgaaagcacagttgaaatacttctcctatggtctgaagcacttgaatctattatccaagtgttagaataatttttgaaattcgttaaggcttctcgaaggacattaaggcctttgtacctaagtgaaccatggaataagaaactgaaatttgagatgagtttgcattcttggcctcaagttggtttgtcaacttctttagcctttcgatatcaactttggtaagctgagaggactcttggttatcctccatggtggtttgatgagcttgttcaggttttgttgactgattcctgccctttcctctaggtcctgcagtcccattgttgtcaaaagaaggtttcctatgaagttttcagctagtatacctgccgtgtctcagcctttgacagtaataataccactcttgtctttgtctactttcttcttccaatctgctttatagtttccagcattgccagaggatttttgaagccacaagtgctgcattttcaggagtgagattgcttgcatttccaagcatcactcttcgtactctcttctcaatagacaaagacatatacatcacttaatgaaggaagtggctctttcccaacaacatgactacaaccctgatcatactcttgatttaataatcccactagaatctgaaagatttgttctctttccaaccaaatctttgagtttttgagtatcggctgcagactccattcaatatcatcatatagatctaattcaaaccataaacctttgagatcattgtattactcaattacagattcaatctcttcttaagtattgataaatagacgctttaattcataaagttggacaagaatgccaaccttggtgtaactctgtgtgactgcctcccagatttccttggctgtagtgagaaggagataggtttttctgatgtttggttgcttttaagtgaagaagccatgacatcactattgaatttaagtcttccctgctctcatatttaggatcttccactgctggtggatgaagtaacagatggttcatacatcttcattaaaactgggtaaaaatatgtagataataattgaaagaatggctatacaggccaaaataaatattgacaatgaagaccaaaaccctagaagtttgtgatgaagacatgcacatgaagggtaggacagtggaagcccaaaatgagattacattaatctaacccgctctaatatcatgtagaaaaataatttctttttgttccttggaataactatgtacagaaatatatagagctgaatataaaaagattattcttacgacatacaattagaaaattagttactcaggttagtaaatcatgtggtaaatcatgggctgcctaggaaactaaataatatacaaccaaattcatgggatatttgtcaaacatcatatcaagagggaattagtatctgatcttggaatttgccaactttcctattaagaaagaaacattccaagatcttcagcaagtgttcatgctactgttgcaatgtaaaggaaagaaatttttggtggtcaattttgtactttgtctgctgcaatttaagtcttctaactgatggaagaagtactcaaatgatctatgaggctcccactaaagacctctatgccaatgtagcatgaacaataccaattcttactacaataccttctacaagaacttgaatcttttactttaagaaatagttatagtttgaaaaataaaggcctgaaaaagcagttaccaatggacctaaaaaagatgaccataaacactaatttttttctccttgacccaaaagtcttctctgattattttgggttgtagatcccaattttttattcttgttttggcttattagtattgctgaaccttgctccattaactgaatattacttctttcagaaagtcgaaagtggttggatgcctatttggtttcttttgatttgtatgttatgctttttcggggaaaagatttaaaacttttttttaaaaggaaataaatagatttttctgtaatttttcatgaatattttgcattgaagtggtatttgccttcatgtatgtttaaaattcattatttctctaattttattggtttatctataattcaattgtttagaaaaatttaatgtttcagtaatttaccaaaagcccatgtttttactttaataatggtaagctacatttgatagcatattggtgtttggttggaacattaaccatactttacctttttctgttttccattttatggtgttatttatcaatgtggtctttggtttttttgtcattctag

SEQ ID NO: 11849 - DNA, 5953 bp, Vitis vinifera
  Intron number 1 from transcript GSVIVT01003930001 (locus G SVIVG01003930001) derived from phytozome v7.0 (chr-ID chrU n; pos 13887872 to 13893824)
caggacggcgtccccgccaccctcttccctcacaggtttcactttctccttctccttctttaacatttacatttttcttttcttttctcgccaaccaaacatgagaatgcgcgttttaggcatagatttcgatttcacgaaatcatttatttggatttggagctgtcaatgccattacacattttaacacttctttctttccacctttctgacaagagagagtgcacattttagatgggtttctgagtcttaattgatgcacaggggctgcatttcttcttgcatctcaccaggtttagatgtgattttatcttagtgggcaaataaattatacaaggcctatttggaaaaggggcggaacaagtattcaggattgtacaaggcattgggtacgccaagctaccaacaccaaacaaaaacaaaccccaattaagctgagtctaagctacctacaaaatctgacaaggaattaacattatctctccctgtgctgaatcccctaaatgatgaagttttaaggaaaattttaggtattgtgctttagtacaaggtattgatgttgaattcaggaggtatgttcagttagattttttaatataagggctttgtggggaaatgttggtgacagaattaatggctgccggttgtataaaaggaagttatttactatgtcaattagtataattgaagatcaattgacaactacatgctttgatgtctcacagacaaaaccattaggtttccgactgagtttcagacatatgcatcaacctagtgaacacatctatgttttaggattactggaatcttgattcacagcaatctacaagtctttgtactattacagcacaggctacataatttattctattcagtcaaagaggaacatatgttgaactttataacccatgtggcttaatggggtgtatgatatgcactgtgcgccaaaatcctttgagcttaagctttttggggaaattggttgtctaacttggtattaaagctttgtatggccttggcaggaagtcatgtgttcgaacctcactgcatatttatttccctactttattatgcccctatgtgaacccctatttttaccttgtactgagaaagggtgttggagtgcacaatatacattgtggttgtctaacacagctaaatcaaatgagattctgatgttaactgttttctaattcagatatgtagagtctgcaggttcaggtaccacttgtaatgaaaaaatagaaacttttacttaaataagtgtccgttacacttctggtgtggcaggtatactatgtgtacttgggtgtgcccctttggaatgtttgttatcttgctgaaatagaaaagaacagaggggctttatcattgtaaaaaaaccctaggctactgatgggaaaatttttaaatttttctggaaaccaaaataacattcaaccattagataataaattggtttccttctattttccctggttctttcagcagccaaagaattgcttctttgtgaagtagagttattttcatttatttgactgtaagtgaatataaatatggcaattgtgcttttttagttacatttaagtgaatttggtcaagatgtatatgaatgatgccagtatggaattttttttggttgatcaattagacatggtgttttttgtcactaaaattaaggctttgaatgctgatagttcagatatctgagcatcataatggaaattgattaattccttgggattttatgttatttttaaattttagattcttatccccattgtacattatgcccttggacattttccatgctgagtaattgacctgcatgtatacctggctttttatttatttattatcagtaaatgagatttgtattaaaaagagccaaataggaagcaccaaagtacacacgatgtatacaatagctgccaaaaagtgccaaaaaaaagaagagaaaacaaaaagctagtccctccctcaaaccgaccccaaccaatcaatgaaatcaactatggacatcaatctttcacttataaacattttggtccaagttaacaagttacacaaaaacaagaattttagcctttgaattgagagcttcacattttcaaaagatgttctatttctctctttccaaattgttcagaagaggcataaaggtgtcttcttccaaacttttttccgctttcttccaacaaatgatccatatcaacctaacaaaatctctctaatagtagactacatcccccaataaactttgaaaagaaagaataatagctcccacaacacccttgccttgccacaatgcaaaaggatgtggtcaattgactcctcatgagatagacataggaaataacgattagccaaagaccacccctcctttgaagttggtcaagagttaaagcttttccccaagtcacctcccaggcaaaaaagcttaccttaggtggaacccacgcattccacacaacactagttgggaactgcactgcacttcttgtctctaggctagcataaagtgatttaacaaagaaaatctcactctttgctttaaccctacacaccgtatcctctttgtcctcatttaccactttaacttgaaatcttgccaaaaagtgttccacaatgacaatctcccaatcatttagaagcttcggggagttaggattccagccacccctctcattagagtgctacaacaacttcgccacccaagcttctttagatctagaaagggcaaataaggagggaaaagaaacatttaacgactcattcctgcaccatttatctttccaaaactatatccttcttccattgcccaccgaaaaggacaatctacaactaactaaatcccacaacttccttatggtcttccataacccaacactaatgtcacttctcgcttctttagagcacccacccccttccacttccccatatttacaacaaatgatttgtctccaaaaggcctccctttttgaagcaaaatgccaattccacttacaaaggagggccttgttaagtgagtgaaggcgcctaacacctaggccccccttcgttctgttagagcaaacagtatcccacttcaccaaatgaggcttactttctaaggttccgcctccccaaaggaagtccctttgatttttttccaaccttaaccgcacaatcctcggcatccagaaaagagacaaaaactagattctagggggttgtaatatagtagtccctggcttttaatatagttggttgataaagcatggcatgtgcttattgattctagggggttgctaggttctgatggtgatgtgtccttttctactacttcactccactcaaaaatattttgcttagagctcaatgtccagtatttctacatgcatttttttttccttttttttttgggtctctctatacatagctattttgtccttgctagttaagagatgaatttaatgtttttgcttatcaataggacaaatatatttaacattgacaggcatgttaacatggtaaaaaaatgttctagatgtgaatacaaatgtagtctgggtttggattgctcaattattagtttggcaaaattggtgaagtgccatgaaaacataactaaaaaagggaaaataaaagcaacagtaaaatctcctctcccattttgggacaggtgaagtcgttgattggaatggaattatgagaaatttggatggaaatttgtgatggattgagtcctgctgagaagttggtggaatcggatctgaaggaattcaaatctaataatcaaagactaaactttactaatttgatcccaagccttttgttttttatttttagttttcatacattgaagggaaaagctattccttcagactcaacaagagaaaggaatttatatttattttcctttctttcctttgcttggttaagtttcttcctctctattccagtttgcaaatggagtaaatggaaagcattctctctaggactgacttgactgcagcttcatttatttcctggataagggactggagtgttgttaaaggaacaatagaagacagaagaatgaggaatccctaaaacaaagggaaatgacaaaggccagaaaaggaaaaacttaacaaacaaaaagtgtgatatgtaacacagtctgacagcaaaatctctccaatcagtgctcaactgctgcaagactaaaacagaaggaatatttgcctctctgtttctctccacacagtaataaagtggtttatgttatttatttggtatctactaaaggtggacataaatatgataatccaaagtattattgccatttttagaatcttccttggccttctttcatgtgcaagaataattgttagtgtcataccttacatacatatatatatcacacacaacagagagatatatggagcaccttgctttgcctcaggctaggcacctttaaaaagacaccactgtaagcccaaagggtgcaacttttgtgcaaagtccaaggtgcaattgtttataccttgttttttatctttccattccaggaaaggttggagaaagccatggtttcaggtgatgctgcttcttttgttcagtttttttcatgaaattatcttaaatttttttcttctaaactgtttactgaaacagctttgtttatttatttttgggtaaggtttctatatatggtctttttatctcaaaagcatttgttcttactttgacattacatagtgttgtatatttgtctaatgcctggttgatctttaataatactctgctttctattttaattataatattattgagcattaagttaattctagatttttattaatgctctatgttaacattgttttggcaattttatgtacttgttttatgaactagtacacaaaagtgtataccatgattcttctgtctatcaataactgcatgcattgcatgatggatgtgaagaagtaggccattatctcggcaataatgaaccaagctagtattagcagtgaatccccctgttaagtagtcatgcattatgataggaactcccgattctctagcaagtatagcccttttgataatttcttcaatatcatttttatccttttgagtttagtgcataattgcaaatcctgatattatatatatatatggaatgataaatgtattggttgtgccaccgctttattcaggcatgcaccttgagctgcacctggtgacttggctctaggaaacctttgccctatgtatgtgtctccctttctcatgtcataactatgggtacaattagatctatgaaatgagtccagagaacttctgtttttgtagtgtttgcagcaaatttctatccactatttgccaatctctcagtaacaaatccttaaagagagttgtttcctttcatatgtgccactacttttgattagtagattggctattaaatgccccagcatctgcaataatgcaatagaggcccttcacagatggtagacagtccctgatagaggccctatgccctaaaggaaaattgttatagcttttttttttttctctctcttttggaaagagactgaaatatctgatgggagtgttttggaagagaattcaatagctagtgttcaaatggcttctcagatttttggaggcttttctgaggctgtgtttttataatgtttggtttgttgttgtgtatagttggcgattggtcctttcttgtgtgccttagtagaatgctgtctccctcccccatgtatttctttgccaaatttctacttatcataatacatgccttatcacctttcttatacattctattcagagacttttaagctaatgaaagatgtgtagactttcctctagaatgggctacggtccattgaagactattcacaggaatggattttctcatgtctttcatcttgtcgcaggtttttcatcaccagctctgttcttgatcttacaa

SEQ ID NO: 11850 - DNA, 2777 bp, Vitis vinifera
  Intron number 2 from transcript GSVIVT01009216001 (locus G SVIVG01009216001) derived from phytozome v7.0 (chr-ID chr1 8; pos 6313556 to 6316332)
aagccacgagcatctgcagtcactggtaatatgggttttttttttctttctttcttttcatgaataagatttgggaatttatgttcgttgctttaattggtccatgaaatctatgttctcggtgtaattcaccttttttctcaattttaattgtagagaacatagctgattgccctggtgttttattttatttttttgatagcgctttcttaacctctgtttgaatcatgaaaaatttgagggaaaatacgaggaaaagaaaacgagaagaaaaaaaaagcagggaagaaaagtgttggaaaataaaataaaagcttaatctcaataattattatttttccatgattatccaattttattcctcttttatacaaagaatgtaaaaatttaaatgtataaggtgtaaattttttaactgtttaagtttttacaatttccattatacttcatttcccttccaattttttcatgggaaaccaaacaagagaatttgagttctcttcatttttccctcctctgtccgcgccttccaagatccaaaagtatctaccttgttttgcactgcctcaaatgatatttcttccgtgctcctggtattcacaatgcccgggctatgttctcggtgttcttttaattgcaatgtaggcttgctttgttctaaatggcttaattgatatttaagtacaccagcaaaaataatgaaacaattcaacttgctttgatggcactatgtatgcttctttgaggggcaagaatagcaaatcctaggatatgttctggagctacctagttaggggtttgggttggggttgtgcgagcctatgggataaaataggtttggggctaccgaaaagaaaagcacttgcatggttgctgagttgcagcatagttcattctgttgaagtaactctgtctttagtcagatcaatcaacttgacttctctcaaattttgcatgttgtgatgctgctcatttgtgcgacatatcaatccccatatgattgttgccttgtccttttgattcccttgagatgtacatctggggtcttatagaaattggaaatattttatatgctaagaataaacactgtccagataagttaaagataacaataatatgagaaggaggcagctgaattttactggagattatgagttatgattttgaagggaatcatgatggcacacatcatcaactgaaaaattcttaaataagcattgttggttcaagttggcttttcatgtcattgatctatttgattgatgaataaagtgaatggtacagaatgaccatgcagctgggtgaccatgcaaatgtctcttgtttcatttttattttattttatggtggtcttatggtccctatctagttttatgtggggctagaccccaacccaactctctatcctagcccctagataacttaaataaaactgcaaattccatgattgagacactgaaccagttgagttatatggttttacttgccatatgaaatagtggtgtttcttggcaattgctaagtatgctggaaatggatatgttttggctttcccattatctttctttacacatgtttatagtgttgttgctttagatggtttgttccaaatctatagaaatgtgagggtcactctcactagattttggaaagtattatggaaaggaaaagaataagaaggaatgcacatttaattcacttgtttaacttttcatggaaaataagaatgaagatagaacatagtgaaaattgttttaaaaacttgtacagtttcaaactatctgtttgttgaaaaagaaataaaattggagaataatcagcaaaaatttattaagctaaaacttattttttattttccttttgttttttgttcctttattctttcctttgcatttttcatgatctaaatggagctttagtcaaatcactttatatcttaaattattattgattttctgtttcgaaaagttgcaagtcaaaaaaggaaaaacttatgaggtttaaaatgatagttagcttaagcacgtgtcccaagtttggaacctgcctcttgagaagcccattttctgaatcattggaaacctttcctttttttcaacactcttctcttttttccttgttttgttctgaaacttgagtgttccaaagaagattgtttcaactgtgtgcatagggtgcaacccatttttcttttattggcactatttaacatagttgcttgccttaaaagaaaaagtcatcctgaaggtgtaacttaatgctttcttgatatttagataaaatcctttccaatcaagattcttctgaccttctattaggatttccatgacttctttgcattctttgtcactgggttcctcttcaagaaattttcttcatattgtttctccatatcacgtcttccctttcaggtcatgctccattcactaataccgcaagacttgtcaaagacaaacaacccctcttagaaagtgcttctcttagaattttgattttttccgctgaaagcaacctgcttgagctacacagcccttgttaatactcatttgactgttcattctgattacattgccaaatgctgtagtaatacataaatgcttaagattgaatattgcattcatctcccaatagttggtggtttactcatgttcattaatttattaaaattttcagttaacctctctttgagtgggtctaacccgagaagtttgctgacaactgaataaactcttatgtttttagtgacagatctattccttctacaaatattgatttgc

SEQ ID NO: 11851 - DNA, 1881 bp, Vitis vinifera
  Intron number 21 from transcript GSVIVT01022409001 (locus GSVIVG01022409001) derived from phytozome v7.0 (chr-ID chr 7; pos 19811535 to 19813415)
acatcacaaggaaaaagaaattgcttaagaaacaggtccttactttttttcattacgatgttgatctcttataaacatgttttcatatatgcataaagtggctattagtgattcttgaaaaatatttttccagttcattaatgtgactggttcttctggagagttacaactatgaatgtccatggctttgcttgaataataaatatagcttagggggtcaataatgtattatatatcctttatcacctatatgaggtacactttgttgttatattttcatccatgcagaaagtgttcactgttttcttcacgttcctattatatctgctttgcatctgaaaaatgtagaacttttgttgaaaaatgatgaagcaatatgttagcactcaccatatgtagtttttgaaatttcagtaggacctagaatagaaaaatttatgactataccaacaatgcacaattatatgataggaatgtttaggatatgaccaattatgattcctctgttttttttttttttcaaaaaagaaaaaaaagaaaaaaaatctcacaacaatatgtcacatatgtcagaagtagtattctcaaaattccttattgtttccattttgtcttttagtagttattctttgatggacaagcttaattattgtttgtaaacattcaactagtgtgggatggttttttgacatgtgaaaaagtatctgatactgtagttattgcagggaaaagatgactgttatgttaatgaccacaggagtcaaactcttgaattgcaaaattgtgatgcactgaatgacaattaactgaaattaccagaaaagttcatccttcacatttgttatgtagtgtttaaccatgatatagcgcttaggtttagctcagttggcattatgtttgaaagcctcattccttacactacatgggtacaaattgaaatactaatttgcttttatccttttttcattccgcaaaagaatatgagaacctttgaagcactgaaccttggggatggtattctttgcttagacattggatcatctctttcatcagtgtccaatgactttgggtttgtagaacaagttgtcttgaaaggttggcttgtctttggctcatctcccagagattttgcagctattggtgcatattgcctttggaagttttggaaggagtaccagagacagtaattgggcaaaaggagtccatgcttgggcatccatttgttggggggtggtggtggaaggaaatgttaagattttggaggagaaatggatgccctttgaaccctgtggaactgtttactacctcttttccttttaggtcagtttctaaaaatttctcgggcattcgactggcatgatcgtgttttgaattggagagaagagtgctatggtaacaggatttaggatgaagttaggcagtatatgaacctctacctgtaggacgtctaggcagtaggcagtttatgaacctcgaactgtaggatgtctcttaacttaaaatggatattcattgggaacctgggcttgttgacaattgaaggagtgatcagagattaccgtggaagtgaggttaggacctccaagtcggcaagcagggttggcaatgtgggcagacctcatggtcatgagtgattttcttggtttttggtatcctggctggtatttatgtgatttagagtttaaattttttgtggtttgttctcaatccttcatttataatccccctcttggtttggcttaaagagtagttcatccttttttgtaatgaattaatgtatgtttattttttattaaaagaaaaatgatgagaaatgaaattctttccctgtgcatgactgttttctgatcatcttcttctcaggctgaaggaaagaaaaga

SEQ ID NO: 11852 - DNA, 1455 bp, Vitis vinifera
  Intron number 2 from transcript GSVIVT01037163001 (locus G SVIVG01037163001) derived from phytozome v7.0 (chr-ID chr1 8; pos 28425016 to 28426470 reverse strand)
tcaacccaacatacttttcttcaccctcctgtaaggtatgtcttctttcttttaatttactagaggttagaatatttatttttaaaattgttacatgtctaatcatttaaacaaactgatattccgtttttgttttttccctctttcatggttttttttttaatattattttataatttgtttgcttttacttgtcccaaaatttcaggaaaaaaattgagatccccaattgttgggctgaaacacctaaattctttttgtttttgttgaaaatgtgttaggaattctcaaaagctgatctttggaatgagttattggaaggaaatgaccatatttagatattagaagtcttaagtccggaatttagaaggaaaaaatggaatgcatatattgattaacaaaaggtgaacaaaaaacctttgaattaactttatatttaagttttacaaattatcatatattttttaaatttcttaattatagtgtaagtcaaagttggttatatcaagaattagtatttatttttcattttggtctaagtttgatcctaattataaattaattagtcacatttttcatagtctaatgtctcactcacattttttatatctaaaccatattttttgtactttactcatattctttatactctaaccatatcttttattcattgatcatgttcttcatctcattgtaatttttttttttactttaattatattcttcacaccctaatcacaatttttgtgtctaataatcttggtcagattttgtatatgctaatcacatttttgacattataatgacatttttgtaccctaattatattcttgtacttaggtcacaattttcatcttttagtaatctgatcacatcttttaggtcacacattattactcgcatagaaatgtaataatacagttataattttgtagtctacatacgttatcttccttaaaaaaaataatagacatacaaaagtgaaaataaaattaaacctaacaaaaataaaatgaaaaataaaaataacttgtcttagattttcttattttagatattcttttaattttttaaagatgatttttgtagattttattagcttataattttaatttaatttaccttttatttatttttattatttttaatttagaagtggtagcaaaaatgctaatgatgaaccaaaatgagaatagtattttttattttttttttgagaaaaaaaactctttgttcaaatatcgtttctatttttgttgttatatatggtgtatttgaaattattagcaaattctataagaatgccttgacttataggtaaattacctttgtttattctttaagatgacatgacaaatttactaaaaatagcttaaattctttactttgttcatatagatggttgtaattcgctatgtgatgtgaatttctgagatgatggatttggattagtgg

SEQ ID NO: 11853 - DNA, 2271 bp, Vitis vinifera
  Intron number 11 from transcript GSVIVT01021383001 (locus GSVIVG01021383001) derived from phytozome v7.0 (chr-ID chr 10; pos 4706641 to 4708911 reverse strand)
gaacaactaccaacaggtgtgtttctaaaatattgttccacaatttttatcctgactatttattttgtattgtcttttaatttttggaaagggggagtagcctaaactcataaatacttgggatgatttcaaggaagaaatcaaaaagcagttctacccaaaagatgaagcccacttagctcaaaagagtatgaaagggctgaaacacactgggcctgtctgagattttgcgaaggagttctccactcatttggtcatgttggagatccctaataatgtttaacatagagcttcgctcctatttcttggataacctccaaggtacggctaagcaagatcttttacaacatggcatgaaggatcttgctatggccataatgcttgtgggtgagtcaaggtgaccatgatataggttgagtcaaagggaagatctaaatctccttgtgaggaaaacaatagttactccccagcaagtgagggataagggtaagaaagaaaaaagaaagttcatattcaaagttaaaatgcttttgatgcaatgaccagggactgtttagagaggaagaccttcaatgcttcgataaaataaaaagagcaagaagacttaagtgtttgatctcttcaactattaaactacctcaaggtggcagtagtgccaatggcgccttagaatagataattgtttttgaggatacaaacatcaatgggaagcccacagttaccatggtcaatagtggtgctatacacaattttgtcttagtagaaggggaactcttacccttaacatgttgtaaccatctttggagagttgaactagtttttgtagcaaggctttctcatgttattacacttcttttctttaagtgtttcttcctctggctcacagttttagttctgtgacctatggtatctagggccaattgggtcaggctgtcttacccgagtgctgcccagattcttagggaagatcctggtccataacaaataatttcaaagtggaatcaattgctaaaggtcaaaagtttcatgcaggaggattatatgtttctacactagaccgaattgaagtctgcagtgaatataatataccctattatggcttacttctgaagttctccacctttaacattttaaacagaggcattgaccctaatttcatgcttgtacctgttaagagtatggcatttttttgcatcaatactagaagctggagtgatgggttgtttcaatttaagagaattgttatctaggggtggcaaagtttcatacgatttgccaatgcgactcaaactcaacatgcttttcaagagtttgagttgagtatgattgagtttggatcaaatttgtatcgacctatataacccgtttaataaataaaaagtttttgggtcaacctgcataatacaaatttgactcaaattgacccatttaataatcacattgattaacctaattataattttaaactatttaactcatatttgactcattttaaatttattcttaaataaatatgttaattgagttatggttgaaacattaattatatagacttatactagacctaactcaacttaattattatatatgaagatctaattattaaatgggttaaataagttatatgatgtgttattagtttaataattagataatatttgagttttcattttttacacaattattgttgggtttgggttgacttatgtaatagagtacctagactttagcatgacacaaacatgacccatcagcattaattgtcactgttatctatgatttcataactgaaacatttctccaaattcaaaaaagtatcataccagtttgtgtactgtcatggtgttgtttcaagttttactattctttgtgttctccctcccactagtggaggtagtagttgtaattgttgctcccttatttatggaaatttttccccaaaaaagttaactagcttattgattgatctatggctacctaatttttagtagtaacatcttttaaatgtatatattttagttttggggtagttaaatgaagaaatgtccaaacaagtaggatttttttccctctctttttccaagagttttcaagcctaacctttgctcccttatgctaggctggcagcttaggggaaaagtgtataagagctgcaacaggatggcttaggaattaaaaaaaaattgttttctaaaatttgagtatattagtatgttttggtctgcatcctgatctgctacctttgacaacagcaggcttctttgcagtact

SEQ ID NO: 11854 - DNA, 5447 bp, Vitis vinifera
  Intron number 2 from transcript GSVIVT01010179001 (locus G SVIVG01010179001) derived from phytozome v7.0 (chr-ID chr1 ; pos 16884179 to 16889625)
ctcttcgtgatatgtatgtcccttcaacttctatattaattattaaagaactcttccttaaaaaaaatattagcaaattaataactatttttggctatttctcgctctaggtttatgtcagtctgatctctgtttatttcttttgattatcattttattaaaaagcagaattattagttccacatcagcaaatttgttttatttgtcaaaacttcgactatatgtttgcaaagttgtggtatatatgtaatggaaacttctagacagcatgctgtgtgcattagagaagctactcttagatgcttcccttacactagttggaccatatataattgcctttttcttggtgggttaattaccggacctcccttgaggtaagctatatctacatagatcccccccactgctttggaatgttacactgacctcccttggggtcttggtcaaacaggaccatctcgtgctgcctcaaaatgttaactgatgtaacctatcaaaaaagaaaaatgttagctgatgtaatttggcaatctcatcaaagcaacttttaaaaaccatatttggtatccctatgtaaaaactctcattcttactcttacatccagagatcccattctttccaaataactaaaattaattttaaataatgtttacttaaatgtaaaaaaatctcaaacaaatcactaattaattttaaataatgtttaattaatgttaaataatctcaaacaaatcagtaattaatcataactaattcaaatcaatacaccttcttcttcatcttcaccaaaccataattctcaatctattcatttcctaatttctcaagccttaaaccttgcaatgaaaaaccttaattccttcccatctcttcgactcttcactacttcctttcacccttcataaaaaaacaaggaataaaatgggaaacgtactgaactccatgggggcccattcccttttcttttccatttttcttctccttctactcccttttcttcaaaaaattaaataaataaataaaaataaacaagcataaagctgccatgacaagtaggtacaaatccacaccatggtcacatgggcaaaactccattgatagccctcccgttgcttatcttgtttgtttttagtggtttttttttttttcctcccaagtttttgttcattctcactgtttaatatggacacaagaaaatccatggatggtgcaaagaacaagtggtagagaatagagacaaggatgggatgtagaacttttttaaagaagcaaagaaggaaatttagggtttcttttcataggaatgagatgaacagtaaagaagcaaaaattgaaaaaataaataagtgaaaaaagatcttcaaaaggacgtcaatttacatcacttaaagaagtgcattttatctttctgcattttcgtcaatggtatcgaggggaataacatttgataggagaggtcaatctcatattctttttttttttttttgataagtaaataaaattagtattcaaagtgccaaaaaggggtgcatcaaagtacacacgatgtatacaacaaccgctaataagtgccaaaaaaaggaaagggaaaacaaaaaatactccctttctcaaaccgaacccaaccaatcaataaaatcaactaaggacatagatgttttgcctataaacaaattgatccaagataacaagttgcataaaaacaagaatttcaacctttgaatagataactccatgttctagaaagatcttctatttcgctctttccatatggtccagaaaaggcataaaggggttgctctccaaacttttctccaatttcttccagtaaaagagtcatgtcaacctaagggagtctctctaaccgtggaatgaatcacccaatacagtccaaacagggagaacaagagcttccacaacacccacgcctttccacaatgcaaaaggatgtggtcaattgactcctcatgagaatgacaaaggaagcatctattggccaatgaccaacccctcgtttgtagttggtctagtgtcaaaactttcccccaagttgcctcccaaacaaacaagattgccttaggaggaacccacgctttccacacaacacttgctaggaatggctttagacttcctacctcaaggatagagtaaagggatttaatagagaaggatccactctttgtctccacccaatacaccttgtcctcccctcccacaacaaccaccttgtcttgaagccttatcaaaaagcactccacaatatcaatctcccagtcatttagagtcgtagagaagttaggaatccgaacacccctctcaatgtcatattctaaaattgtgaggtccgcttatggtcttacctgaatcgaggtctacttaatttatcccttttttctaggtcatacacattgcctgcacgtgttaaatattaaacaaagatggaaactccagtgcatgactgctttgctttaatatcagaaaacaatatagtttaaagataaaagctataatagataatggtttttttaatctgtcaacttttcctctagtttagagctggtatataattgattcaattattaaatcatgaattgtctttggtatagtaggtcatataatgtatacctttttcttttttctatgaatgtgtagttgtttttctgaagacgctgtattgagaattaacctcacattttattgtatggctgcaacatattttattatatttataattttattaatctaagtcaaggttcttttttactgaaaaatgtattgtagcgattttaaactcttatatcagttggccctacagtactggttgtttgtttcttgtccacctggtttttcgaagttgtgggccttctgacttctattgtgatgtttgacttgtttggtgcttgacaatgtttgggcttgtctcctttttattgcttttcttagctggatattctttgttcttggcttgatttagagaaatggaagttagtcaatatacttttgatgttaccgggggttgcatgggcttggttaatgcacaaactaaaaactggtataagctgatatcatgaagtcacatgttgcttaccactttgcctggaaacaattatctcccatgtttgtacatatgaaaaagaagataatttaattaaatgggaaattcaagcaaccagactttgatgagacctgtgaaggtggcgtaccctggttacgtcatccaatgcaacctatagtcaattagaacttatagatatgatattctttcagggacagttgaggtggtttgggatgctatagctcagacatatccaaaaataggaatgttgctaagattttgtagctaaaagagataagtctccgtctcacctgagatccttatcaagaaaatgggaggaatgggactgttattattaaattttggaataaactgttgttcagttgaatgggaatttcaaggaacctgactctgtcactctagtgagactcgtgaggatagagatgtactggttactcttcattgtaacttaaagtaaattatgactaatggataggatccttttgttgaggatggttgaggaggtttggaagctttgacatattttaggattgatagtgttgctaaaagttttttggtttaaatatctctcaccttagctctttgctttgaaaagtaggagcaattggagaaatattattaaatttttcaaataaattgccttggtgatgttgctaggttcaggaagctgatacaggatcagatattctttggtttttagtaggattggaacaaactttgacctggcctttgacaagtttctggtagagatacctccctcactccctcaagaggattctaagcaggaggggctgccagccacatagtagagaggtgtgtaagttgaaggaaagagtagagcaacttgagaggagggaatgatttggaaaacttgacagtgataacaatgatcatctggcaactaaggagcttggagttctctttctagtgattttcaatcatcctttgcaatggagaatgaagttccctttaaatggactcaaaatgtagttgttgtcatgaatgctctgttggatctgttggcattgaacatgtccattggaaattggggggctctttctttcctttcaaacctacttagacagttctaacacatacatgttcccttacctacttagtgaacctctactctacttgtgaatcaagaccattaaccaatcccaactagttagcactacgaaggcagagcccaaggaagatatatggagagagagccgactcttgaatgttggagattaattaccttcaaggaagatccatggtatttgtggtaatagagtcaactgttccaattttggaagttaatcggtgataaaaatgctctctttactgcctcagcaggagagggtgataaaggtgaagaatcctactttcaccttatagaagccatatcatgagtcaaagctcttcatcctttccttggcttctgtcataagcaggcatccatgtcttgtgggcagctgagaataaggagtttatttgccttgtttatgacaagtagttaattgtaagggtattattgtaattttactcctttgataaaagttaatattagaaaggagagaaccctaatacctccttgctgatatgcagcatttcttctcttctgctttccacatcttttctcccctcttataagcaaaaacctattataatgagttcatgaatgcccctgtgctttaaataggtcttttctgggtataatactctgcatttgttacattcctatagcgtgatagagacatatttgcagggtctgaataggatacaaccaacttcagcatcaacatactttcttcttgtataaaagcatatcttcttgtgatttctcatgactgattaataagaaacatagatttctcgagagggtgcactgatttgaccaccacattgttcaggagatattggctatgatggatttttttttcctagtttctgtacagtattaattatttgagataagtagtttacacagtggttattggagcagttattgcttggtggatccataggtgtagctttgcaactaacctcgttagtgtaagcttttaaaatcaaaactcttgctgaggcaaattttagcaatttagtctgatcagttaagatcccttattatatttatggatattgctgatttcttattattttataccagtttaatgaaccattgtgtttaagaattttactgattcatttgttattgtgatcctgaatgtttgcaccctcattttgcatcaataagacatctctgtgtaaaacttaatattttccagtttgatcgatcttcccatagtctgtatctatctctttgtaatacattttcttgtgagtgcaggtggcggggtgttgactgtgtacccagttgttttt

SEQ ID NO: 11855 - DNA, 9819 bp, Vitis vinifera
  Intron number 8 from transcript GSVIVT01038360001 (locus G SVIVG01038360001) derived from phytozome v7.0 (chr-ID chr7 ; pos 13584164 to 13593982 reverse strand)
cccattaactccagaagaggtaaaacttctttatcattctttcttgctctattgcctaaaatttctagagtaccatgaccaaagccaacaaggttgcaaaacataaatatgttcaatctgattgttcccatgtccataccatagatctggttctttttgttctcaactgatctattcctcaaattgaactggaaaaaaaacttgattttgtgtcagaaaagctaactttctaggcttgaagaggtattaatgtctttaggttaatccaaattgaatttgaacatatcgggacatgaaccaaactgtatgagacatagacctgccaacacaagaggtttctctggggtccagctggctatatttatttctttatattctctccccaacataatctcaaaagaaaattgtcttgtgatatggatggctaagcctaatagagatcgtcagcttcagctgatctggacctttgcttgggataatccatgggttctgggggcttgtttgcaaaattgctgagttgtttgctatagttgagtattggaaagacattcatgcatatagagataggtatggtagctgattttgttactagctttattaattcttggactagtagaggtttatacaattcaggaacttcctggggaggagtcgtttcaatcaaagatgattccatgagttatgcatattttagaatggtttcttttgtttgcacatgccaaaaaaatatctggaaggaactcaggatttttcttggaacaagatgaagctgacgttttcccttttaaatgggctttctattttcttttgtttttttcctttctggtgagaaaaaataaattccttgaaatgaatttacaaggatgggattccttccaaaaatttttatttgtaagatctaataaaaaatggaaaaagattatcttgagaggcttcaaagcaagaaatcaagaggactatgaaactgaaggtggtaaaaaggcaatctactatccccataagagagtcgcaaagctccaggaggtaagaaatctgccacagaagaaaccaactatgaggcttctcacttggctagctgatccttgacttgggtcgctaagatggcaaagcttgtggctcaaaagaaagtgtcctaggtccatagtgactttgataatctgaggaagccatctgtaaacggatatggattgaatctgtattttttttctatattatttgaagagtacaataagatatttatagcctatacaagatgtattcaaataggaaactatataattgtcaacctaatctagaataggaattgaatttgaattgcaaatcaaaatcccaaatttagctccaaaataacaaaattgattgaatcaaatctcctaaaataatgcaattctcaactctccccctcaagctgactcatagatgttaatcatgcttagcttgctagtccagtagtcaaatgtaggttgtagtagcctcttattaagtatttcaaccagttattcattttttagaataaatggtatacaaataagaccactttccaatttttctttaataaaatgtttctcaatttccccatgttcaatcatgttacattgaattgttagatatgtttattgcagctttattgtcacattaaagcttcattggagctttcatatttactcttagttaacctttttaaacatggaagctcacacaatccttgagcaacaaccctatattttgtttttctcattacttctcgccatgactgattgcttctcacttctctaagtgactagatttccaccttccatagtacaaaaaccttaggttaacctatcattaatagctccagcccgattagcgtcaatgtatgcctcaacttttaaatgttcaccctttttgaagagtagacctttccttggtgttctttttaattacttaagtattttacatataacttccatgtgttcttcataaggtgagtgcataaattaactcactacactcactgcaaatgttatatcaagcttcatgtgtggtagatagataagtttatctactagtcattgagaatgttccctatttactgtcttgctcttctcaagtagtccaagtttgtgatttggctcgattggaatatctcttggtttgcaaccaagcatctgtacctcttgtaacaagttgagcatatattttttttttatgaaaatgaaattcctttacttgactaagctatctccattccaagaaaatatcataaaggacctaattcctttatctcaaactcctttgctagtaatgttttaagctgtccaatcttggcttcatcattcccaataaggataatatcatctacgtacacaataagaatagtaatctttccatccatggaatgcttgaagaatagggtgtaatctgcgtgacttggagagaagccaaaggccttaatggtatttgaaaatctttcaaaccttgctctcggtgactgttttaggccatagagagatctctttaatttacacaccttccctttttaagggttctcaaaacttgggggcaaaagtgtgtaaacttcttccttgagttctccattaagaaatgcatttttgatatctagttgatgaagagaccaatcgataataactaaaagagagagtaggactctagccatattcatcttaatcactggtgcaaatgtctcttggtaatcaataccataggtttgtgtgtagccttttgtaactagtctcgctttgtacctttcaatatttccatcaactttatacttgattgtgaaaatccacttacatcctactaaggtctttcctctaggtagctccatgatttgccaagtaccattcttttaaggagctttcatctcctcaagtactacaccccttcactttggaaattctagagcttcttgcagttttaggaatatctatgctagatacattagaagtaaaagctttaaaagatggtaagagtctataaaaagacaaaatttgatattggttggagagtgcatgacttggtcccttccctaagagctattagcatattgagatcatttatatcctccataaagatgaagaattaagttgaaggggctcatggttttctataatttccatgtccttagcttcatggtttgagtcatagccctgctttgaagaattctaggttgtctccttttgactttgctgtctagagtagacaccaagctcaattggttgtcttcttgcactaatactaggcattatagaatcaacgcttcttgatggattagtttggaccttcttagcttgaaaaagtgcaatttgaaaaaggggaaaatacagagtttcccaaaacttatcttcacttacattctccccctgaagagaagtatggggaaagaaagcttgtttttcaaaaaaagtaatgtcaaaagtgaaacatttttttttaattttttaaataaggtcataacatttataccctttttttatattggagggtaccctaaaaacacacatttagggcctgtttggtaaccgttttggaaaatagttcctaaaacagtttttgagaacaatttttgaaaattgtttttgatattttgtaaaacaaaaatttgtttagaaatctaaaatgtttttaatatttttaaatatgttttaaaataatttttatgtgtattgttttatttttaataattctaagtgtttgtataattattttttaaaacaaccctcagaaaacaagtgaaaacaacaaaaaaacaactaaaagatgttttctgaaaacaccttattttttgttcttaagaatagaaaacaattcttggtttccaaatgagttttttaggtttttttattctggagaatagaaaactattttaaaaaacagttgccaaacagacccttaattgcatagggatgtaatttacttctaagatggctatgcacatgaacaaatgcaatgcaattgaatagctatagaggtaatgaagtgaacaatttattgtgtcgatagaattgctaaacaatatccaatggagtttgaaattgtaggatccttgtaggtgtacaattgatcaaatatgaggctgtaagaacaacttctccccaaaaatgttttggatccttaagtggtaaacataatttcttgtgcaactttcaataaatgtctatttttcctttcaacaattctattttgttgtgctgtgtcaaaatatgttgatttgtgaataattccattttgtaaaatatattctcccaaaatatttgaaaaatactcttttccattgtttactctaagcaccttaatttttgcttgaaattggttttgaaccatagtgcaaaagtctttaaaagtttttaccatcttaattttttcctttactaaatacaccaaacataaatgagtgtgatcatcaataaaggacttttgtctttaaacaacaaaggaaagagtttttgcaaataataaaaagtgggatgtcctaatctataatgccataacattattttattctcaatagtttgagaaaagactttatttactactcgagcttgtctctctagaacgacattatcagtaaagtagtataacccatcaacttttttggcattgccaatctttatccctgaagccaactcttggaaatcacaatgactaggaaagaatttagctatacagatatttctttggtgaacttactcatggaaaatagattacaagaaaggttaggcacatgtaaaattgaatttagcacaagcgttttagaaataggaataatcctgtttgtcactaaggatagagacccatcaactactcttaccttttgtccaccaaaacatggagcatatgatgaaaataattgtgaacaaacagtcatatgatttgttgctcctgaatctatgatccaaggagcttttacttcagaagaaacacttgaggcaatgaagaaatcacctttttgagtctcgtctcttccaagattgcttgattgtgagaattcagctagaaaagcacacttgtttctctttggaaagtggttgtttttcaggttagcaggcttcccatgaatttccagcatgtttccttaatatgtctgggtttattacaataatcacactagactttggccttttcttcttctttcctagatttttttatttattagtaagggtagtttcaggagctgttatcaataaggctgagttttttgaactttggccattttgttggccattcatcataacattcctcctgcttccctctcttcttatacatgcaagcgtctctcgaacagttgggaggagaggttctcttccaaggattcttccccttgcttcatcaagcttcaaatttaatcctgccaaaaattcaaaaacacattctttttcctacaacctcttgaattgggcaacatcttctgcattctctcatttagcttcataataatgatctaactcttgtcaaagaataccatagtatttcgtgacacccagagctcccttcttcgtttcacaaattcggatcttaatctcatatacttgggttgaattgcctaaatctgataatgtcttattgattgcatcccacatttcttttgctgttaataagaacaaatatgtctgtccaatttctgggtccattgagttaacaagccagaccatcaccattgagttttctgcctccaatgttttaaatcctgcctcatcttcttttctcatggctatgttgctccaatgagataacaaaattttcccttggcttggataaacatatttacgaattgagacaactacaagtagttctgtcatttttgtttgtgagatgtaacttgaaatgcatgtggtggctgttcaatatttgacttggatgtggcttaatcacttacatcaaatgattttgaacaaaataagaaaaaaaacaaaaaccaaggaatgggtttacaaatcaaaggtaagttttgataccatgtaaacaaatatgacttgaatttatattttttttccatattagttgaagagtacaatatgatatttatagcctatacaagactaataggaaattataaaattgtcaacctaatatagaataacacttaaatttgaattgcaaatcataatcccaaatttagctccctaaaataacgaaattgattgaatcaaatctcttaaaataattcaatcctcagcaccatccatcaatactcccatggacctctttccttttttcacacccttcattaagagatttgagaggctcaaggacttgggctgaagcacactccccaaaaatgtgagcaccactgccccaatggccaatctctcccctgtaggtttagaaatgatcccaaatactctaccatgatgattccttagaatgtcaatgctaatctccttcatcactaaatgggcttttgataggacttatatttttacatttcaccaaatcctgttatacaacaaagggttttttggtgtctaaaagatgaacttatctgtgggatgttaatccaaacactaacttttgagtatatatgttgagaatccatgtttcagtctagtgattatagttgagctgcttgagcctatccattgacttacactccaacagcctggtttctttgaagagatttaagatattcttatgaaatcacatttcgctctttgactgagcaacttcaattccttgaaagcattaagtcttcctaggtctttaatttcaaattctttttccaacttttcttttagtctcttaatttcttcttaattatctcttagtacaacgatatcataaatgtacacaatgaaagcacttattctcccacactcagtttttgacaaatagtgtatgatccctttggctctgaatataattcttgttcttcattaccttagcgaaccttccaaatcaagcttgagggttattttagctcaaacagagccttcttcaatcgactaaccttgtttcctctaaattcccatggaggaagcttctttatatcagattaatgcaatgggcaattaaagtctagcaagtaatagcaatatacacataatattcatctttaccgctggagaaaaggtttcttagtaattattccataagtttgagtatatcactttgccactaatcttgccttatatcgcctaagtatcttatttgccctatattttattgtgaactcccatttacacttaacctgtttcttcccaatcgaaagatccataatctctaggaattacttttttttgaaggcacacttctcttacattgtcttcctctcatcccttaatgcctcttgaacaactttgtgtatgtcaatgagttaagttgataacaaatgctatagatgcagaaagattataaaaaaaaacaaagtaagtcaaaaggtgttgagtacaatgtctcttaccttttgaaatggcaatgggtaaaggaagattatctaacacattggaactagactcaagttaagtttcagtacctttttccgagttgataattatagcaccacttagaggtctaggagtagattgtattatcctaggggaaaccttgagagatgtagcatatctctctctctctcctttggataataaaatcagaaataatggactgagaaactatggtttcaaatctgatgtgcttaggtgagtcatgaggatgacttggggaagggcttagggagtttgagagaagaacatgcatgggtttagagtcgcgctcagaagtaattctagtatatggggcaaataatggggaaaaaattccatgtcttctgcaaatggctcctcctaaagataaggttgatgaaaaaatggttgacttccatgaaaggtagcatccatagacacaaaaaatttcttggaagtcagatgatagtacttgtatccctttttttaacaaagaatagctaataaatacacaattaagggcattaggatcaatttctattatttggcaagcatgactatgaacaaacgctaacaaccaaaaattctgggagatatgtttgtagccatcagattgagggtagaacttacaaagttgactcttaggtgattagaagtcaagaactcaagagggttatctgttgtgcaacttccccttagtaggttttgggaacattcatttgaaaaattaaggctctagtaatttcaagaaaatatttattttttctcttagctattccattctactgtgggataccactataagattggtgaaaaatgctctctttttgtaagtatggttaaaaatattggtaaaagaattctagctcattatcagatcttaaggtttggatttttgagttaaattggatactcactattctatggaaaacaggaaatatagtcctaacatctgacttttatttcataagatagatctaggtaattcttatagaatcattagtaaaagacataaaccactttaccctgaaattactttagaccttaaaaagttcttatacattagtcaattggtgttggcttatgcaaggcaataagaggttggggaagcccttaaggctagagcatgatttttggtgatgaatgaggaataaaattttggcatgatgtttggtgtggggatgctcctttaaggattcttttccctctatgttctcttttgtatctaataaagaggcttgggtggtgaatgcttgtgaggttgtaagtgggcatgccgtttagagacagtttcaagattaggagttaattacgaggcttcaagtgcttgggaagtacagtaaggataaagataaattgatatggaaggataacaagagtgaaaacttctcaatgaattcatttgattcttccttagagtcaaggggagaagtcccttccctcaaaagtagtgttgggctcttgggcgcctttaaaaatggttttttttttttttgtttttttttatttttaactttggaggttgtatgggaaaggttcatgaccttggaccaacttaagagaagagattggtcgttggctaattattgttgttttgaaccaacactggcaatggaagctaatacagaagagaaaaaaaaactgtggagcacaaggctttgatgccataaaaaatagagaataagatttgtatattcactagatatatttataatcttaaagtgggaaaaaggaaaaggaattactctattctaggccaggattactccactaatttggctactaattatagaaataaatcaactactaaattagtccttaattacagtaaataaatcaagtcaactgtgcagaaaaagaaacaaattcaaattgaatctcaacctatataggctatgatcctacaattgttgcaccaattctccaatgaaaataaaatctactaatgccctttttggccatttatcaatattgaaagcatttttattgtgtgctttgtaggattgtttgtcatacaacaaacaattcctctaaagcactttaagcagttctttggcttgtatccaaacagctaactgttcacctatcaaaagtacctgtaacagaagtgcaagaactcccaaatggatccctaatttaaaaaagtcttgccccttccgttttgctcctcattccattttgtttcctaggagagagcatcaggtaaactattatggttggaagtaagtaggaagtgatataaagcttctcctttggttaaggccttagattttaaacagcataatgcctattttctccgttgactcttgacagcataacttccgatgtgcttgtttacagcacttggcagtgccttatgtttgccctttttaagttaatcaatgattatttgcaggttggtctgatctttcgtgct

SEQ ID NO: 11856 - DNA, 7952 bp, Vitis vinifera
  Intron number 7 from transcript GSVIVT01001716001 (locus G SVIVG01001716001) derived from phytozome v7.0 (chr-ID chr1 0_random; pos 427361 to 435312)
ctgagtatattgtcactcaagctatttctgcacaggtacattattatacattttgtctctcccaactattatgttatatttttctttaataaacctaatgtgtttgcatttataaccgacatcctcactggttttgacattaattgatttttttcctttttcttgatggaaaacttttgattttttaataactgaatttttttcatatagattgtaagaatatgtgaccgtgagttcaaaccataagttcttcacatgtttttaaccatttcatagcttgaagtttatttaagacctgtttatttttcttatgtaaattttgtctttgatggacataatcttaagatgcgaactccaaagcacaagtcatgtggttgtataggttgatctcttaattgtgtcactatcacatagttgtaaattttccttcttttttttccccctaataagaagctatatttttgttacattagataacggaaaatttataaaaggaaacaagatatgtgaattttagagaaaagtgaacatttgtgtgttctttttttaatcctctagagggagagagaaataaagaggtccctatattagatagccttggcttcccacttttaaggaaacaaatgaccaaaattaaagaggaatgagatccttaaaaaggacgacaagaaaagagactcttctcttggttaactaattgcagttctttgttgtaccaaaatacctaagcctaattacatggcaatttggaccaagaaaaaacaaagaaagagttattatgacttttgcaatatttcaagtatcatcctcatggattggtctatggaaattaccaaaactaggtcaaatgattgttccaactaaatgctaaaatgaaaataatgtatgaatttattttttgaaatgagattaacttgaaaaaactaattaacgaagcaaatattgatttttaattcaaatgatccaagtaaggggaatccacaatcctaacttagggaacagaagttagagagaacaaggtgccaaaaaatgaggaaaattccccctaaatttcttgcactctgattcttgaaaacttatatcagatttatagtagatgatagtaacaaatcttccacctaaccctttattttagtgataaatatgaaaaataaatcctaactaatataggaaattcaaaaactcaactagagatattagataacaaattatccttatctcttaatttaaactagctaacaaacacgaaaacctagcttaggacttctagaatcatgtgatcctccctaaaattaggacttacaatctgaatcttatccgaatttccactctccctcaagctggtgcatgagtgtcaatcattttcatcttgttgatcaaagcttcaaaactaactcttagaagagcatttgttaaggtatttctcgtctaaagacaagttggtgtataaatcgtcttaatggctcctgtttcgattttttctttgatgaaatgacaattaatttccacatgtttggttctatcatgatgaaatggagtctttgcaatactaatcactgcttgattatcacaaaacattttcatttgagtttcaatttaaaattttatctcatcaagaaatctttttagccacattcctttgcatatactatgaaccatagccctgaatgcttcctcagcactgcttctaacaatgactaactatttcttgttgcaccaagtaactaaatttccccaaatgtaagtgcaataaccggatgtggatatttgatcaattatgaaacctacctaattagcatcttaataaaattcaataactttatttgttccttttcgaaagttaaatcctttgccttgggtcatttttagatacctgagaatttgatatactgcttcaagatgttctttagttggattgttcatgaactgactcacaatacttaccaagaaaccaatatttggtctcgtatgaaataaatatacaagtttttcaacaagtctttaatatcttcccttatcaactggagagcttccttatctcacacctactttacacaaagagtccatgggagtgttagctagtttacttcctaacattccaatctctttaagtaagtccatagtgtacttacattgagaaacaaagatacctttttgtgatctggccacttccattccaagaaaatatctaggtaatcctaggtccttaatctcaaattccttggcgtgattctattttaacttaatcatctccttataattcctggtcaggataatgtcatttacatacacagcgagaatagtaactttcccatcatgtgagtccttcgtgaacatagtgtgatctaactatccttgagagtatccatgctttttaactactcttgtgaatctttcaaactagactcgtggtgcctgtttgagaccatatagagactttctcaacctacagacttttgtgttgacattgcttcttgtttcaaatcctaagggaatctccacataaccctcatcctccaaatccccattgaacaaagcatttttgacatctaactggtgaaaagactaatctcaattagctaccaaaaatagtagcacgtattatatttagttttgccactggagcaaaagtctcctagtagtcaatttcatatgttcgagtaaatcctttagtaactagtcttactttgtagtgatctacacttccatcaaccttgtatttgaaattgaaaatccacttgcatcccacaggttgttttgcttcaagtatctttgagagttcacatgtttcattctttttaagggcacgaatttcatctccaatggttactctccattcaagtgtttctagaagcttattggatattttttagaatttatgtactagaaagattagtggtaaaagcacgatacattagagataatttttcatgagatatgaaattggaaattggatgtcaagtacatgtcctaacaccttttctcaatgcaatgggaatatcaagattatcactaggattctaatcatgtattaagttacttggaacaaaattaagattgtcttacatggctcaaagtatcggccaagtccgatatgactcgaccgagtcgtattcaactcgattctttttgctccaagttcgatactcattatgaaaaaacacaaccaagaatcagttaaactcggtggacctgataaagattctgagttaaatcggctaagtagtctgagttaccaaaataatcttgagttcaactcaaaaattaaatttttttgcttccaaatcacggcaaatgaacacaatacaacaacaacaaaaaaatgagaaatctttgaaaattcaatgattctcttcaaaaggaaaattttttcagaacctatgattaaagacttgtaatgaaaaagatgacctcgataaaagctttgagaagttttttaatccaacccgtggttgtcttcgaggtgtataagaagaggaggttgagggtatttcatcactaacctcacggcatatggactgcaaggcctttgtgtcaatggtgtcactgtgttgactggtgagaaatatcaaatccctcatcctccatagacaacaattttaggtgctactctctcatctcccctctatttcgttgtgtgttgtagaggaagccctctcttttgccaaaccaaggtgttctctctctctctgtgcatggtgtggtttgagaattggggatttgaagagaagggttattttaaaatgctaataaggtgatatacattgaatggtactactatgttttaattgctaatgtaaatgtgtggtataaatcgtaacttttcatttttttttattcaagtttagtaattattttcaattttaatactaaaaattctatgaataattttaatttttataatattttattttattaattttttaacttatttaattaacatatatatatatatatatatatatgttatttatcttattttgtgtatcgtctaatactgagtcgagacgtaaagaccaatctctagatgctctgagtcaatgaccatgattgcaactttgaaccatgttgtcttagcttggatgagactcatagctctgcttcgaaagtgttaaaggctctttctccttttgagtttcctgtctccttgaatacacatgtaactctttgtgattcgcaagctatgtgggaggatgaggattagaatttgtatttaagtaggtatgataggacgagaatcagactctacattttgagtgagcacgggttagatttttttgttgaagaaaaggtggtttgtttggtgggacatcttcgagtgaccaatactaatactcttgagtggtggctaaattttccccctaaatatgagttttgggggtagaatggtgtgttttcgaagaatatgacatccatggagttgtagaatttttaggtagtgggagagtagcatttataacctttttggtttgaagaatagctaagaaaggtgcacatgatggtctttaggtcaagtttgttacaatactattggtgaatatgaacaaaggcaaaatatccaaaaaaatttaagggtaaggaagagatgattcgaggttgaggataggtttgtatgaagatttgtgaaggagtttgaaagttaagaactctatatggcattctattgatgagataggaaatagtgaaaactacttctccccaaaaatgtttagaaacatatgtagtgaacataagagatttggccacttcaagaagatgtcaattttttcattctacaatctagttttgtttaggtgtgttcacataggaactttgatggattatgccattatttgatagataatcttccaaaattgattggaaatattctttagcattaatggttctaaggacttggattttagtttggaattggatttgggttatggaatggagctttttgaatattgtattaatttctaatttttctttcatggggaatgtccaagtgattctagtgtgatcatcaacaaatgatacaaaccatcgagcttctaaaacattatttactatggtgggcccctaaatatcattgtgaattaccaagaaaggatgtgatgatttgtatagttgagatgaataagtgtttcaaacatgctttaaaaattgataaatctcacattggaaaattgaaggatttttattatgaaataatgaggaaaacgattttgttaggtacaagaaattaagatgacctaagttgtagtaccataacatgattgtactacaatagtttttaattaattaattatgaaaaaaatacaaggaaataaataaataggctaagtctacagcttaatcatgtaactaaacttccaagaatctaggaactaacaagcacaactctaggacctaactatcagaacacctagatatcgaaaactaatccgtaatcagctcgaatttattggaaacaaataacagaaaaatattaaaacaaactcctaataattcaacactcaccctcaagttgatgtatatatatcatgcctaacttgctaataagagttttgaacctaggcttaaatagacttttggttaagacatcatctatcaattgttatgtggtaatgggaaacatacaaataactttattttgaagcttttctgtgataaaatgcctatcaatttcaacatgctttgtttgtacaaccatgctgaataggattgcttacaatgttgattactgccttgttattacaaaaaagcttcataaaaggttttaaactcaacttcagtcctttaagaattttcttcaaccatgaaatctcacctactcctttagccataaccctaaaccacacctcctgtggtacttcgagctacaaccttttgtttcttgctcctccatgtaacaagattggcccaaaggaaagtacaatcacatgatgtggatcttttgtctgtaactaaacccacttggtcggcatctgtgaaaaccttcatatttctctagttacatttttttaacagaagtcctcttcctgatgtactattcaactattttagaatttggtacacagcttcaaggtgttcttcatatggtaaatgcataaattgataccttcctacttcaactggcactccctcgattcgatctctaagtttgtgattttgctccattggagtatcactcaattcacacccactcattcttatttcttcaagtacatctaaaacatactttctttgtgaaataaagatcccatttttagatctagcaacttccattcctaagaaatactgtaaaaattcaaaatctttaatctcaaactcaactacaaggctcctctttagtctagctatcccaacttcatcactttcgataagaatgatgtcatccatgtcgatgatcaaaatagctatcttaccaactctaaaatgttttatgaacaaggtatgatttgcttctccttgactgtagccttgattctgaacagaccatgccctaggagactacttcaactaatataaagacctctttaatctacacactttggctccaaagttgtcctcaaatccttgtggagcatccatagagaccttttcttctaattcaccattaagaaatgcattcttaacatctaattgatatagaggtcattccaagtttacaaccatagaaagtaagacatggactgtatttaattttgcaactagaacaaaggtcttctgataatcaatctcataagtttgtgtaaagccttttaccaccgacttagctttataacattctaaaggacccatctattttgaacttcacagtgaactcccatttacaacccatcgatgccttttctccaggcaaatttaccttttcctcgggcaaatttaccttttccatgtgatatttttctctagagtcttcatctccttgaagacagcccccttcatttaggaacatttagagtttcctatatattcttaggtacatccacactagatggttctgaggtaaaactagataaacaaggtgacaaattttttgaggacacatgattggaaattggatgcttggtgcatgttctaatggctttttctaaaagtaatggggatattgatagaaaaatcaacttttggttaggaagaagtgtgccatgaatcaagagaagtacatggacttgaagtttctatagcattcaaattggactcttggccttgtaaaattataatatcatctttccctcgagtctagtttttccttgagtagacaacttcatatcctcatttttttctagttcctaaatcattttttgttctagtgtcaactccacttatgggcattgaagtagactaccttacttcaaaatgtgaagtatctaagtccattaaaacatttagattcattaaaacatccgaatttatcaattctaatttttatcaaaaaccatcttaaatttctctagttgaggatctgtatttacttattattctattctccggagaaaaatatatcctcaaagaacagactgcagtcttaaaaaaaccaagtgcccaactaaataagggaaataccagtaatgttaaagacataccatgctattgataagttgttcttttaccatgtttacattcagagaatttatcagctttcagtaccgtcagctccagcttccatattttctaaagcaaattgctattcttgttgctactaggctccagtgatttgattatcaatatggaaccaaatttataaccaaaattttacaacgtattgttcctgttcttaagattgcacccttgttactattcaacttctgtttttgttctctcttccccattttcatctcccaacctgggaaatattcacttattaaccttttcacttggtgtctgatcatttgattggcacttcaatatatgattttgtttcttcaggaggctcacaagcaaagtagcaactggttacctcc

SEQ ID NO: 11857 - DNA, 10849 bp, Vitis vinifera
  Intron number 1 from transcript GSVIVT01022903001 (locus G SVIVG01022903001) derived from phytozome v7.0 (chr-ID chr1 2; pos 18166564 to 18177412)
gtgtatactcttcaactgagtaaaataatttgtttgtattaaaacattagaaaataaatttggagaagaacatcatgtagatcactattttatatgtacatctgtgagatggaaaatgttgtactactattaattatatggcaataagttgttcctttgtgtgatcagaaattctattgctgcattgattttggaaatttaattcaaagtataaggccaaataaaagccttaaattaggttaagaaccttagtgacaaggagttgggtttaattttgtgcacaaaaatttatcccttcctaattttgttatatatgtgatattataaaagagagattcattttcttgtaaaattggttatgaatgtggacattgctcccatctctttccttcaatcaaactcttcaaatgtaaaattaatatcacgattcaaacaattcttaataaatctactaaaaatgaaaaagagatccggatgtgcctactttatatggctttatatcgatcaaaatcttcacaatcaatcatgtccttggcacagtaccttatgttccttaatgaatatttcaacttcgtattaacactaacaaattatgtaagctctatttttgttgaaggaatctttaaagattggtattgaaaacttaagaaatggagaacgaaggctcaatggataactatcttcttgtgtatactcttcaactgagtaaatttggagaacaacatcatattgtagatcactattttttttttcccgacatgaacccattttaacttttgattttatgttttagctctcaatttttaatttttaatttctaattcttaaattttaactttaagcaatcaactttaagagtactaaactctgcacaaaaggagattcccacgttttattttatgtggattgccaagattttggactttaggaaaatataagtgtcctgtttgataactattttttagaatagttttttattttttaaaacaaaaaatacaggaaacatgtttaacaaccaaaaactattttccgttttatattctaaattaaaaaaaaaatggggtttcatataacactttttagttgttttttttttattattttcacttgttttgtaaagattgttttaaagaataattatataaacatatagaatgattaaaaataaaacactacatattaaaattatttttaaaacatattttaaaatatttaaaataaattaaaaatattttaggttttcaaatagacttttgttctacaaaaaatcatataatagttttcaaaaattgttctcaaaaactatttttcagaattatttttgaaaacagataccaaacatacccttaatgttgacttttggggcatgacaatccaaattaaaagtcacatttttattttttggagtttttgatatttatacagctttattaaattacaattctaagaatattttaggatttataaaaatttaaaaagtattttcaaatttatgacttttgtgaaatttcaattgaaagttttctattaaagagataacttcaatgggaacttatcttttaagtaaaaaagaaaaaaataataaaaagaaaaagaaagaaaaatcaaagaggaaataaaagataatacaacatgcatgcaatcgattttcattacattctcttttaaggtttctatatatatgggagttatgattttctcgtaatgccaaaaatacccaaagttttcctatatatataggaagttgtttccctttggatttttacttcgataggcaataagttgtaatttccttagaaaatggggctctatatttacttataaaagtcatagatccatcatcagatgatatcagttatctttatgacaaaatatttaagatgattaagaaagaaaaatctatgttctacataccagcattcaaagttcttgatttcaaacaagacttcaattatgcattaaggtatgtctaacaattttattattgtgaaatcacaaaattcaaagtttcttgagattatgaatccttttccataaattagcaataaattattgaagagaaagctttatacaattcagtccatatactcttataaccactaattatagctatatacatctcataggttggtcataatgtaatttttagaaaaaaaaaatgacggttcaaaatgtaaacctaacaacgtgttagattacggtttgttatttggctccaaagaagcaaacctaaggttttgttgacttcagatttgatatctcacaaccaattgattgttagctagattaataaatggctaatatttgggggtaataatcttttcaatggaaaattaatgcaacttagttcaacaacttgtattaggttgcatagtacaagcctctacttgaagagggtttagtacatgcttatcatgtcaaggaattatttatcactatcaactttagcacatgcgtacgatgaggtaagaaaaataagcaaagattccaaacttttttacttaaggaataattttaaccctagactatgtaaaaatattaatagtgattttttattttaatattttattaaaaaaaaatgaatcaaaaaatcaatacgaccaaataggtggagcaaagttttatctcatattataatgtccatgtgtttaaatcacatctgggttttccatttagttatgaggaaaaattctactataataagcatttacttggtatttgagtatagtttagatttcacattaaatcaagacacatgcctatgtatattgaatgagagtaaactattttaatattaccatataaaatattacaaaaattaaataaaaattagacacaactatcaagctttgaaacatctcatgtttttttattccttatatctataacttaaaacacgagctcttacttcaaaatgtttgtcactcttgctcatgcatgtacatgatcattttcatctcataatttttccccttcatgacctatatataatatttataaaaatattgttaacaactttctttactttataacattgatcgaatttcatctaagtccttttatctctctattatataaaaatttgtgattcatatagccttgttacacatgtttttactagtgcacatgacttctctaatataccataattaaggtggtcaatttttttattctacctataaacttgcttgaatcagattaatcttgactccataccatgactttcttatgcaccacggtctcctcatatgccatgaccccatcatgcatcacacactctttgtttggcttctatcatatctattcagattcaaaaattattaccatttccacgtttcatatatcacatgccaatgagagaaaaattcactccaccttcaatcaaaattttttgtgcaatcctcttgtgtgttccatttgaactttggatatttttcttatcttctcaaggaatttttatgatgtgctcttctagaaatctgggtccttataacatgcagttaattaaataataagacacttttttctaccatgttgcagtgtctgattgcattacctttaattcacactaactttggaatctgaggatgttacttccgagcaaaattggttgtacaatcttggagagtgtcacactctactccatgaacattatcaacagtaccagagaatatcatggatgattttttgtacgaaataatatctctcaatatgggttaaaatctgttattatcatttgatagggagaggagctttcggattttttttattttttttattttttttttattaaagtaattagatgataaggaaaaaagatttttcacatatgcataccatgaaaaacataataggaaaaaaaatagagtaaattctaaaagattatctttcattttttttttctaaaataataataataataaaatttaaaaaaaaaaaaaaaaccattcctcataattttttttctttcattttttcataaacaatcaagtaaaataaaaattttatactttttcttttgttctcttttctttccttaatttctttttctcaaacttcttgatacttgctgagcattgcctaatgattttattaactccttaaatgtagtttttaatttgctttgttggaggaaatacacccacattatatattcaatgggagtttgcacaaaaaatctttaaaggagaaggtagttcatacaatagttagtcacaatgtattaactcaaaataaaaggaaatattcattttcattcatatgtcttagtgaaatgatacatcaatatttatagggatcaatctcaattagagtgcttaaaattaagctctatcaccactctaatgacttatctacaactaatattgtacaacaagattaacagtcaatcaacctataaattaaaataaagacaattaaggataattataattaatcaagaaattccaacacttcccctcaagttggtgcatagatgtcacacatgctcaacttgtctaaaaactttgagaacactcaatttgacattgctttggtgagaatgtcaaccaattagtcttttgattgaatcttggtcaactctacaattttttcatctaacttcttcttaatgaagaatttgtttacctctacaatttttttaaaatttttcattcacccatgttgggtttagtcctctaaacttgatatatctgaattttgaaaaaaatgtggatgcttctctcatctcctcatctaattcccaagtggcctctcgaaaactataattgttccattgaacctctaccaacttggcaatagcataacctagtaccttatctatcacatctacaatcagaacgggtagttcttcatcagtcaaatcctttgacatttgaataggctccaactctacaacatgagagggataaaaaaacatacttcctcaaagccgatacatgaaacacattatgaatcttaaacaatcttgggggcaaggacactttatatgctaaggtgcctactctttccaagatttcaaacggtcccacaaactgaggattgagctttctgtttctctcgaatcccatcgtagactttgtaggcaaaacttttaagagaacatgatcaccaacctcaaactccaaatctcacatgtgattatcagcataactcttttgtttactttgagctgttttcaatctttatttaatcaagtcatacttttcaatagttaactgcacaagttcaagcccaaaaagtttcctctctctaacatcatcctaataaacaggagatcgacatctcctaccatacaatccctcaaaaggtgtcatcccaatgctaacttaaaagctattattataggcaaattttactaaaggtagttaatcatctcaattaccttttaggtctaaagtacaagctcttaacaaatcttttaaaacctgaattaccctctttaattgaccatcggtttgagaatggaaaacaatactaaaactcaacttagtaaccaaagttttctgtaaactatgccaaaatctagaagcaaaacgagggtccttattgaatactatagaaataggtaccctgtgcatcctcacaatcttcttgacataaaaagaagccaatcggtccatggagaaactaattttcataggtagaaaataagtagagttagtcaatcaatcaacaatcacccaaataaaattattactgcctaagtggtaaccctatcacataatccatggtaatatgttcacatttccatttaggaatagaaagtggttgcaaagaccttattgggtgtatatgtgtagctttcacctgttgacacactaaacactaagccacaaattgtgcaatatctcgcttcatgcctgaccaccaataattctgcctcaaatcttggtacatcttcaagcctcctacatggattataagtctaggacaatgcgcttccttcaaaaactctcttcttaagtctccatcatttgggacactaagtctagtcccaaatcttaagatttcatcatatgataacataaagtcaagcttaccgctcttcttaacttccttcataagttggactaattgcaaatcattcttttataaggtcttaattatcctaaccaagtcttgttgtactatgaaattcactacaagagctcttgagttccgaactctgatatggatttgtaaacacctcaaatcctctaataatcgcctctaacaacttctaatagttgctaagggaccaactgatttcttgctcaaggcatcaaccacaacatttgctttcttcggatgatattgaataatgttgtcatagtccttaagtaactctatccatttcctttgtttcatgtttaattccttttaggaaaacaaatacttcaaactcttatgatttgtgaatatctcacaagtttcactggaaaggaaatgtctttaaatcttaagtgcaaaaacactacaactagctctaaatcatgagtggggtatttttgctaacaaggctttagctgtctagaagcataagccacaactttcttattttgcataagaacacaccccaaaccctaatgagaggcatcattatacactcatgttcctctacttctcaagtacactaaaatattatctataaaaaccacgacaaactaatctagatagggtttgaataccctataagtccataaaggcagtaggtgcattagttaaaccaaaaggcatagtaaaaaaagctcataatgctatctagtttcaaaaaacattctcttgagtatattctcatttctaaccctcaattgatgatatctagaccgaagatcgatcttagagaacacacatgcaccctaagctggtcaaacaaatcattaatatgagaaagagaatacttgtttctcaccatcaccttatttaactctctataatcaatgaaaagtcttattaatctatcattcttcttcacaaataaaataggagctctcttcacaaatcatgaatccgaggaagagaatacttgtttctcacaatcaccttatttaactctccataatcaatgcaaagtctcatggataggtcattcttcttcacaaatagaatatgagttcctcaaggtgaaacattgggcctaataaaacctttatttaacaactcccgaagttgaatcttcaactccttaagttctataggtgccatcctgtgtgaggccttagagatatgagttcttcatgttaccaaatcaatggtaaactccaccttcctttagtggtaagctaggcaaatcgtttagaaagacataaggataattccttacaatgggtatgttctccaaccttaaatcattttcgttactcaccacatatgccaaaaagccttgataacccttccttatcgagaaaataactagtttgcaaggttgagatcatacgtaatggtctctccacatgtttcccctcaaaactaaactcaagttgaaaaaaaaaatgtgaaacataaacctttttccaaaaaaaaaatcaacaaagacatgataggaagctaatcaatccattcccaaaatcacattaaaatgctaaaggtcaaggagtgctaagttaactaacatctccctataaccaatatatcatcataagataatctttaagcattctactggccacatcagaatctcctaaaggagtagaaacattaatcaaatcaaagtccatgctagccactgacgtacgtaacaaactaatgaaagatattgaaacaaaataatgcattgtgcttggattcaccactaagaaaccaattagacaatttaaaattatgaggaagaatatgtaggaatttatactagatgaagctaaaacttaaactattgtgtcactcatctatccctaaagtaaactaaatcaagttcccaacaagatcataacctaatgctcttataccattctgtcatgccctaaaacctactctaagggtgtgatggtcattttacacctcaagcttaaaggcttaaagtgcgaacgactcaaacagtcatcttataactagaaggttaacaattactaaattcttgttcaaagtagtaaaataaaacatttctataatccttaaatctcaactttaaaactaacacatcaatcaaagtactattgtccaaataactccaaactcaaataattcaaataataattaaattctaacatctaaataatatccaaaataaagtttaaaacaaaatcctaataaagacaatttccaagcctaaccatcactcctcgcttgaattgagaatactagaaaaaaattgagggaatgagctcaaaacccaatacgaaatactaaaatagtttcataaatcaaacaatttcaattatgattacaaataagagatacaatatacaattttttttttcataaaatgagtttgaatatactaaagcgtccaaattttttcaattttttattttttattttatatatatatatatatatgtcaaaacaatttcatatcaaatcatgcattcaaaatattttactttggttattagataacaaatgatgcccaattaagtgagactatacaaatgggtgactaaccttaaatttattatttttaaggtcgatgaaaccaaatactactgatactagtaacctctaaccaaacccttaaaggttgagattcaaagcaattacattccccaccaagaaatataaaggttaactattatatctcgttaattagggcaaaaaatgtcaactattatatcttgttgactagggtcaaacaaatcataatcaaacacttcgttccatttattcaaacatacataaacataatatctctatatttttttgttataatcaaagaaaaaagttttaatatatttttcacgcaagatatatttgatccatgcataaaaacaaaaataatattttacatatttgcaaataacatataaaaagaaaatcatttttttttacaaaattcacattaatttcccttacctcaaataagcactcaaaaaccttgaagaaattaattgtgtagaatctattccttacatcacataacaaaaaaataactattactattgactatttatctaaaagttataaattaggcaaacctaacaatattttatgtttgtattagtgatcctaaataatttcctatgctaatatcattatcactaatattattttcaacttcctaaaccataacaatttaattaaagaatttccaaatttccataaaacatatgttctttccaaaaatctattgtcaataatcattcaatcgttcagccccacattttgttcgatattttgggacaagaccatctattttcaatcccatgtgtagcaagaaagggagtgaaagctttgaatttacttccattattggattataaacattgtaatcaacaattgaattgattttcagctaaggttttgaacttgtggaaggtaggcaaaacttgatctttagtatgtaagggataaagccaagaaaactaagaaaaattatcaaggaatattaagaaataacttgcaccaattgtggagataacagtggcaggacctcacaaatcggtatgaactaaagcaagaggatgagaagctctagattcaaataatggaaatggtgatctctggctttatgcatattagcaagcacaacaaacattatgtctatgacagtcatcagagatattacaagatgtaagaatttgcttcgaagtattatcaacacaatgaccaagatcggagtgccaaggttcagccaagttatccaaattcgtaatagtagagaagccatgacaagaagtaaagacgactgaaggtgcatcataatatttattgtgtttccaaaaatacattaatagattaaatccaaaatctttttatttagttatttattaataattttaagaaggtagctatgaattgtatattaaaataaaaatcattttacaataattaatccctctctaatttattttgcatgtaatgtgatatttcatccttattaatcaaaataaatgtccaccaaaaataatataaactttaaattgtcaactatcaaggtgttcattttgttagagtcattcaatcgaggccaccatgtataaaaccataaatttaattatttttatattagtccaaataattcaaaatattaataaaatatttacaagctattgcatggtggtacaacatgaagttttggtggaattttcccacagggacgttgagaagctacttacaaagataaggttcctgataaaccttatctcacgcatcattcctacttataattcctttacttttcaactttgtgaagatatttttttcattgaataagaaaatgttacgataataataccaattaaaatttggttgtgatctctatatctaattgcgaaaagcactttttaatttccaacgtatgataattggaaaattcggtaaggaagagcaaggacatcaattgaaaaggcatgaactttgtggatatgcaacaaggtttatcagtctgtttgattttgaaatttgatttttttataggggctttttgggtacaaaatttttatttatagcgttttctcaagtataaaatttttacaagataacactaattttagatatactttgccaccatcatctctccaagggaatctctcatgcatcattcaaactttatggttatatttatcttttgattaattgtattgcatgcacttttgtcaaagcccaatttgaactcaaattctatagaaatattagtttgtgaaaagttcgaaaaccaggaagagatgatgaatttgcagaagtcaaaagaaaaggataaatcttccaaactcta

SEQ ID NO: 11858 - DNA, 1032 bp, Vitis vinifera
  Intron number 15 from transcript GSVIVT01036645001 (locus GSVIVG01036645001) derived from phytozome v7.0 (chr-ID chr 13; pos 19708476 to 19709507 reverse strand)
catttgcaagggtaggtgattttatggctgagcgtggtagattttgtggctgatacaacatattatattcttattttggtgaacagttactaaggtgataactgaggcttaagaagaaatttatgtataaaatgaaaatattgtattttcattgtgagaaattgaaaaactcacatggatttgattccttatatgcccatattaatgatttatttgcatacaaaaactatttttttactaaacaaactgagcagttgctgttttatctgggctcagttcatctaattattgttaggggagatgagaagagaagagagttttaattttccttcatttggtccatgcaagaggatgattattgtttgttaggggacaggagaagagaagagagagttttacttttccttcatttggttcatgccagagggtggggagatgagaaaagagaggattttgtgggagggaggggaagtttagaaactttctttccgcactcacacagatttttaccttaaaatgaggagaatacttgggtagaagttaaaatggaagttgtcatacacattttagaaacaagtaactggtacttttctcctcaattgtttacaccatctttaggatgtaaccatgcactcttattttagtgccagtacttgtgctttggttttgaagaaagtataaatgagaaaacaagacataaagaaaacaaagaagaaagaaatgggaatggaattgacgtaattaaatgatattgggcctgcctgaattacatagtacactatagaggagcagagaggtcatactaatttatattttatgtttttgtataatacttggaatttatttttccccatcaagttgaagaatcaatattgattatgcccttgtaattttgcttctcacatcaatttttttttttaaagggttgtcaacttgattttctgttgtagattgggggtaagggaaatgacttgtaatgttccttttatttgtatagattttgcaggttgttgaaacattagacacaacaca

SEQ ID NO: 11859 - DNA, 2823 bp, Vitis vinifera
  Intron number 1 from transcript GSVIVT01019842001 (locus G SVIVG01019842001) derived from phytozome v7.0 (chr-ID chr2 ; pos 3802314 to 3805136 reverse strand)
ccacgggtgcacccattggaagtagaattaagagccatgggcacattaaatccatcaaccaaagatatatcgaagaagtccatgttgttgaattggttaagtgcgaattcggccaaggtgttagggggtgtaccataggcttggcattggaggcggccaccacaatctcgggtctcacacgtcccgttccctgacccatcaaaggtgcagttggtacgtgcccacacacgggctgtgccagggttcgcatcgaggctccaggattggcccggaccaagctgcctgcccccacctggtaccgccgccgcccaaactgtgtaggagcaatggttttggatgttgatcagcgtggctgcgtggcaggaggcgaagaatagggtggtgagaaggaatgaggaaattaaaggggttttgaagaggcccattttttcaggaagatgggctttatggtttggggtggtccgtgaggaaatggctaggagtttatatagagcgaaggtggacttggggtgggacactaaaacaatgtttgaaaatttctattaaggatttatctttttggtttttagaataaaaaaagtataaaaacacattcgattgttaattataaatttaaaactaaaactatgaaaagtgattttttttacatatattatattttaattactttttaggaattattgaataaacacgaagaatgtcttaaaataaggtattataaataggaattatttttaagaaatatttaaaaatataaaaaaaaattgacaatattctaagctcttcaaaactttttattttaaaaatattaaaatattatttttaaaagttattcttgagaattactttttaagaattatttctgaaaaagttcctcgatgaaccctaagttaaagttaatgaccctaaatgaaaatattttagcaataagctttgttaaaatctaaaagatggtgctcgacttagaggcatggaagagccaatcctacctcatctttgtttttcctcaaatcttatcaagggaagctgataatttttttttttttaagaaacaaaaataaataagcttgtataaaaagaaatgtaagatttaacatttttataaaatttatgttcaaactagtcctttattgtcacataagagtcgtatcataatatatatatattttaaaatttaagtaaaacctcaattatcaattgagggtttatttttgaactaaaaccacaattgacaattaaggtttcatttataaactgaaaccttaattgtcaaatcatacctcatttttaaattgaattcacaattgataattgagacttcatttttttattaaagtcttaattttcaattgaagcttcaattaattatttttttactttaaaatttaattaaaatattaaattataaattattgttgaaattaaaaatatatactttaataataaattaattatatgtttaaacttaaaaatctagtattacttcaataaagataaattaataaatataataaaatatttaaaccttggacttaggacttaggtttaaagataaattgataaatataataagatataaaattatataatttattaatttaagatatttaatttgttttatttttaagatattaatttatttgtattttcacaaatttatctttattaaaataatagtatattcttaagcttttatatatagattttattattattttaaagtatatgtttataatttttcattaaaaaaaaattattatttatacccacaacatatatgccttgaagatacattttaaaattagctaataaaattaattaaaaaatgtttactacaaaatataagttttagtagtttcatctatgtcacaaaaattgtttactaaatattcatatagtaaaaaagaaaattatataatcttacgtgtctttacaaagagagaacctatacataactttcttcctttttagttgcccggtaacatatagtatttgtaatataacttaaattaataaattatataattttatattttatttatatattatataactttattattttaaaattattaatttattgataaataaaattattcatttatttattttatttatcaatttatctttattagaataatgttgaatccttaaacttaaatatataattttttattattaaagtaaatatttttaatttcaataataatttgaaatttaatatttttaattaaattttaaagtaaaaaaaataactaaagtcacaattaaggttttagtttaataaatgaagttttaattgtcaaaatgaggttttaattaaaaaactaagtctcacttatcaaatgaggtttccgttcaaaatgaagtcttggttattaattatggcttcaattcaaaaataaaattttcaacttaaattttgaaaaaaaaaacataatatgactctaggtgataataaaaaggacgagtttgattgtaagttttgcaaaaaggtttaaactttgggctaccccaaaactcggagaagactatacgatagttagtgcatgcggcgcaggtaaacgtaccgattgaatcatctcccaaagggtaactgtatacatctgggcagctagccttgaaaaacatgaaggtgtaggctaacagctcccggtattgcaacagtactgagtattgttgaaaacggtacatgggttgttacacccacccgggtccctcaactcgtttgggcacggcccgttaatgtcgcacgtacgcttgaccccacgtttgcacccatcagaagttgggctaaactccattggaaggttgaatccaacc

SEQ ID NO: 11860 - DNA, 1285 bp, Vitis vinifera
  Intron number 3 from transcript GSVIVT01023551001 (locus G SVIVG01023551001) derived from phytozome v7.0 (chr-ID chr1 4; pos 9774454 to 9775738 reverse strand)
aaagggtcagtttatctctcaaatccttctctttttaattcttatgattttaattttccttttaacattgttatcaatcaaattattggaggaaaataaagaaaatttaggttgagctggttcttgtttctctttttttattttcatttttcacctaaatttaacttaacggttaataatagagtttaatataattaaatgtttgatttatttgtttttattcaggtttgaatggtggacgttgaatgtagtttgtatatattaaaatatttataaaattaattatgatatttcttcttactctaatttgaaaaaataatattcaaatatcctaaaatatttgaattattaatattataaaagttttataataattaattatataatcattataaaaatttgtattggaataataaaaatgatttctaattatacttaattagtaaaaaaatgctagaaaattttctaagttaacacttctatacagtgtacatatctttgcataatggttttataattgaagtatatgtttgattattgaaattaattcactaacttttatatttttaatttgggaaagaatatcaaattccattttttgatttacaaaattcattgaattatttactctaatgaatatttagatgaatgtaaattatgttttaggtttttttttaattaagaaatatatattagaattagtggtagtttatttttattttgttgtgtgataaatgtatagaattttatggatttattttttattaatttattatctagataaaggaattttttatagacaaataaaaagtatttaagtagtatttttttataataagtttttgtaatttataatgaattcattctcatccaaattacacgagattgtggtggtttaaattttttttttaagacaattagataagaatcaatcaaaatatttaaggcttaaagtaatttgcgttaacaattaaataaaaaaatggggaaaaaaaacccaaacagacgactcttttggaacatttcaaatgtatgagagttgtattaaaatgaatttttcattcttgactgatttttcctttacaaattcttatagttttagacaatgaaattcaacttgtttaagcatgcacattttcctccacccttctttaagatttagtttattgtgttttcctacacatggattattttcttttttcagttagtcaaaatatataaataacaaaatggtgggatgaactctgcaggttgcatttcctagcttgaattccttagcgatctg

SEQ ID NO: 11861 - DNA, 6922 bp, Vitis vinifera
  Intron number 1 from transcript GSVIVT01007794001 (locus G SVIVG01007794001) derived from phytozome v7.0 (chr-ID chr1 7; pos 8952128 to 8959049)
ttcaattgtttcattttctcggcggtcaaaccggggtgattgttttatttactcgttgattttggtttgctttctcaagctgtagactctgaaatgattaaattgataaagaaatgctatgtttttttttggagtttttgaaattggatggtgctatgatggattttgtattggtgcttccccttctgttttgttatgtaatgcgataaggaaattggtggaaaaggataagaggacagaaaaaattgaaattttagactgtacaactgattgggaatggaattgttgttgcaagatttcacatttttttttatctcttttgtcgtcgattggatgcaatgtgctgctttttctaacatatgatcgagtactcatttggtgcaattgctttaacaggaagatagaagatagtagttgttgaatttcttcaatttaaaattatttagtttgaatcggtgttcatatattaattgggattatattttgtacttagtgcccttctccgtttcattggaaaatttagcattgaataaattttcttccaattttatgtgacatttgagattttgactgcaatctcctatcatccgaaacttacaaattgaatagctgttggtgaaatcatagtattatttacttctgcaatatggtatgggaaaaggtagatacaatatgaattgttgtatttatatacatgccaatttttacccaaatctacaaagctatgattgtagtgggttttatgcccatgtagtattcataatttaattttgcttaagtaataggtgaatgaaaaatcaggtctaatgtagatccaaattcttttgtggaaactttcagcaggaataagaaaaggtgttttatcacatcatttatggttaagtaaacgatatttcctgttaggatttaggatatgattcctttgtagaaaacaaaaaaagcaccccctacatgtttagggaaataagtgttttggcttaacaagttttttgatgggagcacatcttactttaaaagtgaagtacttttagttgagtcattgcagtgaggctaacaaaaaccatcaaaataaaagtttactcttaccattgctattatatgtaccatgttgtggccttactctatctcaattctcattgctccctacacttcttccgggattcactttatctcatgtggtgatattgaagtttttctttgagttgttagttttcctatacttaagtggtgaccacttgagaatggtactatgttagttcaatcattaccatgggtcataaattcacaaatcctgtagttatcatggaaatatgtggtaaagttaattgggatcatatatacatgttttgcaacaaaaaaaagttttttgtgtcattatttgtaaattttgtcatataggtttagataaaaaatttcatttgttttttttctttaacttcaggtgctttatgagaatgactttttgattctcattactacagtatacataggatctacaatcatatttatagatacaatggtttaaatctatttaagggaataaaatatcctaatttccatcattgaatctcccaatttttagtagcgaatctgaacaatctttccacactccccctcaagctggcttgaaaatgtctttcatacttagcttacaagttatgctatcgagctgccccttgtgtagtcccttggtaaaaacatctgcaaattgcttgattgtagggatataaagcatgcaaatcagtccaccatctaacttctctttgataaagtgttggtcaacttctatgtgcttggttctatgatgttggaatggattatgtgttatattgatccttggtttattgtcacaatagagcttcataggctgaggtcttcaagtaaattttttcgccataaaagttcacaaatcccatgagctactgctctaaattcagcctctgcactgcttctagctaccatgatttgcttcttgcttctccaagtcacttggttgcctctaataaatgtatagtagcttgatgtggaccgtcgatctgtcatgcttcttgcccaatcagcatcgatgtgagcttcgattcgttagtagccatgattctcaaatggtaaatccactcctggtttcccttttaaatacttgagaattcgatcgattcctttaaaatgttcttcccctggtgagtgcataagttgactcacagcacttacagcaaacgctatgttcgattgagtatgagctagataaatgaatctcctaactaacctttgaaactgttcctgattcaccaccttatttgcacttgctagttgtagcctaaaattgggctccattaggggtttccactggtttgcaaccaagtaaattggtctcttcaagtaagtcaagtacaaactttctttgtgtcacaaatattcccttcttagaccttgcaaactccatgccaaggtcttttacttctaattctcttgcatggaacttcttcaagacctttagttccccttcatcatcaccggtaaagataatatcatccacatatacaatgagtatgactatcttacccgttgttgagtgcttgtggaacaacgtatgatcagcttgactttgtcaatatacaccttttgatagccttggtgaattgatcaaaccaaactctagtgattgttttagtctatagagagagttcttgaacttaaatacttttccagctccaagcacgcttcctaaacacgatggtaggtccatgaaaacctgctcctctagctctccatttagaaaaacagtcttcacattgagttgatgcatcaaccatctcaaatttgtaataagagatagtagtacttgaattgaattaatctttgcaataggggcaaaggtttcttgggagtcaattcaattgccctccacttaccctccacttacttggggatgtcgttgggtgctcccttcaagtttgtggtagcttgggatgaagtggaggagagattccctaagatattggctatgtggaaatgtcaatatatttataagggaggaagaattaccttgattagaagcacattgtctaacttgcctatttatttcatgtctattctacaattgccaagagaggtcagattaaggatgaagcagattcaaagaggtttcctgtggggaggtgaggccttaggacagagagcttacttagtaagatgggcaacagtgtgtcttaagagcctttttgtgctcaataaggccctcctttgcacatagagttggcggtttgcgaatgagagaggggttttatggaaccaagtaattagggggaaatatggggaggaaaaaggagggtggtgttcttgggatgttagagaagggtatggtgtagggttgtggaaagcaattaggaagcttgggcacatcgttagcagtagactcctttgtggtggggaatgaccaaagggtgagtttttggaaggatatttggtgtggggctacacctttatgtgcttctttcccttccttatttgccttagttgatcccaaagaagcttgagtgaaggatgtttggaccaggacagtagaggggaaggtcttctaatacgcttgtgtggtcagaaggtgatcgtggaaaaggtggatagggtgcagtgaatggaaagaaatgatggaattttcttgacaaagtcgctttacaaggccttagagacaaacgctttagttttgtttccaatgaagatcatttggaaatcatgtgtacatccaaaagtaagtttctttgcataggaagcatcataaggcaaagttttaaccttggaccaagttaaaaagaggggatgggccttagcaaatagatgctatttttgtcaagcggatgaggaattcattgaccacctccttctctgttgtgaaaatacaaggacattgtgggagatgcatttcactctttttggggtgtctttggtgtttccttttcggttagggaaaccctcttgggttggaatggattctttgtggggaaaaaacgcaagatagtttggagagcgggtcctctttgcattttttgaacagtttggaagacaaggaataaaatcgcttttgaagatgtgtggacatccaatggctaaaaacttctttttttaactcactttgatcggagactaaattgtctacaaaagatggtccatcaaccttttttaagttcattgattaggtgggttcccattgagggaggggttgttttttgtatatctttgtagacggtttttttttgtttcagatgttagggagtgagtgtttccctttctgttctgtacatcttgagtcgctattttagcacctcttcacaatacaatactttttcttatcaaaaaaataattttgggtgaatcctttggctgcaagccttgccttgtacctatgaatgcttccatttgcctggtatttaatcgtgaacacctgcttacaacccacaatccttttatcttttgacgatttaataatttccctgagtatcattcttcttaatagcattcatctcttccatgattgttgtcctccatttagtgtgacttaaggcttcctgtatagttttaggcaatgcaacattagagagagtaaacgtaaaggttctatagttctgagaaagtctatggaatgagacatactttgcaataggatgcatagtgtaggaacgtgcgccctttctaagtgcaatgggaacattaaagtcatgtgaagcaccctctaaactactagatttaggaattgaacacgggtttggcaaagagatacttgtttcatctaaagggccatcatttggaggagtttcttggcttatgttcgactgtgactctctatttcgattatttttacttcaagagtaggacacaacttagtttgactttgtttctatggtggttatgctagtgaattagaatctataatgtttggtccattgggtaaaggctggacaatggataaaggctcaataagtaacacttctaaatgggatttttgtgggtgacatgataatgacatgggtaagggttccatcacttcccaaaaaggatcttttctctcaatactctctccttgatgatgatttttggtgaaataaggttggttttcgaaaaatgtcacatccatagtcataacaagtttatttgaaataggattctaacatttgtactatttttgtttaggagaatacccaacaaatacacacttttttgattgagaatcaagtttagaagggttttgtttatggatgtggacaaatgcagtgcaaccaaagattttcaaaggtagagaagtaaagatgcaaatatgtgggaagatgaccagtaatctatttggaggagtgccaaatttcaagactctagtgggcatcctattgattgagtaagatgccatgggaaaagcctcaccccacaagtattttggaaaacccatatagcgaacattatagacatagccacctcaagtaaatgatggtttttctctcaactatattattttcaaagcatgtggattggtgggtaatgcctttttctttaatgtatctaccaagaatagagttgaaatattcctctctattgttagttctagagacttgtattcaagtgtggaactaggttttaatcatgaaatagaagtctttaaacatttcctcggcatcaaatttttttttttaagagatacacccaatagactctagtatgaccatcaatgaatgtaattaatcacttggtttcgcttatatttgtgactcaagaaggtcccatatataattgtgaatttggtaaaatggtttggattcttgataaggatgaggcgaaaaatgaacatggtgatatttagataactggcaaacttcacattgaaatatcaaaggattcaaattttttaatagaattggacataattgtttcaaataagaaaagttaggatgacctaacctgttgtgttataccattatttcatctttaacaagaataaaaatcacactactactcgcagcttgagcttttccacctttgaggaagttgttatcaaaataatagagtacattagccttcctagcattaccaatcatcctccttgaatgttggtcgtggaattcacaattagagtcacaaaattttgcaaaacagttagaatttttggctattttgctaactgacaaaagattgtaagaaagattaggaacatggagaacacatttgagaaatagattttctgaaataaatatagaacctttccctgcaaccagagacaagctaccatccgcaattctaatttttaagtgaccataacatggagaataagtggtaaatacataggatatcttcaacttcaggtggtttctttatgatatttgaacacaaagacaaattgagaatgaattttttattctcattactacaatgtacataggatctacaatcatatttatagacacaatggtctaaatctatttaagggaataacctatttacaggacataattaaaattcaaattcaaattcaaagaataaaatattctaaaatattcaaagaataaaatattgtaaaatttctaaatatggacaatacttcgtaattttcagcagtgaatctgaaccagtctttccacaatatctttatcatgtatgcttctagtgtggaaatctatcttacttgaaagttttagaagagggacatgcattaggtttgtacaaaaaatccattacagtttaaagctgttgaagatttttagatgtgacaattttctattctttttattacatggcttgcataagctgaacttctgtttgaagttgcaatgttgtgcatgatcttgttattcaatgtcttgcttttctgatattgttctttccgactgatatatgcaataacctgtttctagttttggacattaaaaactgaggctatctacttcac

SEQ ID NO: 11862 - DNA, 7957 bp, Vitis vinifera
  Intron number 1 from transcript GSVIVT01026007001 (locus G SVIVG01026007001) derived from phytozome v7.0 (chr-ID chr1 8; pos 25938816 to 25946772 reverse strand)
gctaaaaaacaacatttcctcaaagcattttgtattttttatgtactttttttttattaatttattctatatgaaattttaaacactagaacctccaaccatctgaaaaagtttattcgagaaaaattaaatttgattaattcaacttataatactttgaaataactagaaaattataaaaatgaaaccacttattttgaacaacaaagagcgattaattaagtttggcaccaaactttgcaacaggccttataaggagttttagcaattatcaatagttgtttgaataaagaattatatttacgtatcattgctgctaatattgatatgcttatgtcaatgaaaaaaataagaaataattgattagtctttattagtgtaggcattattttttttcttttcaaaaaataattaataaatattcatggaaactattagagccaatgaaattaatattattatccgtgaacgcattaaataatatataatagaaaagtaaagattgtaaatattagtactgtacatcaaataggttatgtaatagatacaggtgaatgatatatatacacgtatatgtatatgtatatatgtatacatatatgtatatgtatatgtacatgtatatggggttgttgaggtgaaagacaggtggccatgtacattgatagtcattaaagaagtttggcaagcaaagaatggatcatttcaacatcaatcctttgttcctttcacactaattcttgtatatattaagatgtcactggcattttgcatgccagttcccaaaactttgctctcttaggaaccaaccttttggcatagccatttgtaccatgtcttcaatctaaagccaggcacatgcagttgggtagatagatctataaaagagtggcaattctaaagtatgtttcacatcatctagaatcattcatggggctcccataattctttatttgtatgcttatgatagcaattttcaataggtcggtgtgggccggggttgaatttgaggatttgaatttcaacccttgaattcaaattctttgacaactatttttatggctgatatagttcgagaaaaaaagtgggagaggaaaggagaagcaaacaaggaaacaaattcacgataaaataagacattaactaccaatatttacccttaaattatgtgtatcataattctatttacttgaattcaaaaacatttatctcgtaaaatcaataaattggagatgatttgaaagagttataaacatttcttaatacttcaaaatgttttttttagtaccgaaaacactttccttataataattattcattgaaaaatgtagaaaattctaaatcataattactttgtgaaagcattcaaatgaaatgtaaatgtcattgtatatttaaagaaattataatattgaaaaataagaatatttaaagtaacgtaatgttctaaggtgtgagtgttctacttggattctatttgaaaaccatttccatataattgaaaagacaaccaaaaagtcaaagttttgtctaggagattgttccattttcaattggttgttcatgggaaaagacaaaaatgctagttgaagctttcatcatcattaaacaactttcccatgcaaaagatcaaatttcaaatgaatcaaaatttaaatactcatgctttctcacccttcttatatgtttccattgagaatgcctaaggtgccatgaattttatggcaatctagaaacttaaatgcatagttgggtaggtagcaagaagaacattctaaagtcatggtcgtttcgtattctttgggagcaagcaaattagggttgggaaagttgggggaattgaaattgcatagaaggttcttaacaaatcatatggtaatggtacatggtctataaaccaaatagaagattcctaccctaatgaaatcatttaatttggaaaaggatttagaataataagttttaattgctcattacaatggaaacagtactttagaaaaccttgtttaagagattttgagctttattattaacttagaaacttgagaaatcttgtccaaatttttaaatttttggtgcaaaatattgggtttttttcaactaatattttaacaatacttttaaaaggaaaatgatagcattaaaaaaaaattaggaattgataatgtttgtcatacaattagttgaatcatatattaattaatttaaattaatgaataatgattcctaccagaaatagggattacaacggggcaagtcacccccatcccaacttattttatttatttaaaataattttcatctctgtctcatttaaaaaattaaacgagatgaggtaggtggaataagtatgcgaatttttttactaccagaaatagggatggcaacggggcgagtcacccccatcccaacttattttatttattcaaaataattttcatctctgtctcatttaaaaaataaaacaagatgaggtaggtgggataagtatgcgtaatttttatttttattattattagtattattaattttatttattcaaaataattttcatctctatctcatttaaaaaattaaacgagatgaggtaggtgggataagtatgcgaattttttattattattattattatattattattattattattattattattattatgatcaaaaataggaaaataaaaattaaatttaattaattttatatataatcaagacaaactcgaacccaccaagaatctgttccaaacttgtcttatgttttttaaaaaatccaaaatcaatttatttaaatttaaaatttgtcccattagaagtcaggtaggacaagtacttgaaaaaacttgttccaataacatccctaatcacaaagtcaaattaagaaattaatccctatattataacatactttgaaattggatgcaaatcatatatgttagaaaaattgggctaatccaacctaaagtaatcacctgagagagggggggggggggggtgaatagggtgatggtctttttttgcaaatttaaattatatgaatgcaatagacaactatatgcaaatatataataaaccaatataaaaataattacttataatgtaaaagagtaagaaagggagaatgcaaacacaagatttttatggtggttcagcgcaacccgacccacatccactcttctctaccttcaatcccaagcttaaatttccactatttcaaggcttccaaaccaagctttcaagttatacaattggattatggttctattccactttcttggacttttaactccaaacaccattttcaaacctcaagagatacgtcactcttgaataacccctcaagtgataccccacacttaagaatccttaaatgatacctcacacttagattcttcctctcaaatatttacaaatgaatataataaatgatctcacaaaattccagtacaaaactttaaggctcaaatgatataagaaaactaggattgaaaggtgcactaatgatatgcaagttttagaacaatggtgtactaaaaaatactctcccaaagcttaaatatatttaagaaaagtttaggaaggttaagcacatgaaaaaataaagattaaagcctttttatagaagaaaacgaccaaactagccgttgggggttagaccggtcgagctggaggtcaaccagttgactagttgttagcatttaatgtttggtaggtaaccgttggacctcgactgccccttgatcagacctcgatcggctgaagctcaacttcgaccggttgaggttcaactttaactggttgagtttcaaccttaactagttaaacaatcactctggaagatagataaagttttttgtaacccctcgattggttgaggtgggggtcaaccggttcctcatccaattcaatcggttgagccatttttggcccgaatattctcctatggttatggtagtagttagggccaaaataggtgaactaaaagtttgaattggcttattccataccagtttagggctgtgtattcaatttcgggtatcgttttctcgatgatcgttgatagttccttaaaaaggattttaaaaccatatttacatcgatcatatatcgcatgccatataaaaaacttttcgcatctttttttctcgcatgtaaactagttgacatgaaactcgctagcgtggatcccacaatggggaaccatccttttcaatttaaaaccttttaaacaaaattagaaagcatttgacacaaggttttagttgaaaacatgaaatcattcaattttaaaaaatttaaaacaaaataactattggatgattttgatacataaataaaggatgtaatgcataaaaaacctagtgtaccaataaccttacaaaaagatcctataaagcttaggtcttgaaaataacttctctttaaggcctttttcttcatattgatttctcttttgcttgattttatctttgtgattgccacattgaaaatcttcttgtctaatcacacttaaaatataatcattagtttcaaaccttattttgttatcatcaaaatcgagattaaccaaaccttggtttcacaatatctacctattactaaattacatcatgcatgatgcaattgtttttctaatcttaattggcctatcaataaattatatgttgatgacccaatgttatgttaaacaatcataaaggaaaaaaattactagaactaccaaatctaaattttatttttcataattatgtgtttggggaagtgattagcatatgttgttgttaaagaaaaaaaattcaaaattttttttttaattttcttataaaccttattaatggaggcattagaatgaagatataaagccatggcatttataaaataataaaatactattttgtatagattggactttggcaaagccaaaagtgggcggaccaattttcctataaaagaaagaagcactaagtcaaatattatgtcttggtctttcttggtaatgagtaattaatcaaccttaatatagaaatttaccatgcaaaagaacaaagtttcacatggaccaattcaacaatcatgctttcttacctttttggtacgtctcctttgacaattttgcctgtgggttccattgattctacaccaacttgtgcaaataaagctcatttgccacacaaattttgaatcaaagcctaccacatgcctcgtatcatttagaataattcatttatagatgtttggtagaaaaaaaataagaaaaaaaattcaaattcaatatttattttttcttttattattttatagtttttcctcttttattttgtatgaacttaaaaattaatttttaatatttttataataaatcaaataacaaatggaaaataaaaactaacccaataaaatccttttatttggaaacaaataaaaactcttaaatccacattaatatatagagaaaagaggaaaaaattcccacaaatttcaatctaaaatgctttaaaaaaaatgtattaattttaaaaatgaatcttctagaagagtgtatatttatttaaaagaaaataatcacataaaaaagtaagaccttggtgacctttgtttgcattccaattaggtgtaccataatctaatgactcaaattaagaaaatctctcccaagtcatgaaactacttatattaaaatgttacatatttgaaactaggtgcacatcccatctctctctctctctctctctctctctctctctctctctctctatatatatatatatatatatatatatatatatatatatatatatatatatatatattattgttttggcttaatatgttgtgattattgagaacatgtgaggacaagtaaatatggatagattttttcaatatgaaaaaggaccaccatgttggtttttgtcttctactaagcttggttccctttggacttggtctgggaatcaattgattattcatagatgaaagagacaagggaatacaataaggtttcaaaacaatttccagtcccattttttttttctaagaataaaaatgatgggcattgtttaatttgttggacagtgaaatgagtatgagttttttacttttaaagatataaaagtgaaaataatccaaaaataaaaaagtacaaaaaagcatttttaaaaatgagttttccataaaaattaaaaccttattactacacatttattaaagtaggatcataatttaattatggcatgtttgggaatgattatggtaaaaatgtttcttttagtagtgcttttatcaatagccgtagggtagtgttttttttttttttttttacttaatttcaaataggacttaaaactaaatagtaattaataatgctaaatattaagttatttttttctaatattttatttatattaagtattaaaaaataaaaaaaaaccaatatgttatttttaacattcagaataaatcaatttaatattttttattccgttaaaaaatttaagaaataagtaataagtcaacaaagagtgaaaaaacaaactatttaaaatatgaaaataaattatttttaataaaaaaaaattttttaaaaaaaacatcagctaaatttatgaaaaaaaaaaaataacagatataacaaagtgatttttgaaagagtacacatcaatagttaatccaagaatcatttaattttctacctattaaaaaataatttttaaaactttttttagcctaatttttttgggagtgtatatacttttaaatattataaactatttctaacattttcataatcactaaaaaataagaaactttaagaaattaaagtcctaagcctcacattaaagcttaaatatatttgaaaattttgaagtaaaaaataaaatcatatttttaaaatatttataaaaaatttattgaatattaaataacttcccacaaaagccaaaataaagtttttactataagtaacttttttttttacttttatattaattgttttttaaatcataatttttttaaataccaattaaaaccgttttctatattactcaaaatgcaaaaataaaaaatttgaacaataatggaaagcgaagaaagattgcatttgaggtgggtcattattgactatgtcaagctaaatcttttgttaatattggaaaaggttttttttttttaaaaaaaaaaaaatcataaaatggattaaagatttaagtttttttggtgaaaaagaataaattaaaatttcaacgaattagggatggaagaaattgatgtttgatgaagcaacccagtcaaatgagctatgactctttgttccactctaaggtttgactcaagttacaaataccaattcaacactaatataatagccgaaatttgaatttcatttgggctcatttggctacaatcccatctatcagcttagaatcaagatttgtaaggtagatggtgatattcaatttttgaaaaacacagaaaaaaaaaaatcaaaaacattgattcgacccttagaccgagataacttatcttatcgcaccttaattatattatactatcatataagtataaattttttaaaaaacacccaaaaattaaataaatataaaataaaataaaaatgtcaagtgcgggcgtgtgattgtgattaagccgatggttgaagttggacccggcgtttgtttacctctcctcttgaccacacgttctaatgttcgacctgagatgctataacctcttcaaatccgacttggtcttggtcatcaaaaaatagctgtttcccccaaaccgcgtttcctcttttgattcttcctttccccaaaagccccacaccccttaaaaatcccccagaacccacattagattcaatcaaaccagcagtactgccatcatcttctctcttcttctctcttctcccaccatgagattatcacttccactgctcaacaacacgggtatct

SEQ ID NO: 11863 - DNA, 4809 bp, Vitis vinifera
  Intron number 1 from transcript GSVIVT01008829001 (locus G SVIVG01008829001) derived from phytozome v7.0 (chr-ID chr1 8; pos 2521403 to 2526211)
tgctaaaagagtcaaatcaaatttttatttcaaatgtgcagtaaatccaacaaactaacaataaaaggtttttgaaaaatgattttatataggagttccaccaatttcctaattaatatacataaatctaacctatggattcccatctatttagaactaaaagcttggattcatatttgactcaaaaccaaatttttattgaaaataaaataatgcaaactaagtgagatatagctgcattttttgaaaaagaagagattttgatcataaggattctagatgatttttttttaaaataaaaataaaaattcaaggggatcttttgagaaaagcattttcttttaaattagaaagaaattaatttgaaaacaataaaatataagaaacaacataccaagcaaaacataaaaaaaaaacaaaatcccaaagtaaattttttgacaacttaagaaactaaagtggtgaaataaggactaatcattattatttttcgatggccttcaaaaattaaatttgacaaaggcctaccaaaacaataaactattaatatttagatcaaataaactaacataatattcaccaagaattaacaattaggattcaagaaacacataaattgataataacaataagaattaatataagatcaacaaaacatacaaacgcctctagactaaaaaaaataaattgagactatgttaaatcataattaaactttatctaacaagattaattaaactactgtattaaaattacaaacacatccaaagtaaagaacaaattaaaactaaattagatcataattaaaaaaacatgaatttttctaatggagttaattaaactaaggaattaaaatcacaaataaatcaaaatataatagatagattaaaattgaattaaattgaaattaaaagtaagaatttttttaatagaaataattaaactaacgaattaaaaccacacacacgtttaaacataaaagataaattaaaactaaattcaaattagaatttttaaaaaaaaaagaactttaacacttggaaaccaatagattaacaaactaaaataataaaaaaaacacttaacctaaacggatagattaaaactaaatttaagcaaaattaaagttatcaacttaatcacatgaattaaaaaatagaattaaactaaaatttaaattttcaacatcttacattattaaaaaaataaccaaaccaagatttaagcttcctcaatttaataggaatcaaaatcaggactaaaaaaaaaatttaattaaatatgaattaaaaattaaactaaaagaaaattaacttaccttttctgaagatgagtgtgggctgcgaaggcattttccaaagtgcagacctgtgcgaggtgctgctgctggccttgcttcccgaatgatgcggccggttttttttttttttttttctgtcaaagtagcgtgatctccctattaaaactaggtgccagtgagtaacggagactcctcttccacatggcaatctgtgtttttctttatatggaaacaactttgatacttatagagatttttattattttatttttctttttaaaattgatattggaaagtggtgttttaattttatgtacattacaatttaaaaaatattaacaaactttaaaaaaaaaaaaaaaaatttaccaaattggcattaaaaaaaaagtttatattaaaaacatttaaaaaaaattaatttatctaaatttatctacatacataccactaaaaaactttatattaaaacaattttaaaattctatttacttactagccctaaaaaacctatattgaaacactttatttaagaaaattaacttatcaagaatatattaaaagcactttaaaaaaacaacttattaaaaatttatttatgtacataccactaaaaaatttatactaaaagtatttaataacaacaacaataataataataatgataaaaagagataatataaccgatcacattcaattttcttgaaaataaataaataaaaataaatagattactaaacaaataataatccataaataattaaataaaataaatatataagtaaataaataagaaatcaagcatatggaagtgttaaaaatacaaaccatgcgaattatgtaagtcatgtaaaggttatctaaataggctaaacgtgtctaggtaggctaggcgtacctaaatgggcctacaggtgcctaaaagggcttagaaaggtttctaagtgacctagggtgtgtctaagtgagctatccctaaaggaaaaaacttagatctaacccggggctaccaaggatcataatgaggggtcaaataaatctctcaactagtcctcaaggtggctcatgaaggtagcttatatgagcaacaatgggtcaccagagaaacaactatagagtaccaaacaaatacctaataggtcatgtgctaagttgacaaaattaagagtctacacactacatataaaagttatttttaaaacatatttaaaaatgttaaaaataagttaaaaacattttaagttttcaaacaaacttttgttctacaaaaattaaagaacaattttttaaaactgttcttaaaagctattttttataattgttttcgaaactataacaaacaagtctttaacattttcttttattggtgtgcctttgccttttaaggcctatacccataaagaacatttggatctataaaaaccaatttcacgtgctactaaccccattaggaggatgtcatttacatatagactaatgatatgctatcatgcatacgttcaactgattccagggaaaaatatgtagtaacatttatacgtgtgctattgagacaagcttgacaacacttggaccaatttcatctcgataggttgcttaaccatttctttcttatactaatggtacagggtataccaagtctactaccaaaatgcgcttccagaacctattcctaaagtttaagtgatgtgtatcaaatgtaacttaagctttaagttactcctcaagagtaaggtagacataactagtttgagatatcctcacgagagctaaatggattagcataatacaaatatgtgaagtgaaaaagtgatatgacctctaatcacctatcataatatgttaaggcctttttctaatcataatattaagtgaatgcacctatgaatgataatggagcgggtttttcgagaactcgtctcatcctgcctctaaagggaagagtttgaaataaatataaacaaattcatgacagatttaggaagttgttaaaaacccaagatgggagcaagtataactttttcccaccttgattatatataattttaaataaaaaattatattagttattttttttatttaaaaaaaattaaacataaataaaatattattttttcataaaaaattataaatatttataaattatatttatttttaataaaatttaaaattttaaaaataaaaaactgaaaaatgttgaaaaaatttaagtcaggttggggcgggcaagtatgagaatttcttatacttgctccgttttgtttcaataatttttttttaatagagatgataatagatataaataaatgggattaagttggcacaagaatgatccgtctcaaaaatccctacctaaaccttaagatgagtgtagagatttccctaataaaggaaattttgataaattaaaattaagaaaattttgatatcaactaactaatgattagcaattaacacatggaaaaattaggaacacgaaacttgtgaaacatggatttctaatttgcaaggtttgagaggttgaaattccctaatacgaatcattcaatgatttgcccaaaaataataatattaaaatacaaatttctaataataaagttagaaaaattgaaatggtctaatttgaattcatttaataatttgtctagaagtaaaaatatatatcaattcgaaagctccaaagaatactgcccaaaattttgtattatatataattgcatggtacctcatgaaaaataaattttaaaaactaattttcgaatttgagcccttaaataaagttctattattgaaaataatcaaggaatatttttaagaatcgtttttaaatactaattttttgaaaatatttctaaacaaattttgtatttccctttcttttaaaaattacaaattaattgttgtgaggtttcggaaatggcattattgaaagcaattgacaactatttttaaaaattattcttacatactagttttttaaaactattctaaaaaaatgttcctaactagttttttttttttttttttaatttctctttccttaaaaattgcaagtttgttcacttctcaagaaaaatccaataaattaaaagatgaaatgagtcttgaaattgacagaatctgcattgaatttaagaaaattttgtgaatttcttaataaagttttaatttattttccattagagagaaaaaccaaggagatggctagttcgatgtggggagatacaaaaatgtcagtggaagagaacctgttcttagagaagggtggtgaggcttcactgtagtctgtaactacacagttgaatgtgttaagagagagtggagagtagagagaagaaatgggaagcctgcaggaatcgagtgattcaggaagatcatgctgtgatgctcatcgtcttgatttaaatcaccaggtataactctcttttcttcttcgagttcctagtatcgatttctcgaatatggatggactcttttaagtttttctgtttgtttccgtagaaacccgg

SEQ ID NO: 11864 - DNA, 2271 bp, Vitis vinifera
  Intron number 8 from transcript GSVIVT01037163001 (locus G SVIVG01037163001) derived from phytozome v7.0 (chr-ID chr1 8; pos 28420302 to 28422572 reverse strand)
attgtctttgtttcagcccaatactaagccctaaggtatgaggatctgctgatttgaagggttttgtaggattcgatttgctaatttcaattcttaaggtatgttttgatttcatgcctacgattcaatgaaatcttatttacaaagtatcatgcccaaggattcaatttgcaacatggtaagaaataaaatcttctcgttttgtttatctactataatgtttctgttctccactttctcgaatcatggtgtatgtttggatgactggatttagaacatggataatgtgttcccctgatttttccagtcggttttgtttagttgatttttgtttcatggatgatgtgttcacagtagccttggggaaatagagagatacactttcagtgttgatgcggtgtgtgttttttagacttgcgaatctgattatggttggttgagttgtagatctgattgcataatctaaattctgcgatttaaataatcacgctagcattgtgattagtagatttcatggatatggattttggccttagggaaactttgtggatctgattgaaagtgatacatttagaatcatttctaccaccaaagaagcctaattagtctaaagctcagatatacagatatctgatttcccttttctttttatttgctaccaccaaatatttagtagtgatagtggtaaagtagaagatgtaatagaaagttgtggacatgagtggttgtggtgggttcattgtgtctggatgcctcctgcttggtttgatttgttttgttttgggggccaacaccgctcaattgcaatgcactactctgcttccttgcttgaggcccaatcatagggaatctcagatcccagcacctgctcatcactagtttctgtttttctgttctctctctcttttttttttttttttgggggcagtaggagcttttgtctccctctccaaatgaaactcaactaaaaaattttacacaatggaaatgggtcataaaggtagaataatatggaaatgggtcataaaggtagaataataaataagctttgtttccaagagcatcacaaagaaactcagtgagcagattatgacaaccattagtcccaaggttttcaattttcaggtaggtgatggatatcagcattcactcccatcaactggtgggatggctctaagtggcaaccataataagccttttcccttttcctcttttccttgtaatgcattaactctcagggattgtgagagatgattaggaattatgagacaactcagaaaacccaggtttgccttgaaggacaaggcacccatccagattccagatgtatttcggtctgttcactgagtgatatatacgagagttcaaatcactactattctgagacataaaaattaaattgtgtaggcactaaaataaaaaagaattaacatattaatgcattattgggcaatctctggtttaacagaatacaagaagactgtctcactcaaagccaacaagaagattgctgactcatcattgaaattccattataaacatagacagctagcaaggatgaccaccaaaaacatatacatttccaagaattcatttcaaccaccaacactgctaggaaaatataacgtccagaaaattcttcctccccattaaggctagagggaaaaccaatttcaaggcaaccaaccacctcaattattcagagaaaatgctagaatagtggacataaatttgaagggaaagttgtgatggttctttctaaattcttccaagacatgaagagccagcaaagcacattggaattgatatatccatttgttgtgtggaaaattttccccctttaagactgtagccactatgaatgattttttaatttacaaggtaatgaaggcaggatgcagaaactatctcctgcggtcccaccagtctggagctttcaaccttcggcttctatgtacatcaaggttggccctgggaagcttgtgctttacctgtctccatagcatatcaatattgtctcctttctttaggggtactggaattcatagtgatgagagatgtactttagatgcctccacatttcagcccatctctctttgggaatttgccggagctgccctatcatgtaacctggttccaatgcctctctatcagagaagaaaattgagaactgtgtgtagtcaatcccatcttcataggggagttcaatttgggtgctcacaattgaataaacagccataatactcccttcaaaaattgaactttcagcaa

SEQ ID NO: 11865 - DNA, 5116 bp, Vitis vinifera
  Intron number 6 from transcript GSVIVT01001339001 (locus G SVIVG01001339001) derived from phytozome v7.0 (chr-ID chr1 _random; pos 483070 to 488185)
tggtggcaaaggctattgactcaggttttgtacctgtaagtttgaatcctttaatgtgtaacaagacttggaatttggatattttatacaagtttttgttcctttgtatattttaggataacaaatcaagtgggttgggtcgggttgacagttaatgcaggctcaacccatacatggaactcttttgcccaagcctaacccaatccgaggttctcaaacccaacccaaggcaattttttaaaacttggtttcaaatcaggttaggctcaagttagtaaatatatattcagattggccagtttaataagcattttataaacttcatatccattttcctgagtattttacaaactatatttaataaataaaaaactattagtaatattcatctcactagaattgtagatcctttgccaatcaacatatcatgtaaatttataacgttcatttacttaatcaatctaatagttagaacctatgccacaataagtaaaatgaatcaaaagctataaaataaaaatagaacaaaaacaaaataacacaaaaggccatcacataagattaaatgaaattttcaacaattttcaattcggtaatcaaattaagagtagaagtcatcttcatgtttcaaaattaaatttcaattcttaatcaatcatttaaacaactcatcaaaattaaaagaaatagtggtttatttaatatgttgttcaaagtaactgaaaagttcattactaatctttcacaaaatagtaaaaatacatctaaaaataaaatcataaaaaaaaaataattgttcatcatactaaaataaccaaaatctttattgaaacatgaatcctcaattttgtatcattccctaacatttaaaagaacaaatatctctttatatggatgaaatggatatgagtatgatactattaaataatgtgtatatatatatatatatatattggtgggtggggatggaattctcgggcttttctagttttgttttggcctcaaaccttaaaactctgaaggtgcttctgaaaaaatggaatcaagaggtgtttggtaatgtctcggtaagaaaggaggaggctttttagtagataggtttttggaatccgaaggaaagggaaggtgttttatccttagccgaggcaaaagctagaaattctgcaagggaggagtttaaaaaatgggctctaatggaagaagtttattggagacaaaaatcaagagaaatatgcctaaaggaaggggatagaaactctaagttttttcataagatggctaatactcatagaaggaaaaacttcattgtcaagattaaagtgaatggggaatggattataggtgacagagagctgagagagggagtagtggggggttttaaatctcttttctttgaggaagagggttggaggcctagtattgaagggttatcttttgagacgttggaagaagaggaggtgacgagtttagagggaattttcttggaggaggaggtgctgggagcattgttggaactgaatggtgtcaaagctctaggcgtggatggcttttcaatggttttttggcattttagttgggaatttgtgaaattcgatgtgctgaatttttttaatgagttccatgaacatggcagatttgttcgaaaccttaatacgacctttctggttttgattccaaagaagaaaggggctgttaatctcaaggattttaggtcgataagtttggtggggagtctctataagtggatgacaaaagtactggtcaataggttgaagaaagtaatggaaggatgatttctgactttcaaaatgcctttgtggagagaagacaaattttagatgcagcgttgatagcaaatgaggcaattgatttagtgctaaagaagaaaggtaatggtttaatatgcaaacttgacattgaaaaggcttaagaccatgtcaattgggatttcttggtagcaatccttgctaaaatggggtttggacacaaatggataaagtggtgtatttcttctccaagtttttctattttaataaatggaaccccctccggtttttttcaaagctttaagggtttgagacaaggggacccaatttctctctgcttgtttgtgatcgctatgaaagcccttagtaggttgattttgaaagctcaggagggtggtttcatttcgagatttacgattggggaaagagggggtgatggagaggaaatctctcatctcctttttgctaatgatactattattttttgtaaggcctctcaacaacaagttacccacttgtgttggttgcttatgtggttcgaagccatgtcgaggctaaaaatcaatttggaggagagtgaggtgatcccaataggggaggtggacttgttagaagagttggcctgtgaaattggatgtaaggtgggaaagctaccttctttttacctagggctccccttaggggcctctcataagtttgtggtagtgtgggatggtgtggaagaacgttttcagaggaggctttcgttatggaagagacactatctttcaaaagggggaagactcactctacttcggagcactctacctagcttgccaatctattttatgtccttgttcactatccctagattggtaaaattgaggttggagaagatttagaaggatttttttagggggaggaggggctttagagaagaaagtacatctagtcaagtggtcaattgtttgtaaggcaaagtcaaaaggaggacttggggtttagtctcttttgttgttcaacaaggctctcttttgtaaatggtgttggcgttttgcaagtgaaggggattctttatggaagaaaatcataaagggaaagcttagggaggaggaagaggggtgaaggtcaagagtggtgaaagattcctttggtgttagggtatggaaagagatttagaagcattgggagctttttaagtctataatttcctttgcggtgggtaacgggaggaggataaagttttggaaagataggtggtgtagtgaggagcctttatgcgagatttttccatccttatttgccttatctgattccaaagaagcttggctagttgatctatgggagcatagaggagaaggtggcaattggaatttccgttttgttagaaacctaaatgattgggagttgggtgccatggagcacttcctttctttacttcaaggacattcagtgaaaaggaacaagaggataaagtggtttggaagggtgggagcaaaggggtcttctctgttaagggcctttattttgtgttagagactggtggtacaacccctttccctttaaaaatagtgtggaacccttggattccttcaaaggtgagtttcttaacttgggaggcttgttggggaaatattttggctttgcatcagcttcaaggaaggggatggaccttgctcaacagatgtgctttatgcaaagtggagttagagatcatggatcatatccttcttcattgtgtcaaggaaagattattatggcagctagtgttctccatttttggtgtttggtgggttatttctgagatagggaaaccctcctagggtggaatgtgacttttattgagaaaaggcacattaaggctcggagagcagcccctacttgcattttttggacactttggaaggaaagaaataggagattttttgatagtggggaattatcagatcaaaggctaaaaagtttattcctaaacaatttttctatgtgggttagggtgtatataggtgggggaaatatgaatttgattgatttcatagagtggttgggcatggggtgagggagggagtatttttttgtaccctcctttctactttttgcttgttttacttgtatatgacctgtatactcttaagctctttttgcactttttttttaatacattctcttatcaaaaaaaaaaaatttacatacatatttatttatattttaaattttttataaatatataattaggttcaagctaggcttgggttgtgcaagcccctaacctaagtcccatctaaatttaatttgggttggcattttgttgcttgagcttgacccggttttcagattaagttctcaaactcctaaaaaatttggttgggttgggttgagtgcacccaagttgcaatcctaatatattttcccttctatgcaaggcaagtgttcaaattgatatatgttacgatgaactacaaattgaagtcttttgtctctatatctttcatatttttatccctgaagttgtatatattttctgtttactgaaatagtatgaaatttaaggacactttccgacagtcactcctagctttgaactcatttttctttttcccatgtctcttgcttttcaagtggaaagtcatctaagatatagaacagcctggaaagtatttctctatatatacttacgaaaatctggtacttggataaataatagagctattctttactattaaaacaattttacataaggaatgctgcaaactgaagatgatatgattttcaagttgaagatggaaacagcctgtatattagattgatcttttactcccaaggaaagaataaaccttgtctgggcaaaaattttctgagctttataaatagctaaacagcatgcttgattaagttcagtgtagatagcattccagcagccctgcacctgttagagtggattccagttttaaaagaatccattggctgaatgttgagttatcataaccttttttatgctcactggttgtagaaggaactctcttagaacaagaaccagatatctttggaaggcctagtgatagaatagaccatttgttagttggtatgaaccactaactaggtatatttcttgcatgaacttccagataagagattgcttgtgtttgaaacaaagacattatgttctgaatcttctgattcaatttatggtagaattcaaggattcatctctaaaattttccttgaatatgcaatgaaatatatataggacattgagaaatgaagttggtttttaacattttattttctatagcattaacatttaatgatatagagaactgtatataaaatgggtaaaaatgttgatttttatcaccctttctaggttctgc

SEQ ID NO: 11866 - DNA, 1372 bp, Vitis vinifera
  Intron number 1 from transcript GSVIVT01027217001 (locus G SVIVG01027217001) derived from phytozome v7.0 (chr-ID chr1 3; pos 18067079 to 18068450 reverse strand)
ctctcgtatgtgtgttttgtggaattttctgtttggttgctgagaaagtgttggaaatgaatagaggggtggaaatgagaattattttgtgttgctggaaatgtaaaaaattaaacatggaatggaaaacatgtttgttaacttggaaaagattttctgaatgtataattttaagaaaatatggttcgtactgaataagttttcattatcttttgaaaatatttgttgaaaaccattttttgcatttttcaaaaagtagaagctatggagtaaacaatcagatggagcacatactcaattctttctgctttcaaaaatgacacccaaagcaaaaggttttttctttcttacctttgcccttattctttttcctgaaaaactacaactattttcaaaaagataatttgtttgtgtttagggcctagaattttggcttgacggatgatgtttccaccttgtggtaagcaagacaggatggatgttaaaattcaaggtcttagtttctttttattaatattctcagtttgcttgcacttcatcgatttggaattatcactccatttgttagggaagaagagaataaaagagtagataatatcatgcttcataaaatcttctcatttccaattgttgattcatccatactggatagaaaggtagagaactcgggttagtagaaaggaaagtaaattgctctctatgcaccaaaatacgtcttaaaaatgaggtggtttggagagagacttgatatagcagttgagaactaccattatgcttagaaggtaccagccctttatggaagtgctaggagggctattttcgtgtgtttgcttaaattgaagaaaatggtgaaaccttatttttcattctaaattatgtgcacactttcactgtcatggcaaatgcaattttgtttgcagttatccatgctaagatataaaacactgccaagcttctgtttttacaaaggtgctgctacgcctgtgaaaatgggcacaccagtttcaccataatattccaaaaaaagctgtatattaacttcctgtatattaacttttagttgttagacaaaaagtttgaattatgtgaaagcaattccagaatttggataatggttgcaacacttgtgtgtagcatgagcaaccttctggcccacattattgatgcatgtgaggcttattttttcagaatctgaagtttactttttctcctatcggtcatgagtgaaattgccaagacagaattctggccagtactaaatctatcaattgagcttgtaatagtttttattgtgttctttactaaatttctttggtttagctagttttatgttttaaaaagcgcagtggttttacagagtaaggctaaagag

SEQ ID NO: 11867 - DNA, 3088 bp, Vitis vinifera
  Intron number 2 from transcript GSVIVT01011848001 (locus G SVIVG01011848001) derived from phytozome v7.0 (chr-ID chr1 ; pos 3660368 to 3663455)
aagtcatctgtgaaatcaaggtattcatattgctggtcgtatatattgttgattttcctttctatatgcaatgacattgatttccatttatggtaaaacaaatgcttcttttttctgccatttaggcatccgtctcagactcatcagaaccttattaaatgtcatctaggacattttaattggccagttttggacagtgtctctcattgaacttctgtttggctatccatggacattaaatcagagtcttattctcatttttgtctagatcccttgagctgtttgattgatctagttgcttgtggaatggactgagacttggttgtggttctttttagtcacttatgcttgattttgactattgttctattgaataattgattgaacaaaataagtcatcctagtcatttgaaatagctgttattgttattgttatttgaactgcagtggttttaagttgaactgttcattttgtttctttcttttcctttttgtaaaaaaatctatttctctcttctctattcacatggtatagtgtgtgctgtgcatagcatgaacatagaaagcagaagtgggaaagacagaacagtgtttagacatatttttatgtataataatattacatatgatatatagaatatatattataaattgattatcttttcttttaatgaacaattttatgactttgaagaagcttgacaaatacgatacacattgttattaatatatcatctattccgataacaccaatgctactgctctagatatgcatccgtgtggtctgcctgtatgacaagtaaattgagaagtttaaaagaacataaaatggtggtggatttccccagagtaacttatcattttccttttttgtcatccataataaaaaacaaggttaatttttgtaaagtagaatggttaggggggagagaatctctatatttgcttaataaaatagtatagaggaacatctatatgacttcaaagaagctatagataaacatcatatacattataaagcagaatagttgtgcttgacttctattgaagtatgtgtatgacatgaaaaaagtgactaagattatggacaagtcctggtagtgtctgaaagatgacctgcagtgtggtttcagacacagatgtggctcttcttcagaagagtctatgctgctcgtgaatgtgaaaatttccaatactttgcaattgtctgttataagtctggggccatggtaacatatggttcttactaatggcaatgaaatgttagtgggtgcatggcataatggagccaataaattggttgatcaaatggtttaaaagagatgattggatttgaaaggccatgatggaccaatcaagtaccacaatgaagccagtagccctaagactcgtaggatgatcaaatggtggccattatgaccagataataatccaattaggcaagactacactagcagggccaaaacaatggtcaagctaaacagcggcaaagaatctcaaaaaggtgtcccaacattaaaatgagctaaaagaacataattgtccaaatttataggagcagcctaatgatccctacatctaaaactagcttaatgccttcaaagggctcatctgagctcccctagaatgggccaatgcttgtggatgattgttatcaaaatggaaactatctccttttttcaatgggaacatgtacccaaatcaaataataatgaaggggtggccactagtggtgatagttttagattgaaatggaactcaaatttattctaaaagggagaaattatttcatggaaggttgtagaagtttaaaaatgcaattcttctacattcttttgtatgtaatctgtggtcttgggttagggtgtttatagttttgagcctttgttctcttgttagcttttttgagtggctaggctctaagtaagggtaggggttgttctttccccttccttggtttagagtccgtgggctgcttttgtatactccctgtatacttggagagcactagtttggtgtctcctctttctgtttaatatatttctctttacttatcaaaaaaaaaaatgcaattcttttcctttttccgctttcttctacagctggttttcctgttgtattagctacaatttactttctcaatattatgtgcctatagatggttggattgtaatgtaatataggctgcatttgttttctcatagaagtcttaaaacaaagaatcagaattttcccataatttccagtatttggttgctgtattgaatgacacaatgaagaagaatgaaattttacactattgttcagtgtctgacattcatatgaaatgtcactcaatgtgttaagtatggatacattttataacacattgatttacaatgcacaggaattagatgtattcatgtatgattgaggggatcatgctcactaagctgatagttgaattggcagccttcattcttctaaatatttccttacagtacgaataacattcgaaaacgatggttggattgaatttttattttttatttttggcattttttctattaatgtttttctaagcctatattgttaattgcacaaagcctatattgttaaatgtcaaatattgacttcaaaaaaaaattccattgcatgataatgaggatcacccaatgtgttcagtatggatacattttataacacattgatttacaatgcatgggaattagatgtattcacatatgattgagggaatcatgctcactaagctgatagttgaattggcagccttcattcttctaaatatttccttacaatatgaataacattccaaaacaatgattggattgatttttatttttatttttattggcatttttttctattaatgtttttctaagcctatattgttaattgtacaaagcttatgctgtctacttcaggccaagctacacaagtgccattacatttcccaaattgtgaatttattgactgatatgatttggttcttgtcataaataaatatagtagttatgctagcattgtattgtaaggatacagagtctaaagcttccctcttatgataggcgaccaggggaggaaagcg

SEQ ID NO: 11868 - DNA, 6054 bp, Vitis vinifera
  Intron number 6 from transcript GSVIVT01004795001 (locus G SVIVG01004795001) derived from phytozome v7.0 (chr-ID chr2 ; pos 132876 to 138929)
ctcattcggtagcagctactgctggtgatacagaggtaagttttaacttttagttattattgcaatatgaagagaattatgaccaaatattctacatctcagcaacgttttaagttgggtatagtaaatggacagttaggtttagcattttgaaatgcttctttattcattaaaactgaaatgtggagaggaaccgatttttttgtttattctaaatcatgcacattctagttagctaccctatatattaaatagttcccaacaattaagtcacccaacagtcaatccaaagactcaaggcttcttttgtttattttctttggtcggagacgaagaggtctataaaagatggtccctcgaccttagttgattttgttgggtgggtggcttcccgttaagggtgtggatagggtggctcttcgttccttggcaggctgctagggagcatggggtgtttttctttctttttcttttctccttcttgtactttttgccactgcttcggtggtttttaatacaatctctttatttatcaaaaaaaaaaaaaaaaaaaacaattaagtcacccaacaatttagaattttatttattgacttaggacattttgatccaagaaaaaaaatggtttttgaaaaaacagtagtccttcagctgcagaacagattgaaccatggctgcataaaaataagttgttacttctgtgaaataagttaaattaggtttgcatactaaagcaatgaactggaagcagttcggtgcacagattggatttacagaacctgattttttagcccttccatttatttattcaacttgcacatgccattaatgaccatctgcatggatagtgaccttgttacgtaattggttcctttcgacatcacatatatgtcagaagtaaagtcacacttcttcagtgatcctagaattcgactatagccaagtgtagctcttgaattggggatggagatggtaacaaaaaggtgtcatctttcacaaggatattgttgaagctcattgaagcagccagaccttatagcgaagctagcaactctgcccctatagttagcccttgcttggtaggcttggagaaaactctgatatccctacctgcattgtttatatagtggccactctatctacccatatacctacccaacctaggttcccaaagcagcaaccgttaagatatagctgtggacaacccaggggtggggttttgctgctgtgatttgttttgcacctgatatgcctcaccttgctactcctattcatacagcaagcagatttccaatctgacacaatcaccttccatggatatcctaaagagcatccattaaaatttagctttagacaactctaggggataagttgtggtcttgtggtttttttttttgctcctcagtcctcatgcctcaactagcacctcttattcacacaaacaacagatttccaatataacatgattgtgctcactagaatccaaataattaaacccccaaagatataatgaataatcttctgttggatgctctcaagtgccctgagcaattttctcatgtacaattattttaaaattctagaaaaattttattttttaaataacaagggtttctatttagatgcaacctaaaaaccctatggctttcatataaatacctaagattttttattcattagtgagcctaataacaaaaaaactgttgttattttgtcctatttaagaatgaaaatgtacagaaagagctacaatgaggcacatcaaagtacacagtgagtatacaaagggtgctaaactcaaagaacaaaaaaagagacacaattccatctccaacctccccaaactcaactaatcaacaaaatccaccatagatataagtgtctcctttatacagtgtcttacacaatccaaaaagttccacatgaataatgatttgaacacttgctttgaatgttccacattatcacaagcccttcaatttagctctctggattgcccaaaataaacacaaacgggctattgtccatgctctcctccttttcttcccaacatagaccccttccagctaagcaacatcactcttgttgaagaatggatcatccaagctatcccaaacgtggaaaagacccactgccacaacatgctttctaaaacagaatgtagaagaatataatcaatcaattcttcttcctgcttacacatgcaatatctgttcattatagacatacctaactttttcaattaatcgaaagtcagaatccttccctatgatgtttcccatagaatccatgggttctaaacattactagttgaaaaaggctttgaaccccttggctccaaaaaggggtagaaacacttgactgaactttaccacttttagactccaactaggctattctatcctttgtaccccatctcactatatgcttttgaagggtcctcagaaaggtctccaccatctctaattcccaatcatgaaattgcctcaaaaagcaaggtctctaaagatccctgtccattatctactcccatgcatctgctactcatatgtctttcgaactagctatagcatataaggtggggaaggagtctctcaaaggggagtcaccacactccctatccaaccaaaactttacactactgtcatcccctataataaagtgagctctacttttaaaagcctctcatccttgtagccttcaactatcatacaccaaaaccagagcaccaacatccctcttctcccctaaactttaataacccacttccataaaggttcattttttgaggcaaatctccaacccctcttgcctaaaggagcagaatttaagataaatagattgttaatttcagagccttcatttttctttaggtttgcaacttgaagactaattgactagatgaggttttttcccaagagcttcgccccacccccataggaagtcttgttaaatcttcaaacgtcttaaactcacctttcttgaaatcactagtatacaatagatcaatatggttgacaaagtgttctttatcaaagtgagtcttcccccctttcgacaaatactatctcttctgtagggacaacccttttctaaaatctctcctccaccacatcccaaactatcggcaacttcaaaggcacacccaaaggaaatgccaaaaacatggaaggaagctccctcatcctacatcctaactcaaaagccaacacttcctcattatctatcatcccgactgggataaactcactattctccatattgatttttaacccaaaaattgccttaaaccatatgagagcctagtttaggaaaaacaattgctcttagctagtttgatagaaaaataatagtcattagcataaaggaggtgagtcatctcaacacccttacgacccctctatctcaccttgaagtcaaaaatgaaatctccttccctagccttcattaataaacgaatgagagcctccatgaccaaagcgaatgaataaggggagagggatttccttaccttaggcccttagagctatgaaaaaaatctatgggagtcccgttgatcaaaatagagaaactagcaggagatagacaccttttcacccatcccacccatttctggttgaagcttattttatctatgattgctaataagaagctccaatctacatggtcttaagctttttctcaatgtcaagttgacaaataacctcgagggagttacccttgagccttgagtcaatggcctcatttgctataagagccacatctgaaatttgtctaccctcaacaaagcatgatgaacattagaaacaactttgcctattaccctcttcaatgtgcttaccaacaccttggcttacaacttgtataaccctcccaccaaactaatgggtttgaagtctttcaaatcctttgacccccttgttttttgggattaaaaccaagaaagtagcatttaaaggagttgccctaaaaaaactcactaaaaaatcccatgacctcaagcaaaaaattcactaaaaagtcccatgacctcaagcttaacaaattctttgtcaaaaagccatagtgaacctatctagcttgggagctttattcccactcaagctgggcaaggcaaaaaacatttcctcttctaagaaaggaatctccaaactccttaaatctccacactctaaaagagtgaaagacatcccactgatactaggactttggtctcttgccttggaaaataagctacaaaagacatttgcaaccccctcttttatatctacatcctcagatagctaggtcccattcactctgactctagccatgaagttcattcttttgtgagcattagccatttatgaaaaaggctggtgttcttaacccccaccctcaagcaaatctttgttgacttctacctccaagataaaatccttaacttcattgacaaatggaaactaacttccgcccactctttcctttattgctttctttgcttgaacgtccatcataattgtcaatcctttagactggcccccgacaaaacattttaacccctagaagacctaaccataagaatcaccctgctttcagatctcctcaaactcccaccattgaaagcctcctaaagaaggaaaacaagaaggatccctatcccttgaagaagcaaaagaaaagggcaaacctggaatttagccactcaagccagtagagcctcctcattggccgacaaccaacctgtgtcccctgatgcatctccatagccttccatgcctggctgcttgcccctggatcttccctctcctgcagaagcttctgaaaagtgagaacggcaccttctcccatctctctccaacaaatctccgtagacaaagggttgtaactttgggcgactctccccccatgcttaaaatcaatagagccatttttcattccttttttttggcctatgcttttttgattgattgtttatttattttctatttgaagaattttgatcatacactatttcctagttttacttattcttgacattagtaaacggttatgttgtatggagtatttccaatagtcccatgtttttttaaattacttgtaaaagaataggaaccattgcctctgctccttagtgcttaaaaattggattcattttctaattaaagccaccaataacttaacaatccacttcttgagtttgaattgtctcttttttcttcaaatccatgttaattacccaatcttgggctaaaagtaactggataaattgcatgtgacatcacatagaaatgtcaatttggtactgaaaaacatgtgcacagggttttggcaggattgtattattttactactgctattgactggtgggattcaattatagtatggccatattagcttttatttcttcaacatttgaacaaagatattaaatatgacctgagatcaattttgaaatttatgtacacattatttttttctttttaatttgatggcaaataaaatgatatgcattaaaaggcacctaacaaaagaaggcataatactagttgtaactttggattctttgtatatttaattaagttggattcttttctttctgaacccagttgtgttaaacacttcatgcatccttccaaatcccttgttggctgaaaatgttaaagatatcatctacggtgctttctggaattgaaaaagaattagaggattccaaaaaaaatgtgttgcttctctgcattcagttttggtctgttatatcatggctggaccccttaaatgactgctcattccacctatatgaagaggtgaaaagcaaaacatgccctctagagatgaggttccttaattcctcatcaactgtttgaagatgtggtattgttattctagaaaggtttaaggctgctaaacttacattgacattgaatttaaataagaacttttcagtactctttctatgaacatcataaatcactactcaatgataatagcaacttgttctatcatcccaaccaacttatttggacagctggtgcttatgaagttttacaaatttctcttgacaggcttcaacta

SEQ ID NO: 11869 - DNA, 13057 bp, Vitis vinifera
  Intron number 6 from transcript GSVIVT01029794001 (locus G SVIVG01029794001) derived from phytozome v7.0 (chr-ID chr1 2; pos 14764536 to 14777592)
gtcaggtatggttatgccccaacttaagctttgttatgaattaggcatggaaacaactgggagagaggcagaaagaaaggtggtaattgcaagacgggattttggaaaaccatgtcaagttggagtacttttttactgttcaacagtgtcaaacataatttattttattttattttattttttatcagaaacaacaattcattggtaaggaattgaaagtgcttgcaaaggattaggaatccttcccaaagacgcaaaactctggtcaaaccgagcaagtagataaattccccaaaatacaaaacaagatctctatcttaatattttcctttttgccagaagaaatatacacatgtaggctactctactctctataggctgaagctttactccaagcttaacgattttgaccattatgattcacatatagaattccaattgggctaaattacattgaggagtttccttaaaagttgtagtttttaaggcctaaaaagaagaacaaaaataaattaagtcccatatggattttgtacttccccacttatcctaacttccgtactatccgttgaagattattacacctgtaatatacaactatgaaagatatacagttgtgtatacaattgtaatatatagctctgtgtgtacaattatgtgaatatccaaatatgtagatttatgtatataatccatgatttgtaggaatctttaattgggtagtttccgattctttccttattctttcttttttgctgctgtatatatttctagggttatatacttttaaaatatgagtgataaatacaatttttttccacatggtattagagccgaattagccttcattgctgagttttagtgccctttttcctctgtcttttaaaccctagtttaacggccttgattgccatttcaaaggcactctactatatttttctctaaaattatttttgagctctacccgccatgtttgagattgttaacgacaccaacactgcctaaactcaagtgactgacaacgtgaatcctccatcaacgactgatttgtctagaacaacgaacaagggtactatttggtgtacctactgtaggaagctaagacacaagagggaccggtgctaaaaactctatggaaagcctcaaactttgcgtaaagattgggttttcaatggtggacaacagagaactccggcacacttcaccgactcttaaatcaatgaaaaccctttataagagagagtgaattttggtggtaagtttaataaggaagagattgagaaattgaagaatctcctaggaaccttgagagtcctagtggtgcttgctctcttgttcaataaggtaaatattccccttctcttgcttttagtatctccgatatgtctttcctaagctcttgggtcattgacttgggagctacaaatcatatgactcattcctcacaaatgtttagtacctatagcctatgtcctcgtaataagaaaatagccactgctaatggctctctagccatcgtggttggtcaagggaaaattcattcgaatatattcatagttttgaaaaatgtgctacatgtaccaggctttccaccaatcttttctccattcattgacttactaaagaactaaattgccatgtgattttttatctctctatgtgttttaggaatagagtataaggaagatgattggacatggtagggaaaagaatggacttttttatctggagttgccgtttgttctaaataggactaagtatcgagtacccttatcattcctttccgaaatcccatccacaataaaagataagatttggcttcatcattgttgtcttgaacatatgctgtttagcattcttaaaatcatttttcctttattgttcaaagcaattgatgtataaaaattacattgtgatgtttgtgaacttacaaagcaccatcgtgcttcttttccaataactaataaaagagtttaaattccttttgcgttagttcatagtgatatttggggtccttccacagttcctaatattttaggctttagatggtttgtctcatttatagatgattgcactcaagtatcttggatctttcttctcaaacaaaaatcggatgtaagtactgtatttcccaattttcacaaaatggtcaagtcctttgcctggttagtggcacacaagaaggtaaacactaataacatgctaagaaaaccatacaaagcccttagtcctaatatttgttaagctgtgtatgaagcatggagaatcaataaatcatcttttccttcattgtcctttgacgatggggttgtggcacagattatttagattgaccaagatggattgggttccttgaagggtatttttgacatgatgaccattacatataagggattgggaagctccaagagaggcctagtgttgtggtaaaattgcttgtattgctttaattttatttatatggcgggaaagaaatgctaggatttttgaggacaaggcaaggaccttagaggttctttgggataccattcatttccttgcttctttttgggcctcttgcaccatatcttttaagggcatcccctttaatatggttcaacttgatcggttagtggtgtgtagttccaagggtgtgggttagtaaggagaggttgcttttgaaattaccttatggtttattgtttttggtattccttatgtttagtttttatttgtaggaggattcctcatccttctattgtacttctttatttctaattcaatatatcacattgttgtttctcattaaataatttttttttcataaaatggtcaaaactcattttggagtgggaatcaagaagtttaggtttgataatgcaatggattacttcaatcatgtcctatctccttattttcaaaaagaaggtatcatccatgaatccttttgcgttagtgctccttaacaaaatgggattgctaaaagaaaaatggtcatcttcttgttgttagttgttacacgagcttttttattccaaaaaaatgtccctaaatcatatctacaatacttactgccactcatcttataaaccgtttgccatctagagttttggggttcaaaagtccaatggaaatttttcaaaatacttctcaaactttacaatgtctactagtcttgttccaaaagtttttcaggggaaacaatatttattgctgctcatcttataaaccaatttgcatatagagttttggggttcaaaagtccaatagaaaattttccaaaatacttcccaaactttacaatgtctaccaatcttattctaaaagttttttattgtgtttcttttgcccacatccacactcataacaaagggaaactagttccaagagcaattaagtgcaattttgtgggttattcatttactcaaaaaggttataaatgttatcatccacccattcgacaattttatttctctttcgatgtatcctttattgaacatgaaggttacttcaatcatccttatctttagggggaaacaacattgatggatgatagggatataggagactagttcttacttgacttatccccatctgtgtgtaagccttcacaatcacaatcatctgtgtctaagcctgtgtttgagcactcacatattcttgaaccttggaagtccaccttcacggaaacaagttcctagttctacaaggccaattttggtttactcaaggaagaaaggtaccatcactgaacttgtgtaggtccaagagttagaatcgaccacttcttatgatgtaaatgatctatcttctcctaagatttcttatgattctgttgatattagtgatctaaatttgcccgttatagttagcaaaggcataagaacgtgtactcaacaccctttatatccactttcccattttgtgtcctatgacacattgtcatcatctcataaagattttcttgccagcctaaacaccatatccatatgtaagaccttatccaaggcgctaaatagtaaggagtggaaacaagccatgagggccgagatggaagcacttgaaaagaatgagacttgggatgcaattgagttaccaagagagaagtgtctagtggggtgcaagtgggtgtttatagtaaaatacaaggcgaatggttgttttaagagatacaaagctagactcgttgccaaatgttatactcaaacatatggagtaaccaagatgaatactgtgagagttttactctctttggctgcccaagttgactaagacttacaatagtttgatgtgaaaaatgcgttcctacatggagaacttgaagaggaaatttatatgagccttccacttggttttaatatgcacttgaaaggaaaaaaaggtatgtaaattgaagaaaactttgtatgggctaaaacaatctccatgggcttggtttgaaagattttcctaagtcatgataattgttggttacaaacaaagccacggtgaccacaccttatttgttaaacactcggcttcagggagagtaattgccttactagtttatgtggatgatataatagtgactggaaatgattctgaagaaagagaagcattgaagtggtgcttagcaaaagagtttgaaaaaaatgagcctggaagattaaaattgtttttgggtattgaagtggctcacccaaaaaagggaatttctgtctcctaacatacgtatgttattgacttattgtaagaaactggaaaaataggatgtaaaccggctgacacacttattgatccgaatcacaagcttagagaagcaagtgaggatgcagttgtggacaagggtatgcaccagagattggttgataggctaatctacttctcacatacgtaaccaaacatagcctatgtagtcagcctagtgagttaatttatgtataacccaaaggaagttcatctatagactgtatacagaatcctacactgcttggaagcaactatggggaaaggaattttgttttaaaaaagcattgagccctatattgatgtagactatgcaagatcggttgttgattagaggtttactacaggatattgtgctattcttggagggaacttcgtaacttggaggagtaagcaacaaaatattgttataggatctagtgtagaagtagagttttgtataattgcccaaggaatttgtgagttgctttggctcaatattatcttagaggacttgaaagttaagtgggagacaccgatgagactttattgcgacaataagtctaccatcaacatttgcacataaccttgttcgacatgacaaaaccaaacatgtttaaatagataaacattttattaaggagaagttggatagtggcttaatctgcataccatatgtgtccactggaggtcaattagtcgatgtcttaatgaaaggattagctagtggttggtttcaagaaatcattatcaagttgggaatggatgatatctattcaccaacttgagggggagtgttgaagattattatagttgtaatgtacaactgtgaaagatatacaattgtgtatagaactataatatatagctctatgtgtgtgtgtatagctgtgtgaatatccagctgtgtagatttgtgtatctaatccttgatttgtagggatctttaatatggcagttttcaattctttccttcatttttttttgttgctatatatgtttttagggttgtatacttttaaaatatgaatgagaaatacaatttttctccacactatccaaatcatagtgaggcaagaaatttgcgtcaaaattttgcctctagttgtgctccccaaacccttaaaggatatagtcatcatgttgcctatgctcctaggagaacctaattgagtctaactagtttgaatagcctgtgccacaaccctaaagtcatagggcaatgtaagaaaagatggtcaatcaatgggcaagactaagggctttgtacggtttctcacttgtagcaagtcattggtattaaccatcttgttagccactgaccatacaaaggtcttgatcttatatggggctttagatttccaaatgaattttgatggagggaaatgagcaagatttaaaagattggatagggctaaaaagaaatgagcaaaatttgtgccaaacagaattttgaagtcttttttatttcctacccttgtgtacaattgtatgcgcttcatgcctaatgcctacctgaacaagttaaaatacgtcactatagaagtttggctgatggcaagctaggtatcatggccataggtttgggacaaggacataacaagatataggcatatggtcattgaacatgaaaagtcctcgaaggttggtatacatacagaatgggagaaattagtgaaagacttagagaacagaaaaacatcatccttgtggagttcttttattgaggaagagaatgtgataatcactctctaaggagatagtgtggtttgattagataaaggagtaaagtaactagcttgagagtaattagagaaccaaatgattttctgtctaaaacaagcttatataagaagtcaatatcgagcacttattttttgtgttggacatatccagaggatgttccatggtggatgttacttaccagttttacagtttcaatttgcaaagacacagtaaaagtctgtctaagttagaattatgaaaaaatactcttaaaatatggtgataggctaaggaggcctgcaccagaatatgagttgtgattttactaaaactaggaatatgaatgaatagtgagaattgatggccaaaaagtatttataagtagccttttcctgtctttgatatgaatgcgagattgtgtatgacattgtacattcgttgcaggatagatgaagtgaagaagtgcattaggaatggttgtggtcaaagaatatactcgtttcagatatggaattgtgacactcattaaaatagacttccaaatactgaactcattatacatggaatgattcgaaaaggcaccttttcctcttgcatctccaccagaatctgggcaaataatatcttctgttaaggaaaggaaagtacagacaggcatcatattattatagtaccaaagagagagaaacagagtaaacaaaatggagattaagattcagacaaagggaaaggatatcttataaaatatctattttgccttctggtttacaccttctcccttcttattttgttatgtgtttactcttttaaaatctgaggtgttcaaccatttcaactaaaagattatgtggaggttcagtagatggacagagggtggtgtggtactgaagttttagaaggcttttttgggtttccattattttattttattttatttttctatgagaaacccaatagatgttttctagtaattaaaaagatcaagaaggacgagacatccttccaccatgtataaatttggatcaagacaagggaatggattcctttacagggacccgtatagttgaacaaacaggagtttccattattttattctaaacaaatttggatgttatttaaaaacagcacttcagttagaaccggactggatgatactagtaagtttaacaatggattttctaatattgttggttggtctatgggtttaagtcatttgattgctaggaaactcagtcaatggatttttttaggtagggttagggaggggcagtttgggaggttttagtttcgatgtgaacttgactgttgtcaggaagaaacaaggaaatggtgttcactacttgagaatattaattcattatctcactgaaaaaaaggatgttatgttattaaattataaaaccatggtttcattcctgaaaaaaacttgaaaaatttttcattgtgttttctaaatttttctaggttgtggaactatctctgaagatagtgaagtatgtatgatggttagattttcaaatgcttagaagtctgagatagcacaaatattctatgggcatgatgtgagttttgaggcaatagtcaaaggtgctttagaatatagaccagaatgagtttttgcatgtgtttggaaagaaatgatctttgctcaagaaggaatttgaggaactcctttctggaaaaactgtatcctggaaaaactggtcttttgagtctcttcagtagagttgcatgcttgcacctggtagatggaagattattaaaatgcttgaatttgaaccagagtaagaaatcagtgaatcaaggcgctatttcaggtgacatattaggatatttcaagtctattctccactgacaccttttatcggactagagcggacagtgctgactagtgctcaattgcattagtgagttctatatggttatagaagccccttgaagaggaaatttgaatagccatctttgatatggatggggataaagcttctatctcatatggattcactgtgactatttatcatagattatttgaatatttgaaaggggatactttttgagtttttgagaagtttatgagggagggattgtaaaacaatttgttaatttcttcacagccctgcttcctgaaaacagtggatccataccagtttgggtactttaggatcttaggcccttcagtttagtttctagttgcaaggttattgctagagtgttggtgagaggaagcttttaagtgtcatcactgacattagtgctttttaccatagggaggcatatcttcaatgcagtctggctgctgaaattatggagaaataatgaaattgacaaaaaggagtactagtcttcaaaaaaaattttaaaagtcatatgatcatgctggctggttttctcttaattgttataaaaaggaaaggctttaaattttgcttcagaaagaggattttggattgcttgaagactgcctctgatgccgttttattaacgggaggttggatgttggtttatcgaattgaaacatcgaggcaacaagacccactatctctctttcattttcttgtggtgagcataagataattttgcatctgaaagagtgtatgagtttcccatcctgtctctataaattcatatttgctttcttctagcgaggaagagaagtttgctaatttatccagtattcttaggttccttgaggggggttttgattcaacctaacaagaaactattgtggcttaatattccattggagagtgtgtcttactgggtagtgttctgtggtttgagctggaatcctaggggcctggtgatttttatacatggttgtagagggagtgcttagaactgatggttggtaaatgcttgctttctttatgacggtggttaccttatacagtcttgtaggcctctatattgatgtattatatatctatttacaaagtctggcatttttggtaaatcaacagggtctggagatacaattcttatggacatgccttagtaaatcaaagcatggtcatttgcttgattgaggggtggtgactttccctaacataaatgagcggagggattccatccaacttatccttagaagtaaggccttaattggtgctggctaagaggtttccttgagtactgagagctctttggcactttactatttgctaccaaaatgatgccaatcctgccctgcaagaaatcatcaatgcggtttgaaagctatgactgaggtttgcaccagcttattcaccttactagattcattgttaaaaatagatctagagtcttcttccttgaagatatgtgatcaggcaaaagcccttctcaaatcctgtcttattcaggcttaacaccctcaaaggattaccttctatgattttctttctcagcttacctctacccttaactggaatttgaatttctggagaaacctaaataacaggggggactgatgattttcatggacttctattcctgtgtcatatatcgactgatgaaagcatttggcttttgaacagttattgattacctttttgtaagttcctttagcctttgctaggagtccaagttcattcagcctttggtaggagaggatggttcttcttcctttcctctttcagaaccttaaagattttttctttgttaaattccatgaaatggtgaatactaatgaaaacttctagataaggaagtgtttttaaggccctctctttagcctggtgtgttcttcgaggaagggaagtccttttgtcatttgtttttgcatttcccataatctctggaagtgattgttctctcttgtcagcatggagccccccccccccacaaagggaaggctcctttgattctggttatcaaattctccagcttagaaggagtgagagaggtaggttctatctgctgattgccatctatggctctattctattttcttggttgtggtggggtgggtcaagaaattgcctaatcttttgagggaaaggagtatttgatggaggagctatgagagtgtgatctatgttgcttagctttgggtgtagttgactggagagttcatgggcatgccattaagtactattatgttatgtatgattagattgtagattgcgctcatgaggatgtcacttttcaggaacagtttttacagaaccctccctgtggagaagtgccaatcatgtttgatggtcgttttataggaaaaccaggacagttgggatttggaggcatttgaagggatcatatacatatattttggtcacttttttctgtactttctggagttagtcttgccattacagctgaaattgggttatgctggaggatttgtgtgaaggtgtgtctattttttcattagagtgtgatttcttcagtcattgttataggtgagacaacggtctctgtgatcctggagatagaagtacctcaggaagtgattaaggacaatgggttatagttgatgctttaggctttctggattgcttggaaggggaatgaggaagcctatgcccttgctaagggaggaactcttgcattagataaattgggctccatgttattccatctgattctgatgctaattttctttgctttaatggtttgagccttccttgtctttttcttgcatgaaagagcagatccttcctgttttttttgttgtcattcttttctgaaatttccttcttatttatttatttattttcattttaaagttctatttcttttcttggtacaattgctcttgtactagtggtaatgtagccaacaatatttcaggattaattaaagtattttaaagaaatctgttatgtttttacttatggagtggctctatatatttagaaataggaaataaaggtgatcttttaattacatttatcttttgaaaaattaaaaatgatgtccggtttagatcattggataaagatatagagattctaaaaaccattggattatcttaaatgcatattcattgatatgcttgctagtaagcattttttaactctttcaccttgtcttgttttcatgatctttctttatcaattttggcttataatacattaatgctgtttcaaatatccgcggaagtttcataatgattttcatgattcaatataagaggatcttactctattcttcgaacttggtctagaatgaacattatccttgtgatattttgtataagctttcaatacatcatacaagagcttatagtgctaccaagaatttgttaataatgtatgctgatgtggcatttaatcagtgtaatgtagtttgttaaaggtttgttagtaccaactgattatgattatatatatatatatatatatatatatatatatatatatatatatatattaaaagatccatagcactcctttgaaacagagttgctcattttacttaaaatctcttgttttttttttttctctcaaacatgttttctgcatttctgagtgtctgaattgaccatgtttgaacataagccgaaggaaatatagttatttatatttgtatttgcttttatagttgtaatcttgcgtgagttaagatttaaatatcttataatctaaatgtgatattaaacttatgcaagtcagcaagcactgtttaattgttagagatagggatgttaatggggcaggatgaggaatttcacacaccctccttgcccctttaaaatactttcattctctgtttttaaaattttaattatatttaaataaatataatttataaataaataacttttcatgcatttttatatttaatttttacaagaagtaaacttttatttttgtttgtgttgaaaatggtaaaaaaattaaaatttaaatattttcatttaattttatatataatccaggtggggtagggtaacacccaagcttgactcattttttttttttttaatttttaatttttattatttatttattcatatatcaaactcactttgaacctatttatacatctttcaaacccatcctatggacttttattttatttttggctcaattacattttttttttaaattctaaaaaagcggtgttttatgaatctattttcgaaaatacaacacttggtattcatgttaaaatcatcttttgaaaagatgatttcaatacaaatttataaattgtatttattctatcatcttttgaaaagatgattttactctataagtattcacattaaaatcatctttcgaaacgatgacttcgatataaatttataaactgtattcatactaaaatcacattttgaaaatacaatttatgcatgtaaaatccttttttttttttttttgaaaaaataatagtgttgtatttttataaatattttataaaatcctctgttctgaaaatatttaaaaaaaataatattatttaaataaaaaatcccatcctattaggggtgggttgacataagtcattgaaaatacctagctcgttgtcatccctagttaggacaaccatgctagttgatgagaaaagtaatcttattttataaaattggtcatagcttttgtctctttccttatgcttgaaattcaaaagctatagatgcattgtggagcaaaaattcatcttttctgtactttgacaatttgacttaacaggttctccgcgtggccaatataggagacacaggatt

SEQ ID NO: 11870 - DNA, 3772 bp, Vitis vinifera
  Intron number 2 from transcript GSVIVT01035736001 (locus G SVIVG01035736001) derived from phytozome v7.0 (chr-ID chr4 ; pos 3806470 to 3810241 reverse strand)
atcgagacttcaggtatgtcaaatcatatacatctttgctagtcttttctgtccaacatcagtttttggttactctttgtttagtacagaaagagggttagaactgtagggacatagtgaaataagtttgcagtctggttgttttttgtgtatactgcttgtatacattgggtgtatccccttttttggcgcttcttaatacaagcttttgtctataaaaaaaagtttgcagtctgaatatgcttttaattctggtccaagtgttgataaatgagtctacggtggacaatcaccaaagtaattctagaatgagctcaaaatgcctatttttttattgcaatgaggtgaatgggtgttaaaaaataattgatagtataacttctgtttgaccatacattttaggttggtccatcattaaccaaagaacatacattcaaagttgtttcacaaagtcgctaacgggagacgaaacaggaacttcatcaagttcttggagaatgaaagaggtttggtgttggataattccgagagcatcacagaggagatattactatatttcaaaaagctctacacgagtcctcctggagagtcttggagagtagaaggcattgattggtcccctatatcagaagagagtgcttctaggctggactcccctttctccgaagaagagatctttaatgccattttttagttagatagggataaggcgccggggcttgatggttttaccattgcagtgtttcaggattgttgggatgtaatcaaggatgacttagtaagggtgttcacaaagtttcacagtagcaggattattaatcaaaacaccaatgcctccttcatagttcttttgcccaaaaagtgtcggtcaaagaagatttcggattttagacctattagcttgatcacatgtctctataaggtaataacaaaagtcctgtcagggcgatgaagatgagtaccacacgagactatccactctactcaaggtgcttttgttcaagggagatagattttagatgtagttcttatagccaatgagatagtggacgagaaaaggcgatcaggggaggaaggagttgtattcaaaatagactttgaaaagacttatgaccatgtgaagtgggatttcttggatcatgtgttggagaagaaggggtttagttctaaatggaggatttggatgacaggttgtctgtcttcggtctcttatgctattctagtgaatggtaatgctaaagggtgggtcaaggcatctagaggtttaaggcaaagtgaccctttatcccttttcctgttcactattgttgtaaatgtgttgagtagaatgttgttgaaagctgaggaagaaagtgtgctggagggtttcagggtaggtagaaatagaattagggtgacccgtctgcaattcgcagatgataccatcttctttgctaactcttgcgtggaagaattgcaaattcttaagagtttattgttagtgtttgggaaaatttctgggcttaaggtcaatcttgacaagagtaatctttttggcatcaaccttgatcaaaatcatctctctaggttagccttgttgcttgaatgcaaggctactgattggcctatactatacctgggtctttctttgggagggaatccaattgcttgtggattctaggatccagtgattgagagaatctctaggagattagatgggtggcaaaaggcttacttatctttatctttcggtggtaggataactcttatccactcatgcctttcccacattcccagctactttctttctctgtttaagattcccgcttcagtggctgcaaaaattgagagattgcaaaaggattttctttggtcaggggttggggaaggtaaaagagatcatcttgttagttgggatgcggtgtgtaaggcgagggtaaaaggggggttggagtttgggaagatttctttaaggaatcgtgctattttagggaagtggttgtggaggtttcctagggagagtacaactctatggcatcaggtcattcaaagcatttatgggacacactcaaatggttgggatgccaacactttagtcagatggtcacatcattgtccttggaaggctattgcacaagtctttcaggatttttcctagtatacttggtttgtcgtaggagatggggaaagaattcgttttgggaatatttgtggtggggggatcagatcttcaaagtccaacatccaagactatttagagtagtcacggataataatatttctatatcttcaattcttggttctgatcgccctttctcatggaactttaatttccgtcgtaatctttttgattttgagatagaagatctagaacgtctcatgcgatctcttgattgtatgcatatatccacttcggctccagatgcgagaccatggtccttatcatcttcaggattgttcacagtcaagtctttctttatagccttgtcccaaatgcccggtttatctccatttttccctagtaagtttgtatggaattgtcaagtctctttcaaagttaaggcctttgtctgacttgtggcacacaaaaaggtaaatactaatgacttgctacaattgaggagaccccgcaaagctcttagtcctgacatttgtaagttgtgcatgaagcaaagagaatcagtagatcatcttttccttcatcgttctgtgttgttggggttgtggcacagattatttcagctagccaagatggattgggttcctccgagaagcatttcagacatgatgtccatcgactataaaggttttgacaattccaagagaggggtggttttgtagcagaatgcatgcatagctttaatttgggtggtgtggcgggaaagaaatgccaggatatttgaagacaaaactaggaattcaaagaatctttgggattccattcatttctttgtttctctttgggctttttgttccgcggtttttaagggcatcccccttaacgtgttacgactagattggctagcagtgtgtagttccaacaggacgatctagtcaagggagattgttcgtagttttcttagtgtagtgtcttgttatcttttggtgttgtttagtttcatctctagtaggaggattcctcatccttctattgtactttttttctatcaatatatacttgtgttgtttactataaaaaaaaaaaccaagtaacaagaggaatcacttggaaagcctaattttattttcttgtttcattattcacatcccatgcatttatgtgaatggttcctgaaaaaagacagggtagaaagtagtcatagatgtttgaatttaatctttatcagtttgttgttggaagttattcaaaccatgcaaagtgttgttaggatctgctcataagagcgatagtgggttttctgttaaggaaatccattattttggaaatatctattccataaaataaaacttcggaactaaacttcattctaagtaggtggcatagaacgaaggggttaaataggagaggacctgttagtttgataaaaatgtactgctttaactctctatgacagatatgggttttattttgcaggttctattgcctatctacatataccctagataggacaaatatcgtagatataggttatattttactttctttaccttggagttatgcgtttgatggttggcttaggtagataaactaaacattattaatcttgcttatcagagattggccttttctctgccaggagtaccataactcgtgagaagtttgaggagctct

SEQ ID NO: 11871 - DNA, 1975 bp, Vitis vinifera
  Intron number 6 from transcript GSVIVT01030232001 (locus G SVIVG01030232001) derived from phytozome v7.0 (chr-ID chr8 ; pos 10169975 to 10171949 reverse strand)
gcattgaggtgacacatgtcttcttgtttggtttcattttaattattagtttaagctatgtttgtaaagagaaatttactgtatctgactattacattctttattatgatgcttcctttgagtctagcattttaaagtcatgttttttattagtttttattttattttttgacttttccccccacttgaaatataagaaattgtttgtctcctgtttattaacaggaatgtataactgttgccaacctatttctaagaaagtggtatcttggatgagtaaaggcacattctctcactttggggaatgataaaacttgtgactaaatcaagtagcaattttcttgtgtgccaagcacaatataggagtgacggttttctcattctttggattgaatatggaatagttctgtctttttgggctggttaaactaatccttaaaagcattccttttagggctagattgttatattagtcactaactcataatagatattcttgtaggattttcatcatttcatacttgattttagatgtcatgcttctattcactatatgctttgtttgttacttattgttcgtaggagatttttttaagaagttgttttcttattatgaagttctattagtgtattattttatcagtcaaagcaaaacacctaaaaatttaaatattaacttattttgtaagaatatgatagtcaatactttgtaatctttttgactaatatgtgatgtactgtctatgtgattttattatatggagaacatttcttcattgcagcattttttgtcaaacactagcctagcttctgtgcccactatcaatccatgtgcagcaccttttttggagacttatactgtatatggtctcttttatttgcttcaaataagttctaaacaaattaattatgcattatttgtcacatgactaagtattgcttaagaatatcctgaagttctttcatctatacagactctggaacaaatgcatatttgtggtgtgtatatataattattcatctttatttatacatggacacactcacatttgcataagagacagatatacatacactgtaaaattcacaaacaaatagccatgttcttaagattttagtgaattttctggtcccactgcctagtgcttgagtgagcatgcaacaattgtgcatgcaattacaggttgcagtctgttattactgaaggtaaataacattcatgtgatgccctttttcgttaactctgtgtcaaggtacattgaaaatcatggaaatgttgtgaaaagttttaaaacagcccagaaactaaaatcaagactattttcaattgatctggcttttgtttttcaactttttaacttattggctgggcctttcatggtctttttggttcaccaccagctatctaactgctttccttgttattttaatattctatggcctcctgtttggtaaatgtgtacttcctcttctaacataggaatgcgtaagtgtggatataattcatccccctgtcacttagataaaatcttagcctgaacttttgtactgtaagagttatctgcattaaaagtctacactttgtttttcttaggttgaatcttcacaagttagctgtatttacattcaatgtaacaggaaagaatacatacatgtaagaaatttattattactttgcaaataattttgctttttgctgggttttgtcaatggggtgagcacaggttttctgtcctaattttaagttttaaatttctttaatatttttccctgtattctttggaactgttcttagaattattggaaatatgtgagtgtgatatgttaaatggttgaaataattgatgactttccttattgttatttttgtttatgatgttttttgttaattgatgtattgagtatcataatcatcgtattattatggtgatgtttcctaggttctgtacacgttcgttacttcgtgaatcccttg

SEQ ID NO: 11872 - DNA, 6431 bp, Vitis vinifera
  Intron number 6 from transcript GSVIVT01025926001 (locus G SVIVG01025926001) derived from phytozome v7.0 (chr-ID chr1 8; pos 27159682 to 27166112 reverse strand)
gagtgataagagggatgggggtttcagcagagacgccatttattccttgtactttcccgtccatcagtgtttggtttctctctttcttttcttttcctggaaaataatcgttgaaggaatctatgaaacaatgaaaacatccgaatgggttgaagcccatttatagagagaagatccaagggcgtgttctgttcacatctgcggctgatgagatcatcccacatgtcagtcaaactcaaattgacgtacacaaaatgaatcattcgtgaacttttttcatcagcaatgaggtcatcatgtcggtggatgacaaaagaacatacgagaaaataagaaaaggaaaagtcgtcttcatttcattctaacatttaataaaataatactaaaaaaaaaaatcaaatttatagaaaatgacgaatatttccatatatattctcgttaatttgtaataggctccattttaaaatctgatgtttatgaagcaaaattcggcatgcaatataaaaattagtcttaaataatggtaatataaattataagaattttttaataattttaataatgcaaataaactcaaaagaaaaaattttgagacatatttttcaaaaagaattttcaagtaaaacatttgatatggaacttatttaaatattttaaatcatttaattatttatttaaaatgtaataaaaacatttcaataaaattaataatattagtggcaagttttaattttttttttaaatggattaaaattaatttaagatagttttatcataaagttgggtgtatatagattaatttgagtgatttcaatctatttagaacactatttactttgaagaaattgtctattatagtaatttgaagttagtattattttttaatataaatattttttaagtaaatttttaagatattttataaatataatgtatttaaaagcctaaacaccaagtcaagtactctcatcaaggaattttccttatgattttttatttttatttttatagatgaacaatttttgtttttttagttttttactttttcatatttgtttaaataaagcctttttgagtccaactgaaataatgttgtgatgtgatacatgggatgccaaaattaaattgggttaaattttagtaggatccatttatgaaaaaccaacaattttccatattttaaatacatatatattcataaatttatcaaaatcatagtaaagatatgtttttcatttttttttctaagtaatcagcctttaatggagactataagtatctacattgaatgcacatgacctatttaccatgtacaaatagaaaatagttatcatagaatgatgaacactagggttttgtttgatatctgtttttaagaatagttttctgtttttaaaacaaaaaaaactgaaaaatacatttgataatcaaaaactattttttattttctttctgatttttattatcaaaaaacagaaattatggtgtttttagaaaacttattttagttgtttttttagagttgttttaaagtataattatataaacatatataatgataaaaaataaagctatggatataaaaattatttttaaaacatatttaaaaatattaaaaacagattaaaaataattttagattatcaaataaacttttgttctacaaaacatcataaaacagttttcaaaaactgttcttaaaaactattttttcataactgttttcaaaaacagttaccaaacaaggcctagaagtctctacatgcaatgcaccttaccatatacaattagaaaatagttgtttataaaatatgtaaagcatgatattttttgtaacaagtcccaaaaacacacaattgaatagccatttttactcattaattttaaaaaatatggaaaaagtaacctcaattgttataaatcaattttatctttatctatttaatatatatatatatatatatatatatattttcacaagtcagacagttattttttaaaatgactttttacttgtcaggtcaataataccaattgaattttattttattttttttttgtaaaaattgatttgaaattaataaataagaaattttaaaaattaaaaatacaattaaaaccaaaaatataaaaataaaatattaatttttactttgttaaatcatattagtataaaatatagattcgagaaagagttggaaacttgagaggtgatattttatttttttaagtttttttttttggttgtatttaacttttaatttttaaaaattttaattgtatttaatttttaagtattttagttttaattatatttttaattttttaattttcttattttattattgatgccaactaacaaaatttttatccaattttattaaagaaagatgagaagataggtatagggaattaggaagattatcatggagaatttttttcaaaatgatttgtatctcatattatataataaaaaatttatattatatttatttatatgatacttttattaaattaaaatgataaatcaattttttttataattatttgacttataaaaaaatgcatatattttaaaatatttttaaatgaatgaatataaaactaatttataaaagttgagatttatttttttttattttttcaaattaatgagtcaaaactcacttttttctatctaaaaatcatatttatattaataatataagagttgtttgaaaatgattttaagaagtgtttttaacttaaaaggtgtttttgaaaaaaaataaaaataggtgtttaataaaatttaggaaatatatttaaaaatctaaaaaatatattagtgttttttttggagaaacacttcataaaccattctcctaaaaacacttgataaatgattatcctaaaaacatttttcaattaagaaaacattaaacatgtcaaatgtaatcttttaagtataacatgggaaaatgaacacaatgaacacactctaagtataacatgagaaaatgtggatttacctcatatataatcataacaggtaatgaacatttcaaacaaaacataagtaaacaagaaattgtaaggttgtcctcatatgggtgtgaaaacatccatgtgaataacataatatatagagaatcaagaaacattactggatcaaaaataaagaaagtttaattgtttgtaagaaaatgtatgcatcaagaagagcacaaattggccttttgctctttattggctccacaaagtactcatcaattgcctaacaagacaagggctcatcataatacaaagaagttactatctttggtggaatattaattatgtaccaattgtttttgccttttaacccttaaatagagatgggtgagtgttcccatgtaggatatatatactcctcttagagaatgaagtgataaaatgagtattctagattgctgcagggaaaaaaaaaagttgtgttgtttgatatattaacatttgaaaagagaagtaaagtaatctattttaatcatgtagatattgtttgctttaaccacaatggattcttactattttaaaatgcattttaaagttataattgttcattggacctaaagtgactaatatccatataggagagagtaagttattacaaatggtatcaaagtcgatctttaattttgatgtaagccttcatctattggaccccataatcttttgaggacatcatgcctgtatgaaagatagggttaattgtaatgtctcatatttcatatatatatataaacgtctcttaatcatataggcctatttttaaggtgtaagtgtttattggctcaagacagataacatccatattgaagggaacgagacattataaatgatatcaaagttgatccttgacccagtgtgcgaatttgtttagccccgcaagaggtatttgtccatctaaatgccctacaatcatgtgagacataacgaagatgttatgtttgtttaagagtagtaatgatattctacaatacaatatacacaacatatttttcttaatcatgtaaacatgttttaaagttatgaaggtccattttacccaaaacaactacatggctaaaagtgagccattacaaatagcatgagcaaggatcttcgaccttgatgtaagtctttacttgtttaaccccataaggagtaattgtccttttggccccataatctatggggcataatgaggatgtcatgtttccatgtgagatcaaggaggtgggattgcgatgtctcatatcaaatgtgaggtatatatgtataccctattgacccatagtggatcatatctgcatgagaaggaatgggaagttacaaattttcaaagaagtctataaaaaaataaaataaaataaaaaatctagaaggcctcaaaaaaacacattctcaaattttagaaattatcgcattaagaaaaatcatgcttctattcaagcctagtttcaaacaatttatcctttttaggtttttattcttcaattacaaatgagcaaacattcatcaacatttagattgacaaaaaacacatcattgcctaccaaaaatacaataaaacttaaaatatcatactaactaaaagacttgctattggattatgaaattcatattcaccaaattcaaaacaagaaaaataaatgaataaagcctaaattgaaacataatttaaaatcgtttttgcataatttgaaatatctgatccaacccttatcatttcaattctaatttacctttatttaaacctatccaaacttacctatgacgtttcaattaatcaatcagtagccttgagtctttaatatagagtaagtcatcatctagaaagatcctatgttagaataaaaagaacaaaattatcaatacacaaattataatgtataaggtactaacactcccaactatgtagatattatccactttgaacctaatgaactcttatgactttaaaacatacctacaatattaaaaggaatacatatattaagatgagttagatatatgacatcagaaaatttttctctcattcattataggatatcacaatcatttactataaaaatataaaatctttattgtagatatattttaaagtattaagtttagagcggacactaattgtatgaaaggaattgagtcattacaaactatgagttttactatttttcattttaaaagcaacgagtgttaagtaaattgtatgtctattcttgtattggtcattacttttctatactaatatcataaaagaacttaaaagaaataagattaaaaaaagaaggtcgggtgatgcagtgatgtaagggagaaggtgtgggtgcagccaatgtagacttccgggttggacatgggtacaccatggtcaatgaaggtggccaatccatatatacacatcacattattgcattttcatcattagtgacctcacccgatggacccttacacaatacatatattattattcaacctcataatgggacctcatgtctttcaaacttctcttattttgtttctatactttcttcattatttttagccattgtggattaatttttccttttttcttatcatttttttctttggtataaaaattagttttacccgatgtgggttaattttcttttattatttattacttcaataaaagacgttccgacaaaaaaaataagtgaaacaataaaaaacaattaaaatatgcaatctaaaaataccatttttcatgttttttagttattaaatatgtttttttatttttttatttatttaaattattttattagaaagggtttatgattaaaaaaaattgattctggatcggttttatttatattatatattaaattatttcctatttaataaatttttttactatattaatataatattttaaatttatcgttctaattttgattttaatttttagaagataaaatggtttatgaaacttaactaattagaaaatatgtatcaaaaataattttgacatattcatttaggtatgataaaaaaaaaaaaaccataatttaaagaaatgtgataagaaattaatgatttttgtaaaattttaaatgttatttaacagctcattaatcctttatttttaatgattattaagggattaatgattatttaatagttcgtgctgaaatcagagttgacataacaaaggatttggacagcagaaaatatattcaactttgatcaccaggggtgtcccactcatataactgtagcagcagccgccgccaaatatacagatataagcagcctctctctttttcttcttctgctcttgtaacatattctttagatgaatgtgttagatttcttcgtctgcaagttctaaacatggctaatttttctttcactcttagcattttgtagggtggttctggctccactaactagacagagatctt

SEQ ID NO: 11873 - DNA, 1616 bp, Vitis vinifera
  Intron number 2 from transcript GSVIVT01036075001 (locus G SVIVG01036075001) derived from phytozome v7.0 (chr-ID chr6 ; pos 21022467 to 21024082 reverse strand)
gggaggctctcatctcagcagatcttggtatgttgcttcaacttatgtcctaaactttggatataattttctgtacaaggtatgctgaatcagagtaacttctctgtatattgttgcttctttaacaattagcagaagcaacatgaattttaggtttctcagtaagattaagtttggccgtttgacagcttcattgggaaagaaaaaaaaaaatagaatctggccacaatcattgcaatgtgaacaactgaaagatctctactcttttccctgtcttctcagcagccaagcagagcacaaggctgtgtctgcccttgatattcagtatcttcgcctgttaaaaccaatccagacaataataatcatcatcattagctgaaggatgctccaacaataagttgtagccaaatgatataagaggtgttaaatctctccatcaaatgagaatgtctagattcctttctaagggatatcctgccctttaacctctccaaattcaagtaatcattcatcttctgtctcccatcaatggaagcaaggtttaaaagcctttcacgtggctctaccaaaatgtttttgtctcttacttgaagtcagcgtttcggttataaaagtttaggagggcaagatcaaagcacaagtgttccacatttccaacgagttttatggaacatgtttattctttataattggagcatttctcagcactataaatcatgaacaaatgcgtttaacccagaagagtcatgttactgaggggagggataccttttgataaaagggcctcttttgtgtcaatttttttttttcgattagcctccaaaaagctgccttttacttgaagggtttaattggagcatttctcggcactataaatcatgaacaaaagcatttaacccagaagattcatgttactgaggggagggataccttttgataatagggcctcttttgtgtcatttttttttcgatgagcctccaaaaagctgccttttacttaaagggtttcaaaaagttaggtttgcaaaggagtaaaataataaaagccttaaagtttaacagagcttatagccatccttaattatactttttgtttggcatgttgaatgctgtaactttcacccaagggttttttcttttttcaataaatagtacatttgccaacttgattgtttgatctggttgactgattggcttgccaactctctggtccaactggctggttctgtccaactctaataacagcgctctcaagtctagaagaagaaagcttagggactttagattatttaacctttgtttccttgttcttatatttggatgataagggtctgccaactaggcacacactcatgcacatagccaaaacttgggcaaagatattgatttgatactaactgtgaattgatgctgtgtagcttgtttcaaagatggatactctactcttccctctctcctatcttctaatttattctcttaaaatggcctgagttgaatatgttgtctcaggaagtttgaattatgattttgctctgttgaaatggagcactgattttgattttgatcaaaatgtatgtgtagatcttggagaaatagctagagcaaagttcgatttt

SEQ ID NO: 11874 - DNA, 10503 bp, Vitis vinifera
  Intron number 1 from transcript GSVIVT01009433001 (locus G SVIVG01009433001) derived from phytozome v7.0 (chr-ID chr1 8; pos 8313937 to 8324439 reverse strand)
acttcgctcaccaaagagattctccactcggacaggtacgtctctgattgcaattacacctaatatgcaagcttcttgtgctttctgtttggctaatgagaaatttgagggcaaggaaagtttattttgatcctgatgtgtgattaaaacaagtcgttgcctttggcccatttgaaggagggttttctttctctggtccgaaataattaacaatctcatgttcgcagtttatttccctctttttttttttataatgcatttcctcatcgtctgaacgactgaagagagtatcatagagactaaagtcatttatcgttttctttttattttggattagaacttgggattgtgcttgttggtaccatgttgggcaggatccctggagtgattttgttcactgtaatcctcatattttaaacctctgcttgttcttcttctgcaacggacgtagtcattgacaccataaaccttagaaatgtgtttcttatccaattatgttttcttgattgagttctcttgccttttcatgaatttgcacccctaccatcatctttgaaagttgaaaaagaggaaacacatttaatacagtttttacctccattttcaattgttatcggtgttgggagtttaagggaatgaaaacaaatgactagcccaaaagacacaaacaaagtatagaattaataagaagaataacttatcggcagacatgataaacattgtccttcgaaatagatctaccctcctcgaagacgaacttggcgcactagggtactagtggtttacctccaggattcaacaaccatatctcgccttgggtgcactctgtaagtgagatgtgtacaattcgggttttgaaaaaatttctctagatagatgtatgaaaatactccttaaaaaactctttgaaaaattctctgaaaaaattggtattcatatatagagagtgatggggaaaagccttttaaagtttattcaaggaagaaagagaagacctaagtaaactttaagtatgattaatataattagaatttgagtcatgataggttattagagtcctagtagaataggttattagagtcctagtagaataggttattaaagtcctagtaaactttggatttcttagagaagcctataaataggctaatcaatgtaaatcaaagggatgaattttgatgaataatattatactttctttcattgcaaggttgcaaccctcaatggtgagactccattgattttcttctaggtgagactcctagaaggccttagtgagactctaaggttttccatcttttcttcattgtttcttctttctctctatttcttatcttataattttctctaccataaagtttattccttgttcctctccttacaccctaaaaataaaaccctagcccacctacccttgagtgtaggcaaccatcctagggttgtcctacatcaattttggtatcagagccaaaattcttggcttgaaggcatatgcaattaaggagcggagcaacttatgcaagcatgagttccaaaaaaacttctagcaatcaagatgccgatacaatacgcttggaggaaatttcagccacacaacaatcccatcaagatgctatagtacaactaaatagcaaacttgatgagatcatgaagttattagaaaagagccaagaaaaacgaccaattgaagaggagatcgcaagtcatcaatttagacaatcgccaaatcgatcacgcgaagaacaagacaattttatgatggggaatcaaagaagggccaaactttttgagctagatgatgatgtgacaaaaaaggtacgtcttgaagttgctgaattttatggaaaactaaatccaacagcttttcttgattggattatgtcaatggaagattactttgattggtatgcaatgcccgaaaatagaaaagttcgttttgtgaaggcaaagttaaaaggagcagcacgtctatggtggcataatattgagaatcaagctcatagaactggccagccgcctattgacacatgggacgagatgaagttgaagatgaaggagcactttctcccaactgattatgaacaacttatgtatacaaaattgttttcccttaaacaaggtaccaagtccgttgaagaatatacagaagaattccatgaattgagcattcgaaatcaagtgcgagaaagtgatgctcaacttgcagcccgctacaaagctggacttcgaatggagattcaacttgagatgatagctgcacacacttataccgtagatgacgtttatcaactagccctcaaaatagaagaagacctcaaattccgggtttccaggcatccaagttcacaaattgggagcactttctccaataggacaacaagcaaacctttaagcacatcaaacttcagaacttctattcatgtgaatggtggggataacaatcaaccaacttcgaatgtggctcatcagaatggtaataagggtaaaaattcaatgagcaatggagatagaaaagtagacgtgactactttatgctttaagtgtggtgggcatggtcattatgctgttgtatgcccaaccaaaggtttacacttttgtgttgaagaaccagaatctgaattggaaagttacctaaagaaagaagagacctacaatgaagatgaagttagtgaagaatgtgactactatgatggtatgacggaaggacatagtcttgtagtacgacctttattaaccattccaaaagtaaaaggagaagaagattggcgacgtattagcattttccaaacacgtatttcttgccatgggagattatgcaccatgatcattgatgaaggtagcagtttgaacatagcttcacaagaacttgttgagaagctaaaccttaaaacagagagacatccaaatccattcagagtagcatgggttaatgacacctctatcccggtaagttttcgttgtttagtaacattcctttttggtaaggattttgaagagtctgtatggtgtgaggtcttacccattaaagtaagtcatattttacttggaagaccttggctctttgatagaaaagttcaacatgacggctatgaaaatacatatgctctcatacacaacggacgtaagaagatccttcgtccaatgaaagaagtccctccaattaagaagtcgaatgagaatgcacaaccaaaaaaggcacttactatgtgtcaatttgaaaatgagagcaaggaaactgaagttatttttgctttaatggctcggaaagtggaagaatttaaagaacaagataaggaatatccagcaaacgcacgtaaaatccttgatgacttttctgacttgtggcctgtagagttacctaatgaactccctcctatgcgtgacatacaacatgccattgatttgattcccggtgcatcattaccaaatttaccagcctacagaatgaatccaacagagcatgttgaattgaaaaggcaagttgatgaattacttactaaaggctttattcgtgaaagcctaagtccttgtggagttcctgccctactaacaccaaagaaggatggatcatggcggatgtgtgtggatagtcgtgcaatcaacaaaatcacaatcaagtatcgatttccaattccaagacttgatgacatgctagatatgatggttggatcaatagtcttctcaaagattgatctaagaagtggatatcatcaaatacgtattagaccaggggatgaatggaagacatctttcaaaactaaggatggattgtataagtggttagtcatgccgtttggactaaccaatgctccaagtactttcatgcggattatgacgcaggtattaaaaccttttattggacggttttttgttgtctattttgatgatattcatatctatagtcgatcttgtaaagatcatgaggaacacttgaagcaagtaatgcgcactcttagggctgaaaagttttacattaatttgaaaaaatgtactttcatgagccctagtgttgtatttcttggctttgttgtgtcttctaagggtgttgaaacagatccagagaagatcaaagctattgttgattggccagtaccaacaaatatccatgaggtgcgaagcttccatggaatggctacattctatcgacgatttattcgaaatttcagctccattatggccccaattactgaatgcatgaaacctggtttatttatttggaccaaggcggccaacaaggcatttgaagaaatcaaatccaagatggtgaacccttttagcccacgtcctgagatcgagtatgttttttatgatcaacttgtgtctactcgacaaggtggataccaaaaatttttggtaaaatggcaaggcaaaccacactctgagaatacatggagtacgacaacggattttcagaagattaaccccaatctctatgaattgtatcaaacatctaactcgtcggagccgagttctttcaagctggggagaattgatggggaaaagccttttaaagtttattcaaggaagaaagagaagacctaagtaaactttaagtatgattaatataattagaatttgagtcatgataggttattagagtcctagtagaataggttattagagtcctagtagaataggttattaaagtcctagtaaactttggatttcttagagaagcctataaataggctaatcaatgtaaatcaatgggatgaattttgatgaataatattatactttctttcattgcaaggttgcaaccctcaatggtgagactccattgattttcttctaggtgagactcctagaaggccttagtgagactctaaggttttccatcttttcttcattgtttcttctttctctctatttcttatcttataattttctctaccataaagtttattccttgttcctctccttacactctaaaaataaaaccctaacccacctacccttgagtgtaggcaaccatcctagggttgtcctacatcagagagtgaggggtgacttgcttttataggccactaacacagtcccaacgagaatctacttgtaatcagaacaagactcaaagaggaaaaggattctacttataaaaggaatgagactccactagcacaatcccaataggactcttcccaaaaataaaaataaaattatttacactcttcctacaatcaacattgatcatatgattggtcgtggctaatccaataacgaaagtttcgaaaggggactggagcagactaccacgagacaaaaatcttcttactacagagatttgattgggaactacaaggttttgattgggaactacaaggttcaatattgaaacaatttcagaggtttccctaatattggaatgtccttgacattctgtattgggaatttgattctatatctgattaaacctcaaaaccctgcttgatcaccaataatagtaccatttctttcacaagaaagtccaagttcttctttggcatcttcaatgccaacattgggtgatagttccaacaacaatcatcttgaatgtgtggtgaagcttgcctctttgttgggttccaaagcgcggaaggttccaactacttatttaggcttgcctttgggtgatccattcaagtccccttttgtgtgggatgtggttgagaagaggttccataaaaggttagccttttggaaaagagtcaaaagacaatacgtttcaaagggtagactcatttgtttaaaagtactctctgcagcttgcctatctattttatgtctcttcttgtcattcctaaaatggtggttttaaggttggaaaaaattcaaagggacttcttgtggggaagaggggcctttgagcaaaggcctcacttagttgagtggtattccattttcaaatacaagaagttggaagggctaggtattagggtcatgtcctcttttaataaagccttgtttggaaaatggtgttggaaagggagttcctttgaatatgagttatagtgggaaagtttggggaagaacttggaggatggtattatcttgtaggaagggaggattatggtgttggctagtggaaggataaaaggaggttgggaagcctttaaggccagaacaagttttacagttggcaatggaagaacaaaattttgggttgatgtttggtgtggggatgctcctttaaaggactatttttgctttttttctttttttcttctaataaagaggtttgggtggtgaatgcttgggaggttattagtgggcaaattgtgtggaacttgggtttcttgaggcagtttcaatattaggagctacatagcattgaggagtcacttaggaggcctcaagtgcatgggaagtgcaatgaggatgacaataagctgatttggaagattaagaaaagtgggaaagtcttggtgaaatctttctattcttcattagagtcagattaaggaattcttttcccttaaagctagtgtgaggctattgggcacctttagaagtgttttttttttttttttttgttttttgttttgcttggggggctgtttgggaaaggttcctaacctttagatcagcttaagagaagaggatgagtgttagctaaccattgttatttacgtatgagtttagaagaatcaactaattacttgttaatccattgtggaaaggcaagcggtctttgacatttgttgttttccctctttggtttttcttaggtgctccatttttttgtgaaagatttgttaaagggatgtcatgagagttttgttagcaaaaatagcaaaatatttggaggacagtcccgctttgcttgttttggattctctgacaaaagaggaattgaagatactttgatagaattcaacgcttagattaatcactataagactcttatttgaagccctttccattggacttgccaacatatacaagatggtcctgtttccttgttaaattttattgattggctgattgttagttaatgagaggttgttttgtgtgcttgtttgagtttttttggcattctttgtatacctcttatgtacttggggtgtacccccctctttttgtttgacgtctttaatatattcttggttgcctatcaaaaacaaaaaaaaaaaaagggccttaggacaagaaaaagcctcaaaatgagtgtgtttaaatctcctctatgaccctctagatgtgtagagaccctaagatgtgtagagaccctaagatgtgcgaagttaatcaccagcaaacctagggtgatcagccaagagaagggattttttttgttaaggtggggaggaggaggatgtgaattgggtgatggtctcttgttcaaatttttgctgagttataagattatgaatgagaatgatgatataagtaataatcaagatagaaagagatagatgatttatctatcaaaaagatagaaagagatagagaagaagatgcaaactctaatgtacatggttcaacaccaactagcaatacatcaatggtcctcaagctttaatttaagccttgagatagctccactatacaaagatcctataaactaagaacttgttcaatatatgcttggtttttaggtaccaacaaacctttacaatgctttaagtgttcttcccaatacccccacactctcttggacaagtgcaataaacgtgtctttaaataaaatacaagaactaactttgcaaattgattacaatggagatcatagctagcctcactctatcaattagatctagatccttcatccatagaataaagtatctaggcatatctatttcttcatattttgacttctatgaagtttctttcttttcttcagctgctaaaaatcgttgttttggatggcccctacacaattagttacaaatggtcattgagattgagattttcaagttaggagtaattgcaccaaaagtgtattgaagatcaaggttgaatcactacacaataggttattaataaatgaagattaggaacttcaactatgagatttttgcacaatatacccattagacacaaattctcactcaattgatcaacagttcgactgatcactcaactagttgttagcatttaatacatgttgcaggtgactgctgggagacaactggttaatcagttggttagctgatagccactgccaagtacaacacagaaaaggggttcaaccaaattggaccaattgattgccctgttgactgcctaagtcggtgaacctcaattttttatttcatgcacccttacctctcaggttccttctcttatagaaatcaaaagcatcagttcctactttctttgaggaagcattgacctgattatgaatgctctcaaaaagagaaccgaagttttctcctttatagggtctccctttgttctttgaagaattttttttgaaatttcctttttcttgtggggatgttccagtgattagaactctttaccaaagaggggtgccttgcattttgttcatgatgtgtctccattggtgtcattgatttgggaaattgtgcttatcttggaaaattttaggtaaatcaatataaggagatcgtttttttcctcatttctagggaagttaggacttgggacaaattttgttgagtgtctcccttttctctatatgtaatatgtgtcgctatttgagtcgatggataatgcgggctcataagcctgtggtgtcttcttgagcttcaggcaccacatctgggctcctgcttgggttgtttactacctaggcaaggcctctggggcctacttgattgtgcttcttacctacatgcacagctattagtcttcagaaaggcaccatggcaacaagttttactggcatggggttgtttggttccagatttctgggagctggcggtcaacacagtacacttgttatgtgcctggcataattcaatataaaagtaaaggttctcagatatgttttggtcaagtacttgatccagaggcaagcttttcaagtgacagttattttagtttatattatggactcaaaagtttgtcatttcaaattgtagaagagaagaattgaaagaagtggtagcttcagtagctttaaatcttaagtaacctgaatctatattattttcgagttttttgcagagtcatatctttatagaatgtttttgattgctgccccaatatgtcagtggattctgaatgttgtcatctgtatctttgaagacacattttgttttttgtctattgaaatgtttacacatgaatcatgatgcttgtctcatactttcataacatattggttataaccatggatgaaattataccgatttttcatcaaaattccagggaaatatttgttattgcctattgctggattttgttgtggataaattccgatattcctggtattatgggataaatcggatttcaaaatttttttaggagagttggaattgaaccgctaacctcagccatacagtagaattgaaccactaactaacctcatccatacactaggaggcacttgaccaactaggctaagttatatatatatgtatatgtatatatatatcttactttcatttaaaaagaaagaattaaataaatatacttttcaataaattcatacaaaatacaaaatgttaaaataaaattttaataaataatttaaatattatattcaaattctatttaacttattgttaaaaatataaaaatcattctcaatttttttaatgaatttttctttatatgttttgtacattaattaaatatatcaaaaatataattttacaagtaaatttaaaaaaaaatcatacatatatcttcattttttttgtattgttaaatgcattcaaattagataaacctatataatatgtattttcaaatactaaatattattgatgaatgtaacaaattgtcttatatgtgtatatcactttcttcaacaaaacaacttcaatatgtgtattattgtttctttcattttttttaaagtttttcccaacatttttatgagttttgatcaatttctatctcattgatatttcccaatatatccataaaatcccattactaatatttgtgtaaaagccaatattttcatccttgattataattgggagttggcaatattatttgaatgaatctatatgcataacttattgaaaatagttatgtgatctatggacagaaaattttgaacaaaaagctgtttttctatatttgtggagatgggaaattagttgtttgagccatggcaacttattgatggtaatggaaattgcaattggtcaaggttgaatgtggtgtgtgaacaaaaactggtcaatgaatccagtgctaggaatgggtttttctgccatacaaggagctgtgtttttaattatttcacatatgatattgttctagaagataaccatattcacagctcaagttgtatcggaatgtctggactatgtctactcaaattgtggggattgtctgaggcttctcctttatttgactgattttcttgctgtcaggtac

SEQ ID NO: 11875 - DNA, 9973 bp, Vitis vinifera
  Intron number 6 from transcript GSVIVT01014993001 (locus G SVIVG01014993001) derived from phytozome v7.0 (chr-ID chr1 1; pos 147555 to 157527)
gcttcttactgctgtcgcatccacaaagtttagaggtacggtctatggataggaaggatattctatgtaatctatctttataattgaacttgaaataaattctgttctattgaattgtattagaatacaatatgtacatcctatttatacgcaactagggattatattccactaaattctctcccataaattagggatcatattcacctaccacctatgatcctataatatctcccataaatcatattattccaaagagagaaacagaaagaaataaatacaaaattatttagaatctactagtgctccccctcaagttagaggataaatgttatccattctcaacttgtatgtaattatttgaaactggtgactagtaaatcctttggttaacacatctacaaactgtcattttgttgaaatataggatgtgcaattcaaaccactatcgtttttttccttgatgtactgtcaatctacttctacatgtttcattcggtcatgctatattggattgtgagcaatatcaattgttgatttgttgtcattgtataacttcattatcccttcccacttgattcgtagatcaccaagaacaatctttatccataatagctcacaaattcaatgtgtcatagctttgaactttgctcctccacttgattgaatcaccatagattgcttcttacttctccatgtcactaagttgccatctaagagtgtacagtaactagaggtagaacgtcgatctgccactattcttgcccaatctgcatcagtgtacgcctctaagcttagctctccatttttcttaagaaaattccctttcttgaaatagactttaactaatgtagaatccagtataccgtctctagatgaacttcctcgggagaatgcatgaattggcttacgacgttactggcataagccatatttggccttgtatttgataagtagattaacttcccaattagacattatacattccacattctattattgcatcttcttgcgcttcccttagcttatgattttattctaaaggggtgtcaccaggcttacaaccaagcatattggtcttcttaagaagattcaaaatgtactttttctaggagataaaaataccctgccttgagtgggccatttcaatccccaaaaagtacttgaatcttcccaagtcttttaccttgaattctttgactagtttcttattaagtctttctgtttccttagagttaactcctatcacattgtcacaattatgtcattaatataaaccatgataatggtaagtttacccatatgtgaaagtttgatgaagagtgtatgatctccctggctttgtcgaaactccatgtcattcatagcttttgcaaatcttcccaaccatgctcggagggattgtttaaggccataaagtgcctttcttagtttgcacacattgtttcttttgaagtcttcattgaaacccaatagtgttttcatatacacttcttcttaattatgtgggttccttatactgtaattctgtgggtcgctattttagcgcctctttgcaatacaatcttatgcttattgataaaaaaaaatatacacttcttcttaatctccatacaagaatgtattcttaatatcaagttgttgcaaattccaaccaaagttagttgccaagagtagtaatatacaaatggtattcatctttgccattgaagtaaatgtttcgtggtagtccaccacataagtttgtgtataccctttggtcactagcctagccttatatttctccaacgtcttgtcaactctatatttaactatggacacccatttacatccaaccaatttttttccctttagtgatttaattatttcccaagtttggtttttctcaagaggtaacgtctcctcttccatggctttcctctaattatcgcttctaagtgcttcttgaattgtttgaggaatttcaataggagttacttgggcaaggaaggctctatgtgcgaggataggttttcaaatgaaataaaattggagatccagcgttgagtgcatttctggtagctttcctaagggcaatcggtaaatggagatcatgaaatgctttgaattttttttttttgattggaaacgatacaaatatatattaatatagaaaaggagtacaagaagaaggatgagaaatcctccaaccaaagacaactaaattacatgaaaaaacacaaaaaacaaacgaacacccactaaggaccaatccctatggagtacacaccgctatccaatccagttgaatcacattaaggggaatccccttaaatgccttggaacagaaggcccaaagggaagcaaggaaaactatagagtcccaaaggtactctgaattccttgctttatcctcaaaaatccttgcgtttctttcccaccacacaacccgaattagagctatgctcgcagcttgccacaaaactatccctctcttagaattaccgaagcctttaaatttgatggacatcatgtcatatatgctccttggggaaacccaatccaacttagctaactgaaatagcctgtgccacaacccaatcgtcaaggaacaatgaagaaatagatgatctgctgattccccgtgcttcatgcacaggatacaaatatcaggactaagggctttgtagggtcttctcacttgtaacatatcattagtattcaccttcttgtgtgccactaaccagacaaaggacttcactttgaaaggaacttgagaattccacacgaactttgaaggaaagttctgagaagatccagaagattaagataatgctagaaaaaaggatttgactgaaaaaagccctgacgaggataaaggccataatctggcatctgggaccgaaggagagagatacaaatcatcaagagaccgcatgaggccttctaagtcctcaatctcagaatctgacaggttacggcggaaattcaaattccacaagaaaggccgagatggaccgagaactgaagaaatagaaatgtttttgtccacgactactctgaatagtcttggatattgggttcccaaaggttggtccccccgccacaaatcttcccagaaccgaattctatccccgtttcctaccacataccgagtaatcaaagaaaactcctgaaagacttgagcaatagccttccaaggacagcgatgagaccatctgactacagtgttagcatcccaaccattagagtgtgaaccataaatgcttaaaatgacctgatgccaaagagctgaaccttctctaggatacctccataaccatttccctagtagagcgaggttcctccaagaaatattccccaaacccaaaccccctattgtctttggtctgcacacaatatcccacctcactaaatgatcccttttgccttccccaacccctgaccataaaaaatccctttgcaacctctctatttttgcagccactgtagcgggcattttaaataaggataggaagtaacttggcaaatgggtaagacaagactagataagagttatcctccccccgaaggataagtaggccttttgccacccatctaatctacttgagattctctcaaccactggatcccaaaatccacacgccttaggattcccgcccaaagggaggcccagatatagaataggccatccagacgccttacaatcaagcatctcagccaatcttgaaagatgagcctgatcaagattgatgccataaatgctgctcttgttaagattgaccttgagcccagaaatgtgcccaaacgctaacaaaagactcttcagagtctgcagctcttcctcccttgagttagaaaagaatatggtgtcatcagcaaattgcaaatgagacaccctagttctatttctacccaccctgaaaccctccaacatatttctttcctcagctctcatgagcatcctgctcagtacatctgcaactaaagtaaacaaaaaaggggataaagggtcgccttgtcttaaacccctagatgccttaacccaccctttagcactaccattcaccaaactaatgctttgaattttcattctgaacaaactaatgatgagtttttggtgagagcaacaaatttgaagtaggagaaatgatactggaaataggattagtggagtttgtgttttcattacttggcttgggttcaggctcttgagcttgcattcaatcaggtcagggctgtttatgcctagagtaaacctgtagtggcatgcagttgcattaactcctccttgatccaattttgatgagggttcttgactaggtgacaaggaggttgaacctataggtgagactttaggtacaagaggtaaggattcagaaagtctaggcaaatcaagcataccataagagagaaacttatcttcacctaagctttccctctgaagataagtattagggaacaatgattgattttcaacaaaagtgacatccatggatgataacattaataatcctttttggttggagaatatcccacaaacacacattttaaagcttaaggatcaagtttgttgcaatttggaggatagatatggacaaatgagacacaaccaaagactttgggaggaagtttattagagctattgaaatgtgggaaaaaatttaagagtgtgtttaatggagttttattttcaagcacttttgagggtagtcgattaatcaaataagttgcagttaggacaacctttttccaatatgattaggtatatttttctaaaaaagtaagtttcagttgatttctcatagatgcttatttttccgtttagccacaccattttgttgtggggaattggtttatgaagcttggtgtataatcctttatttttctagaaaaggagataacagtataacaccgaattaaagtactctttcccattatcagatctaatagcttttattttaactccaaattgtgtggtaaccattttgtgaaagataggctacacaaaactaacatctgatttgtttttcatgaggtataaccaattcacactagtacaatgatcaataaaggacacaaacgacattgctccagaaagacttgggatttgagagggaccccaaacattagtatgaattaacaagaaagagaatgctgaatttgtattacttaaaggaaatagaatacgatgatgtttagctaatcaacaaacctcacaatgaaagctatcaacattcaatttattgaataataaaggaaacatttttttgaccaaagtaaaagatggatgccctaaacgaagatgatataaccatatttgggctttattctatgagaatttttctgaaaagtgagagagtgccatacgatcaccattgctagaattggatccaagcatgtacaaaccctcttgttccttagcatgcctaatcgtcctccccatggcttagtcttggatcacacaatgagatgggaaaaaggtgacaattcaattcaaatttttagtaatttgatgaattggcaagaagttagctgaaagttttggaacatataacacaaattttaatatgagagccaaagttaaaaacaaatattccttggcctaccacagttgctagtgtgccatcaacaactttaatttttttatccctagaacatggataacaagaagaaaaacagtgtgaagaataggtcatatggattttctttggtgttggaaaaaacatgctagtatcgttgacttctgacattgtcgaattccataactaggacatcaccatagagtcttcttcatcccatgtagcgaactttgaataatctggtttcgatctcgtcccaagaagatgactcggtttgcccttccctttcaagaaggtttgaataaattgcgaccacttcaaataatttttatcattgagacgtaacctggttgaatattcagctcctgctgcaatgttgatgacttcatttgttgttgttggattagaaacttgctgattggtagattcttaaatctcatacatgctttttggacagaagtggaagaaatcaaataagaggctgaggaaggattgcagcaatgcaagccacaataggaaaaactatgttttcagattaaaaataaaaagagcaaaagttctgccaaaaaactagatttctctaggtttttggaaaaaaaatcagcaatgaaggttgaaaaaaattagaagccccaaggagtttaatctggctttgataccatgtggagaaaaattgtattctcactcatatattgaaagtatacaaccaaatgaaaatacacctaatcaattgggaggtggtgtgcactcaaaaggagaatggagggcttggtatacggaagattgatctccttaacaaagccttattgagtaagtggatttggaggtttgcctttgaagaggacattctttggaagaaagtgattgaggtgaaatatggtcaagaaggccttggttggcggacaaacgaagctcacggggcgtttggagtaggggtttggaaggagattttgaaggaggcaaattggtgttgggataacataaggtttaaggtgggcaaggggactaaggtaaaattttggactgatcactggtgtggtgatgaggcgctgtccagaattttccctcagttatttgctttggcggtgcataaaaatgcaacaatcaacgaggtttgggactctagccttggtcaaggaggttggaatctcagatttgctagggattcaaatgattgggagctggatttaataggagctttgtttaacatgctaagggatgtcaagatctcccaagaagaggactcggtggtttggagaggtggaggtcaaggtatttttggagtcagacatgcttacaatctgctggctgctcctaataccctcgccttcccggttagatgcatttgggtggacaaggtccctactaaagctgccttttttgcttgggaagctacatgggggaagattcttactttggataggctccaaagacgagggtggcagcttcctaattgctgttttttgtgtggttgtgaagaggaaaatgtaaatcacattcttttacactgtacagtggctagggttctttgggatattatccttgctttgtttggggttcattgggtgttcccagagacagtcatagaggtgttacttagttggaggggctcctttgtggggaaaaagaggaaaaaaatttggaattccataccggtgtgtattttttggacggtttggaaggagagaaatagattagcctttagggggggctctttagacatacagaaactcaaaaattattttgtttgtaacttgtggagttgggctagagtgtacatgggagaggagtcctcttcgcttttaatctttttggagtggctagcggctacttaagggccgttgaggctgcttgtttctattgctttttggggtgtggctgcgtttgtatactccctgtatgccttatggcagtttgccctttaatacaatttgtgcttacttataaaaaaaaaatatacaacaacggaaaagaaagagcaagaaaggattcctacaaataatgaattatatacacaaatatacacacaactatatatatacagctgtatacatagttgtataacttccatggttgtatattacaactatatatcttctacaactgtatattatagttgtaataatcttcaacaatttagaatatgccagaatttcacgtgcgttgctgtttccttaggtatcttgctttatgctttagtgtgagagaggaatgataggtatagccatcttcatatgtggttcagttgggcatgcggcacattggggttgatgttctctttgcatgctgctgttgttttacatgtttatccaactgacaatggaacaattgttagaacctgatggtatttacattggagctttgaagtttattatctatgatagtgtcctgtggttgactatccagttcaacaagaccataaagactacgctagaaaatacaaaatgaatcaatgaaaagtagttagtgcctatccatattaggaacaaagtaggtatctgttgctacacaaattatgatgaaatcaaacttacaattcatgctatgaactttggttgacaaggaatatgatgtgaaacaaatgaatcagttaattggttaaattctttgctctaacaatttggcaatggctacgaattaacttattgggcatattcaagaggagtcccttgttgattctaaggccatgtttgtattttttgtctaaagtctcaataaacattagatgttttagcatcgtttttaagttaactcttatttttagatatcttgtcttaatataaaaactcaaaattttaaattttatctgaaatctgaagtttagtgtacacttttgcattaaattgtattcagatttctgacaaattcagatctatttaaacttcaaatagagaacaaacactacctaagttaaaactataaagagacactttagaatctaaaggtattgggttaaacataattgtgctaggagtgaatacgaggaaatggtaaaattaatattgtgagatcccttaaaatggttgtttttgctacttcagtgggagcatcaaatgattttaagcatagaactagagcaggatggttgaaggtgaaagtgcctctaatttgttctataatcattaaacattatttgagataaagaaaagccattatcgatacctagtcgtgccaaagtggggcccctaggaggggtgagtcagacatagtcctaacttgctattttttttgaaccactatcaatacttaagcttggggctttgctcctagtagatagctttcaagctgaaaggaaaagttttatcaagatgctctatagctaccatgcttaatggttcagaatgttggttggcagtgaacatgttcggaaaatgagtgcacgtgaaaagaggatgttatggtagaaatttaaatgtggcacctacattatacaaggggaagtagtataagatggttagtgtccatcaaataccaatgagtacactagtgaggagtgatttgactcaatttcatggcactataaggacaagaggaagactagaaaaaagacaacctctgttgtgaggtgagaaaaaggaagtggctttgattttattgtttgtgtccttggtctatttttagtttctctttaatttcgatcatcatgatctcatccatggtcattctatagtttcctatcaatttcggttatcatgatcttatccatggtcattctttagtttcccatcaattttggtcattgcgaccacgtccttgatctgtcttttaatttcctagtcgacttcggcccttatggccataatattagtttgttctttagttttccattgattttgatttcgtgattgcatccttgctttgtcttcagcttccatcgatattagttattgcaatcgtgtccttggtctgtctttagtttttccatcaatttcgatcattgtgaccgtgttttgagtcttttttatcttttaagtgatttggtcaatgtgaccacatcccaaatttctagttatcctttaggtgatttcggttattgcgactatgtcctgaaagtcttttttattttttagatgattttcgatccttaggaccgcatcatgagtttatgttcagtgattaatatatgcagttgttatcttattcaattaaccttgttccaatttcaatttcttgtgcaagttttccagttaaacgaggaatgagctatagaatttgttattctcttatattctgattaaaaatgaaaaaaattgctactctcttatttgtgccaaccaaccccacaccccccaccaccaccaccaatagtagataatatgtgtgtctttgtcagcaaaatgtatatgtataatcctatgttaccgttttggtgaactattctctgtagtaataccatgtttcaaatgcagtac

SEQ ID NO: 11876 - DNA, 12220 bp, Vitis vinifera
  Intron number 1 from transcript GSVIVT01018345001 (locus G SVIVG01018345001) derived from phytozome v7.0 (chr-ID chr1 5; pos 10742794 to 10755013)
actgcttgtaactgttgtttactccaagcaacgtaatgtagccaatgccaccttttcttttcttgggtttttgaagctttgtttatggaatattcgccttttctgcctatggtctttttgcttgattttagaagctgagaatggaggaaaagaaaagaaaactaaactttgagagggaaaaaaaaatgtaacttaactcaacttagaacatagttgtatctggctcagttaagtggagggttttgatttctcgagtcccaaacaatttaaagactttgactgggtttgttttcttttttcctgcaaattttctcagcaatcaaatggggctgtgtatttcctggaattggacattatgcttggttgctgaaattattgagtttattgcttactcaattataaagtttttgaagaagacaaaaatgagaaatctggacatatttttttggatttgttattctgttctctctggtttcttagaatatgtatgaaaaacaatgaaattaaaaattttcaaatcgcattttgcattattagaaactgagaaaacaaagacttccaattaaattagactgcaaataattgatgggagcctttcatatttttaaaggcttatcttttatctcccctttggtaagttatcattttcacctaacaagcataagcgcattcctcaaaatccctgctttctcctttttggctttggtttcttctggctttctaattcttgagactttattgaagatgatggttttgattacgcatctgtataaggattaactagttcattctttacttggaatgggattttcactattgaaagtaacaaagaaacgaagaacaccatgcattgatgggaagtgaggacccatattgactgtcatgagttcacagcatgtttatttattctcagttgattcatagctggggactgttgatttttgagtttacatatgtatatatatatatatatatatatatatcctatgccaaaataatatgttttgcaggctttattctgtttataagaatttgttttgttctagttgaatactgctcctttgggatcagtgtcttcaagtctcatttttttttcctgcttttaattgctatgcatttcagtctatggcatctagatttacataatacagaggccagattttgagtaagatatgctttaataggaaagaggtgacagtgacctttcttattgtctagctggtgtctttggaaagggtaaaggggcacacagtttaagtggggataaatgggggttccttttcttgatcttgacaaagagagaaaaaggtatcactaagaacatgcttttggtagcagtaaaaatgtcaaatattagggttcaaagagagcttgtgggcaaactagctaaagatagaataataaattgcggttgaacctgattacatttcagttaagtaactatttcaccaataatggtatgccttttgactaaatgtaggaggttcttgagatggcagctgagctagggtgcagggtggggtctttgccctctcagtacttgggcctccctttaggagtccccaatagggcttcttctatgtgggatggtgtggaagagaaggtcaggaggagactggcgctttggaaaagacagtacatctctaaaggggggaggatcactcttataaagagtaccttggctagtatgccaatctaccaaatgtctatattccgtatgcccaagtctgttgctaaaagagtggagaaaactcaaagagatttcctatgggggggtggaaacttggagggaaaagctcacctagttaaatgggatgtggtctgctcagaaaaattcaatggagggctaggattaaggagaatagccactttgaatagagccttgctgggtaagtggatttggaggtttgcttgtgaaaaggataacctttggaaacaagtgatttcaacgaaatatgggcaagaggaatatggttggagggctaagaaggctagtggggcggctggtgtaggggtctggaaggaaattatgaaagaatctgaatggtgttgggaaaatttggcttttctagttgggaaggggtccaaaattaaattttggaaagacagatggtgtaccgaaactccgttgtcccaatgtttctaccacctttttgttcttgcagtgcatagagacgccacgattgaggagatgtgggaccaacattcgggccaaggagattggaatcttgtgtttgtgagggacttcaatgactgggaaatggatatggttggtgatttgctccatactttaaggggtcataggccttccatggaggatgattcagttatatggagaaaaggaagaaatggtcgttacagggttaaagaagcttacaggctgttggacaagcctaattccactgagtttcccgcaaggggaatatgggtggatagggtgccaactaaagtctgtttttttgcttgggaggctacatgggggaaggtgctcactctggataggctccagataagaggggtgcaactcccaaattgctgttttttgtgtggttgtgaagaagagaatgtaaatcatattcttttacactgtatagtgactagagccttatgggatattatttttgggttgatagatattaagtgggtcctcccagaaactgtaaaggagactttaatctcctggaggggctcatttgttgggaagaaaaggaaaaagatttggaaatccattccgttgtgtattttttggacggtttggaaggagaggaataggttagcgtttagggggggtgtggtgaatatccagaggttaaagagttcttttgtttgtaatttatggaattgggccaaagtgtatttaggtgaggagtctttctcccttataggttttttggagtggatagcttccacttgaggggaggtagttctttttggtcctttttctatttttgaggctgtagccgtcttgtatactccctgtatgctttgtggcgattaacctttctaatgcatttcttgtttacttatcaaaaaaaaaaaaaaaaaaaaatacattcaggttattaagccaataaattttgaggtttgaagcatggagaaccattttcctaaccaggtgacattcttagaatgttagtatgattgccacagtgtatgtgtatggagaagctatcaggcaataaaaaacctcaatattagtccatctgggatcatagtttcccagggtgtggttacattggaccatcttcctgttatctttataagaaagaccaacaaaatatttgctaagaccagcaaaatattctgcaccaagattggttaggaacacctgggcatcattgtttgagaaaagcactttcatcattgaactttcttctttaaaatccagagtggctgagtgcagaatctcttggatctttaataaatctcattggtacctatggggctttaactactctgaattgaaatccatctcaattggacgtcaatggaaaggcaatatggggaagtcatatctaaactagcagggactttgatcaagtgtaggggactattaaatgcctcaccatcctacatctaaactaggcatgcctaagaactaaagctttgcaaagaagagacaaactctctccaacggatagaaggggttgatgtggcccctggaatcacattgggcaggtcatgtcttctatgtcaatcaacatgaaaccaaaataagtgttgagaaaagatccaatcaaaaaaaataagtgttgagaaaagaagagaccaattattaatcactattaaataatgatcttaaagatataagatattccataactggtaaagaacaactactccaagaactagggcaagccaaagtttcctcaaagctaggcatgaagtctggcttgtggcatattggaattttcaaagaagattggtgcaaaatcgccatttgtgctctcttataggcactataaatggaacgttatgccatttggattgaggaatgctccatcacaattttaaaatagaagagctccatcttttggcaatctatccagtagaataaacatcgccagcattcaaagaaatcacatgcaaacatgtagttctttcttaatgttgagttccttgctcatggaggagaaatagttctaaagagcgcattgcaaagcaaaagattagtagacatatcagaaagaaggttcagggcagctgataaaaagatgtgatggtctaaaatttccaggaaaaggacaactcatctcctaaagagaagcttctagtgactactggacagatgcactcttggaaagatcaaatgataagagaagtctgtggcttcaaatcaggtcttctttcacaatgagaaaagctagctcatgcaaaagtgaagtatatgtattaatctatgggataagaagttccagttttactcgaaccatatttaattcactactgaaataaaggatttaagggagatttggaatgtcaaccattggatactcctgaaccacatattgtgtagtggacagagtgcctgtctcaatactcctgaaccttaggcaaaatacattcctttttattgcctataataaataaataaataaataaataaataaaaggggaagccaattatcccaactgattacttatcaagggctacccctgaagtaataatgattggtgagaaaatgggcccagcaaatccttcttggaggaatatagacagaacttctagatgaattccataaaagcaggttaactgaatttcaccgaaggaactgcaggatcccaagcagactcttcaaacattgcgaatgggtttcattccctccatgtcttcaaaaagatgggctaacttaaccacagccttggaaatcatgatctgtttttcctagtcaaatttacagatcttgagttcctttatctgttccacgcatagccctgttgccatactgatattcccaaactttcacttggttaggaaacaacttacccacacttcagaaaacttgttgacctgataatgctaaaacatgcattaatcatcttgtactaatttttaaaccataagcattcattggaccaggatagtgtcttccattaatccttgaactacgtgcattcatcataccaagatgctctcttagggaatcctcaactatatcgatatgatgtgcaaccaaatgattcctttgataaatgcagatgcattttgaagtcgtgagggccaatgggccctaagtggaatcatttagtttgacagttatcttttattttactagttttttaatttagtttgaaatcatttttcatgaagtctataagtggcctttagtttgaaatcattgccttttgtgtaaaggagagaggcataattagttggagactcaaactacaagacttcagatggcttctaatctatcttcaaatctcttctcctttgaatcataattttgtttcttgttgagtaaagtcagagaactggtgaaggaagaatgagtattttttttttcttattttcatgtctgccttccactcatgaatgcgtactttttgcttcatggtcctaggaccaagttttggtatgtttttggtgtggagagtcttctttgtaagattttttcttttccccgataattgttcaacttagcaacaaaataagcatgcttgggcagtggaagtatgggaaagcattcaaggttagggacattggaacctaagttttccaaggaggtcccatgatagagagggagttcatgaactctcagttgcagtgtatttactctgctgttgttcataagggtggttatgatggatcattgtgaaaggtttccaagaatggttgtttattcatgacgtcatcctggaagccttttgtctgtttctagataaggaggtgtgggatataactctccatctaaggttgatttcttgttttggagacaacattggagagatgcttatgaccaatcagtttataaaaaagggttttggactattttcaactagtgctgtctgtgcaactagacgaaggagtcaggctaatcatactctctcatctattatttgcaggcagggggtgtggggtgtgggatatagggctctatctaaggttgatttcttgttttggagacaacattgcagagatacttatgaccaataagtttataaaaaatggttttggactattttcgactagtgttgccctagtaccttgattgaatagtgactatcctagtactaccttgaccaagtagtatctaggtgatgcatgttgaagacattgtttgataattgcagctattgtaggatgttaactgctgataaaaaacttagcaacctcatgtggcctccaaatgtaagccctttctaaatcccctgaacccatataagttcttcgaaagatccaaaacccatcaaagtcttggaatcatcaccatgttcaaaaattcagtctctagtttttatgtacacaatctctactacattattctgtaagtctctaggcttccatctagaacatttaccattctattattgagacccaggtctgaaggactcaaaaaaaaaaaaaaaaggctgctagggtttatatttgggctatacaaggatagttatccaacttctacgtctcagtcttatacaagtcatccaaccctctgtctctaatgggattgagcataatgtgccttctagttcttttaaatgcaaaatgaaaaaaattgcagatgcattaatcatggtcattaaagcaatcctgcatagtgatcatgtcattgccatgtagaacctaagtagtaactgctaatggataagcataatcctgcagaatgatcatgtcatttccatgtagaacctaagtagtaactgctaatggatcagcaaaatcatttcaacgatttagaagaaagtgcacttgttgtacattttctagaatctagtttcacccctttttttacagtatctaatacacaaacaccattcaaacccaaatacaagaggaacacactctcattttcatctacattgaagtccttttatgaatagttggatgaaagttggtccctctttatgagttgtgctggttttcgaagcattagacaaaagtaaaactcaattcaactgagaaaatggttttatttggctcagttgagtggagtgtgaaaaagccttgaagtttgatagggtaacaactagagaggggtgaatgggtgtattaaaaaaattcaaaaattataattaacttttccctacgaggagttaaggattattaattctttcaatgaaagtcagtgcaaaaaagataatcaaatataagtaatgaggcacaagaatttttacatggaaaacccccacataaactatggagataaaaaatcacgaagtctaagaccgttaatttaaatccattatatgagatcaagttacacaaatttacttggatgctttaccctaaagacttactctctagtacctataacttgatccacatctgcgagatagcaaccttcgattgctccaatgaatacacttcagccttgctgaagggataaaggttttcaaccaaagattcaaagcttgaatcctttgaatgagagatcatgaatgttatggctcattaggcttactcaatgaaaccctctcaataagttttagatctcttacccttaaggggttatggagaggtatatataggcaactaacccgaagagttttgattttagaagaattttaatcaaatttgtgtgaaaaatctcgacataatcaacatgacggcttaagctaactaaacccaccacttgagcgccttaggcgcttgagtagtgtggagcgcttgagcagtctttagcgcttggcgcttgagtggtcctaccctttttcaaaactttaatctaaggtattttaagttaaaaaacaaactaattctttttatacttcataggagcctaacttgctacaagtcaaacctttttagacgtacctgtgacttccctgttggacaaacaactccttttgatcttcaatggagagcaagtcactatctaaaaggacttctatggtcaagcattaaaaggaacaaaattgtcaacatacagacaatactcaatgccctaacaaagggtttttaattctttggatctcaaagaaaacaacagttttgactaagtttcccttaactttccttgacatttttctcagcaattgaatatctctgcatttctagcattggacattttgcttggttctgcttattaaatatattgcaataattctgttgttgattggatgaatatttaatgaaaaaataatttgatattgcttttgttattttgtactctggtttcattattacaaaccagaaataaaatgtataaaaagcaacaaaattaaaaaaatttaaaaattttcattattaggagcctaaaaagaaagaaagaaagaaaaaaaaaaaaagactgccattcaattttgacttgacagcaaatatttgggcatacttaacaagaccttttattggaaaggcttagcatttatctcctttaaggagaatttatcatttttacctaactatcagaagtccatttttcaaatttgttgctatctccttgtctttggtttctacttgctctgtaaatgttgagactgtatagaagatgatacttttggttgcttatctgtttaatgattactgttttattccttacttgaaagtggagattcatcatttcaagtaaacaatgagtcatacagtatatgcatggaaggatggtgatgacccatattgactatcatgagcttggtgcattacttagttgtggaaatcgagttgatttcttccttaagagattagcatcttcaggttttgtcttttttatgatcttcctacttttagttgctccacttttattctatggtatcaagatcttcataagagagattagatttttgggtagcagggagatctttaagtaacccagaaaatcttgtagaagatatgttctgatggggaaatctctcttggtagatgtggacaatgaccttattgtctagctatatattttccaagtgctatgggtgagacaagtaaggtttacctttcttgattttgcttcacagagaaaggtgtcatcgagcagcaggaaaaaagacattcattaggttccaaagaatgcctttgggctaactagcaaagaatacaataacaaatggtgcttgaccggccatattgcctatcaaaaataaatcaataaatggtggccaacccatattatgttagatgtttatggttatcccatcaataataataatagaccttgtgattagattactcttgtcataatttcaaagcattagaccaataaaccctttgactgccatagtgcattcatggaatagatatctaaaatgaaggatttgagattagtatattcttttttggaaaaatggatactggtttcccagggtgcaattgcattggggccatccaggtatctttataaggggcaccaacaaaatatcccgttcaaaaattgattaggaacaccagagcatcatttgtgtgagaaggaattcagttgatgagcccttgtattggcactaagcctctcagaccatcaataaatctctttggtacctatgggcctttgaccaatgtggcagaaaaataagatactgtgacatgtgactggaagtagttatcagtagttaccagtagcagtcacctgggagattaaaaatagaaggcctctgttctgtgaacctctctcaaagaaaatctctgtcccgagagtggaaatagcttaactaagttttagcatagcaagtagctgtaatagtagcttgtagttgtagtcttgtgatcaatctgtcactaatcactgctctgaatttccttaaagagcaaatgaatgcaggtaaacgcttgttgtgtaagctgttaggaaaagtggttgtccaacgtggtattagagcctcatttggtgggaggtcatgagttcgaaccttactgcatgtttatttcctcaatttagtgagaccaagtgcaagcccaaagaaggttgtcatgattagtttgcctatgggcctatttgtggtcccgcatataaggaagggtgttggggaatataatatacattgtgaatccaaatcctaacagcttaaactttcaagaaaattgtttgtccaagtcttcgtattgttttttagaattcttacactgctaagtgaatttaaagtcctagaccactgaggcagtttgtttcaaacttgacagttgcttagcatttgtttgcagatcatcatttaaaagtgcatggctctgtcacaagctggtgccccaatgtgaaattggttattccaagtaaatatttgcttcttacacttgcaagcaaaaattgtctagcaacgcaaaaattgtctagcaactgtgaactgcctcactttttgaaacatggcatgaatgaatgccaacttatcattcatcaaaagctaaatataagtaactagaatcatgattactcctcacatctcttttaagatatcaaacatttgaccaaatcaatggtatgatacagagttagagggaaagaagtagattggcagtttttttgggtggggaaacccttaaagtttattgattgtagtcatgtgtggcttaatatctgcaaaaatttaagactcctatcattcctcaggtctccaaaaagagtcctgcacatgcaaagaagtacggagatcttgcttgctttgagaaataaaatattctcatcacaaccactacataaagcacaatagaagaatttaatttccccaacctgtgcaaacaccttttttttagcagggtgccaggagactagatggtgatggcatagtaactatgttattgattgtttccttacaaaaggaaaattgcattaataacctattcattttatttctcatataattagtgttactctgatgtctcatttatttgtggaaatactttaaaccctacttgaatcattctcatttttaaggcagcaaacaacatgcattttatataaaaactataggactagaatgaaacaagtttcttctttgcttcagtgatttactaagtaacaatgcacctttctagaggcaccaacttctatgcctgttttatataggcatggaagttttctgaagactgtggcatcaattctgtgagttcgataataatagagacattttaacagcatgacagaaacataatgagtacaaaatattatttgtagaagtgactaaaactgaacaaggattgaacttgtagatgaagattctaaatttattgtcttgaaacactgtccttggggcagcctttgtctcttatatgttaagttcaagtaagaggaggttgaatggcccaagaaaattcttgtgagagtctagtgggctttggtccacttaataccaacaaatcagtctccttgagctgcggaagtgtggtccaactgagatacaaagatgcagagtttcaataaggcctgtttgtaaaaagaacaacaaaattatgcactatgggtatctttcctaactattattcactaggccgcattgccattttttattttttattttttaaattaaagctgtctctttatcctgcggctttcttgtatatgaaagctggaagatgaaggtgcacagattcattttatcaaaatatatatttttcatttcaatggaaagcagcatcttcatcctatagcttcatttcaatggaaagccacacagtgaggttgtagatcccattttgaacaatattttggaaagatgtctatatcatttttttcctctggcaaagagcccattttaactttgaactccaaagaagcaaatcttttttgtggttaacttagcatgtttaaggattctaatatcctgaactccaatttttttaatgctttcatatttgtatttaacaaattgggatttgggaatacaagaattactgtagtagtttggaagtcaggggcaacaggtagagaaggcaagaattctgcttccaaccggaaaaaattcagagggaaagccttgtatgctttaaaaaacagcagcatcgactccaatttgaaattgttccagttattgcatatcctttccttgctttaacaaatgttaaacatatgcctatgtatgcccatgtactgaatttctaatgtgaggtggttatgtgctattctttatgcaggaaacccagcaa

SEQ ID NO: 11877 - DNA, 4184 bp, Vitis vinifera
  Intron number 2 from transcript GSVIVT01021026001 (locus G SVIVG01021026001) derived from phytozome v7.0 (chr-ID chr5 ; pos 15100670 to 15104853 reverse strand)
tctcctcaccttgcaccttccttctcctttggaccgtcaccccataatccctttcctatgtcgtggaataaaagcctaatctacgaccacttcataattatgactaaaagaaaggaaaaataatggggggaaatcagataaaggatttaaaattgatatattaaaagatagtggaagatagatgaaagttatgtttaacaattttgaccaaaacaaactaaataaactagaaatgaagcatcaaaattgttaaattaaaatggtagttacattagtcaaaaatatatttaatatagaaggtgggagcagaatggagaattttgatgatagtctaatgactccaaatcaacttcgcacatcgtgttgaccatcagagtcagaataaacaaagcagatggtcatcttcacgggcgtgggggatctgatcacaattcaattaattaataaaagggcttaatcagtgataagcgagaaaagaaaaccatgaaaccatgtccatatcttgaaaccaggcgtgtcccaaggcaacttggatctcaactactttgaatgccaactaagatgaatgattttgactttggaatttcatattttcaatttttttaattcagtcgtacataacccatgtgtttatttatttctctttttgtttcatttgttgagaatatatgctaatgtccacttgaaatgggtggtatcttaattctccctacgccaataggaggattttgaagaccaagttttttaaaaaataaaataaaaaaaggaaggcaaaatgtgtagcacattcacttaaattttttttttgactagagttgtactcaatttgataaaaacgggtatttatttttttacctttttattaaaattaatttgttttcaaactttatgtttatttttttacttttttatgacttattatatattttttattaaataaaaaactaaaatatttaatttttttctaaataaaaaaaataatatattgattttttttatttattaatatttaatcaaaataaaatattataaaaacaaacatcgtaatacttaatactattaagtattatttaattttaaattctatttaaaattaagtaaaaaaactaccataattaatattaaattattttatcaacatatttaatatacttaataatttaaattaaattattgaattatttaaataacttctctcacatgattattgcaaaggtattggaagaaatataagtaaatatttaatcaaatcatcttctaattgcttattcacgtattgatagttcttttcaattattaagagcacaaataaaattttaggggaataataaaatgtagatgtttaatttatatgtaagaatctccattgtatgttacatgcaaatgataaaattggaaaaataaaatttcaaattatgtaagaaatttgtgatagagcttatttttagactgtctttagtttattatatgggaaattccaactacaaaccaactaggtgaccagcatgatgagacaaaaaagaaaatgaaaccaatcttccttcttaattttgataggttttgtttgattcttgaaaatattaagaaaaaaagtattgaaaaaaaaataattgtttgaatgttataaaaagaaatgataaaaattttactaaggaaaataatagaaaaaaatactaaaaaactttgggcttggtcatgctttctaaaactttttaaaaaaaaaaactatttttgttttttaacttaaaaacaatttttaaaaataagtttcaaaaattatggtccaacgggtttacgttttctttttgttttttaaaaatgatgaaaacaacttgtatttgtttcctaaaaattgttgtctattttattttattttaaaaaattatttccaaataaaaacagtcaaataatgttaaaaaaaaattaaaaactgtttttaaatcacacagtcaaccaaattggctctttattccctaattttttaataatcttttttagtcaactaaatatgagaaaatattttttttttgttacaaaaatttgtgatgtcactatttatcatattaaactttcataattataagaaaaaaatatttattatagtcattataattgtaactttataaatagggctaaggttagtgaaaattaataattccataggttgctttctcttaatctcttctattaattctttgttctcttctattacaatttttccttttttattttattttatctcatacgcaaaatttgaattatattgtattttctcgtaactagctgctatgaaaaataaaatattaatttaatgaactcatataataaaaactatacggagaatatttcataaccaaaaattatgtaaactgtgatgaaataatcaaatcagaaacttataataattgataatttaattttatatagttagaagctatacaaagaattcttcattgcaacaaactatgcaagtcatatttcatatgatcaaataagatgcttataatcattaatattataaatttgtatagccagaagttataatttgtaaaatcatatatggcccaaaggtatgttattgtgtcccaagtgttcatagccaaaaggtatgaaaccaaaaagaagaaaattagtattaataaaaagttattgccctaaattttctcataatcaaatgctatgtaaaattagtattaacttcttgcttatgtttttagaaatattgaactttttatattttatttattagtcatatttatgtcacaattttttattttattaatatttagaataaaatgcaatgaatattatgaaaatagtgtaaattcaattgtacaataatttatttaagttatttatacacgattttgattgaattatgtaatatataattattatatagtgtttcatcttaccaagcttgggtttgttaccgtagatattttgggtaattatcttggattcttaacgctaaaattcatctagatgccaaaactcaaacaactattagggaagaaatggtgtatccttttaggatcgtacaaaggcattaatatttatttgtcattatattgataagggtttaaaaggtaaatacctcatggtaaaagaactctcactttttaaaagacgatataactaccaaaaaaacctcaataccgccttaaacttgttatgagtcatggctagatgcatgtaaggctgaaagatttcaaatttataagcaaattaatataactttgtttttataagaagacatattaaagaaaacatttattgacttttgtacctcgaatatgctcctataatataccatgatgaaaatattgatttttacaaatatattggtaatttgattttttggacatatcgggaaatattagtagatattttggaacaaaatatcagtgaaatagaaattgattaagacttgtgaaagtattgaaaaaaaatttaaaaaaaataatataagaagtaataagggacattttgatgttgttttgttaaataaattgatttatatatataatatgctttgacatccaataataatatttaaaatttaaaaatatattttacagaaatttatctatcttggatgtattcaatgacataaaagaaatggcgatacatatataagaattttttattttaaaatattaataattttatttataaatttatatttaattattataaaaatacacaataattaaaattaattaattcataataaatatacaaaaatatatgttaaataaatattaggatatttgcatttatgaattttatatataatctttgtttataatttaaatatttataaatatatgtccactttcattacaaagagacaacataaaaaatcgatatatatacatgtcaacttgtacttaattatttttctttgctcctactcgaagatatataaatcttacttgaatttatcattagtcaaagtcaatgaggctctatagtccctatttaaggttaaggttaaggttaatgttgtcaaagaagacataattgtacttaatcttatacttaagtcattggaacttccctctcaattttctttactttcacaacatttttccatatcttagttttctcaaactttccgagaatccatggcatgaggcttcattcttgacatcctatgataagcaataaaataatagttt

SEQ ID NO: 11878 - DNA, 9462 bp, Vitis vinifera
  Intron number 1 from transcript GSVIVT01006976001 (locus G SVIVG01006976001) derived from phytozome v7.0 (chr-ID chrU n; pos 29520402 to 29529863)
ctgcattgagagctttgcttcgcggccacactcaggttgcttcacttatttctctacattgcttcctttttacaagtccactggggtattttctttttctttttcccttttggtcattataactaaaacctttatattgggtcgctgatgttattttgatttctaactggtatttccactttcctgggctggtttcatgccattgacagtagtttaatggcattgtggctcaagattcctaatttcaacccagagctcatgttggattctttcttttgttaggcctttcttaatttaatcttttcatttgcctatcaacaaaacaggaaaagaaaagaggcttctgttggattgtattatcattgtaatgtgctgaatgttgaatctgatttcaaaagtagaagaaaaggtttcggtaggatagtgatattggcattttgaacttcatatttgtatgaacaaataaaatggaattcattgatcagcctccttctgttatttttatctttgtaagttatataataaaaaaactgccacatggcaatgcaaacatgttttctaaatcaaatgattttcgttttttatttgaactgctaaagaaattgcatgagtaaccttgctctcaagaaattatgttctgttttaaagaactttaaataaagttatcaaagaaataattttcacataattgtggtgttggctgatgatccctagaccataaagaattgcaaagctagaaacttgaattatgaggatacgtttggaatatgagaagcttagaatttctttgactgtggacatggagtgccatctttactgctggtgattcatgaagtagttcttttggggttctgtgcatctgttccactcaaaatattaaatgaggaaaaaaaaaaaacatctagataatcatattctctttatggagcaaaatgttgagcaaccaatgaaatctgtatgctaagataaatgtaactgaggtgaatatgttgaatttaatgatgggaaaatagagcaagtaacattggaaatgaacacatacgaaaatctacaagtgtttcttgtagcttctaaagttgaaatttgttttcccaccatccctttgttacttatcctgttctatctttcagattcatttgatatctcatatctccactgtggatcacatgggttgggggttttgcaccaaagtttgttgcaattttagcattgattttatcattcttattaataaggccttcattattggcatttttttccctaatagcatgtacttgagattaaatccctagctttacaatggtcattgctatcccttgtgttgtatgagatgcactaaacattgcattttcgttttatggaaaataaaagataaattaaaaacgttaataaaaaaaggggggcacaccttatgtacacaataggaactacctagacaaaaagggagtgcaccaactacaagaacaaactataagccactatccacaatttagatcatcaataaagtccaatagagaagcgcaatccctccccaacaatattccaaactaattcataagagacctaataagggatattcttttagcttaaggtcattgaactctaccccatcgaaggtccttttatttctttccctccacatacaccaaaacaaacaaagaggggccatactcacacctacaccttcctttgccccttgtccgtgcatttttccttccaacccaggatgggctttttcacagattttgaaatacttattgaaacctaaggattgctaacaagatgttctacatttttctggtctttccgcaatggaaaatgacatagtttgttgattcctcactagctttataaagattgcatctattgatcatcaaccatcctctcctcataagaacattgatggctggaatcttctcccacacaacctcccaaggaaaaaaaaaaactaactttcagagagttatagcaagatttggaatgttctcttcttctcctccctccacaataatctatcccatcccaactctagcactcttgccttgtggatgagctctgtgaattgcatcacaactccctagtcccagtcttgaaaatgtcttctaaacaagatgaaccaaaagacttctccctcctttgccacccataagtcaactatggttgcattcctattaaaggcaatcctcaacagctaagggaacacctctttcacatcgcactcacctatccaaccagaatttggttctgaggccacacctaaccagaatagaggtcctagggttgaattcctctcatcctcttctcattgctttccataaacccatatctaaggcttctctcaagtccaaagtacaccaacccttctccacctctccatatttgcattggattatcctccatgggctatcacgctcaagagcatacctccacaagcatttgcctatcaaggctttgttaagaacttccaaactttctaatccccaagctaccattcctcttatctttgcacactattctctagttcatgaggtgcattttcctctcttcagaatgacttctccacaagaaatctctttgatgttttgggaatgaaatacatgggtaggcttgacagtgaactttttatgagggtcaatctttttttttttgataggtaaagaaaattcattaagagccaaaaggctagagaaagggtatacacggagtataccaaatacaaagaagcaaaaaacaaatgaacaaacaagcctgacccttacttggtggctagccagtcaacgaaatctatcaaagacaaaatgtgttcctctatgtatactctaacccaattcacaaaagtgtacaaaaaaatggatttaatatcttgatcgttcctctcaatatcatcgaagacccttctattcctttctttccaaatggtccacatcagacagaggggggcagttctccaagctttctcccttttcttgcccacaaaagaaccatgccaacccaggaggtttctttttacagaggagtgcatcacccattgcaccccaaaaagggagaagatcagaagccataacattctggctttctcgcaaaacagaagaaggtgatctgtggtttcctcctcttgtttacacaaaaataacatctgttgggaatgctccaaccaaatctcttcaggcggtcagtggtgagtagcctgttccaagccgcctcccacccaaagaagctagccctaattggaacccaaggcgtccaaatagttctagccgggaaagggggcttggtgtcccttgaaagtgaactatgaaaagacttgatagaaaaggtcccattcttgttctctttccaccggaacaagtcctccacacctcttctaatggtcaaaggatgaagcttacataataagctttctacttctcccacctcccaatcattaaggtgcctattaaaatgaagttcccagctccccccaacttcgtcttcctcccaagcctcagcgacccagccttctttgttgacggaaagattaaacaagatggggaaagcttcttccagagcttgatttccacaccacaagtccttccaaaatttcactctagtgccatcccctatgatgaagcgggaatgagaacaaaagttctcccaaccatttctgatagccttccaaacccccaccccataacggtctcttactcctttggagcaccatcccccctcttgaaggtcatacttactagagataatttgcttccaaagggactcattctcattagctaatctccacaaccacttcccaagaagggccttgttaaaagtagatagactgcgaatacccaggcctccttcctttttagtagcacaaatagccttccaactcaccaagtggggtttattctctaaggcaccaccgccccataagaaaaaatccctttggatcttttcaagtcttgcgcacaccttcttggggatcacaaagagagaaaggaaataggttgggaggctagagagagtgctttttagcaaggtaagatggccacctttggagaggtattgccttttccagagagacaaccttttcctgaatctttcttccactgcatcccacaccctagtagatttgtaaggggctccaaggggaagacccaagtaggaggtaggtaaactccctatcttacatcccaagaccgacgcaagagtctccataggaatgccttcccccattgggatggcctccgttttgctcagattgacttttaatcctgaaatcgcctcaaaccacatgaaggtccagctaagatattgcaactgatctgcttcggcgtcacagaagattcaggtgtcatcggcaaacaagagatgggacacgagcagcccctctcttcctcttcctcccactctgaaaccagaaataaagcccccatttcttgcacaagacagcaattggctaagggcttccatggcaaaaaggaatagatagggggatagagggtcgccctgtctcaatcccctagagctacgaaagaagcccgaggggcttccattaatgaggattgagaaggtagccgtagagcagcaccaattcatccacttaatccatctatgcccaaatcccatcttagacatcacatccatgagaaagtcccacttgacatgatcaaaagccttctcaatgtccatcttgagaaggaggcccgggttgttgcctttcaatctagaatcaagggcttcattagcgataagaacaacatccaaaatctgtctcccatgaacgaaagcatgctgagaatcagaaatcacttcccccatcactgatttcagtctattggcaaggactttggcaagcaatttgtacacactccctactaggctgattggtctgaaatctcttaggtcttcggtcccctccttcttaggaatgagcaagaggaacgtggagtttaagcttctttggaaagtcccatggaggtagaactttctaaagagacccaaaatctctggtttaataacgtcccaacaaaacaaccagaaagccattgtgaaaccatccgggcctggggctttgtcaccatagaagctgcttagtgctgcaaaaatttcttcctctgaaaacataacttctactcccagctccttgaagttaaggccattaatactaggcctccaatccccagaatctgagagtaaggactggtagaccctacaaacaccttcttttatatcttccaaggaagaaagattcacaccattcactttaatcttagacaggaagttccttcttgccttagcattggccattttgtggaaatatttggtatttttatcgccttcttttaaccagatttctcttgacttttgtctccaagaagtttcttccagcagagcccatttcttatagtcctcaagagccaggtttttggcctccacgtctccaggagtcagagggttctcattctccttggcctcccatcgctgcaggcgggagaaggcctctgctctattaaaagaaacgttgcctaccacctctttgttccagtttttaaggtccttcttaagagctttgagcttctcagcgatgcaatggctgctatagccttcgactgaatagccattccaccagcttcttactaggtctgtgaaaccatctaatttcagccacatattttcgaaacggaaggggcttttgcctgacgagaatccaccagcttctagaactatggggctgtgatcagagaccaagcgagggagagcagattgagtgatggcagagaagtggttctcccaagggtctgagatcaggaaacggtccaatctagaggcagcttgagagttcaaaccccctatccaagtgaaaggacctccagccagtgggaaatccctcagccccagctccccaatcacctctgtaaatctcctcatatccgttgtgagtctaggggcatttcttctttcctctggaaatcttacagcattaaagtccccccctatgcaccaggggtcttcccagagaccacggatggctccaagctcctcccaaaaatcttccttttcactacctatcactggcccgtatactccagagaaaatccaagagaatccatcagcgcagtttctaaagcgaacagagatggagtaccccccgctttctatctctaacttctccaagactctgttatcccagaagagaaggaggcctcctgccgcacccctagcgtccactgaagcccaattgagaaatcttcctactcccacacttttaaccaattgcagagaaacttctttcaccttcgtctccaagaggcaaaccaaatctggtttttgattcctcaccactcccttaatcagttttctttttgcacaatcattaatccctcggacattccaacagagaattttaattctcattaatcaactggaatcaaatcccaggagctatgaccggatcttttggttatcccggatgtctccccataactaacagagcattccaatctttttaactctctttcaaagcgggtggtgcaagattttttcttcttccttctcttgcagagggagttatttccagtcctcagcttcagtttcttaagcaaggccagaatttctacttcatgcccttcaacaggcattcccaagacactactaaaatgaaaaagtttggagagctcctcatctgaccatccttcttcgcatggataagcaaccgacaggtctctctgcttcgccacgtcaatttccggatcagagctcggggcttccgttagaaccactgtcgacccatctctgagcatcatggacaaagggttcggcgtcgcttcctcttcccttgtcgtcgatttccacagactagagcattgacccttacccttctcaagccccgaatcccagaatggagtagaagaagaggatggctcccctcttgaggagatcgggggtagagaaagagtaccttgtggattgcgaggttggacaggagaggaaagctccttcacaggtggcgacgcttgcctttggggtgtcttgcaagcttcgacgaggagggagggctcaatcgctgacgtcgatgcatccaaaaggggcgacgcatgtctctggggaattttgcaagcttcgacggggagggaaggctcagtcgttgacgtcggcgtgtccaaacggggccacgcttccatctggggagattctgcgaaggtgagagccggagcgggggcttctctcctccggctcggcgagcacttagggcttcctcgcccaaagtcattaagatgggttggaccgaggggcttagggggagaccccaaagaggctgagacctgggccttccctagcccaggcccaaaggaagcgccacaagccaggctcgaatgggccagggcgtccatacattggcccgtctccaaatcacaggcaggggacaagggatgccggcccgtctctacttcgtgggcatgggaaggggtagcagctgcacctgtcttgtccgaggtaggggcaccactccccaagaccggcgagggcagcttttcagtctgcggtaggactgtggaagagggccgggagtccacactccctttagcgtgtgaaggggccaccttgtcttccccaatcttccaaacaccagacccgtgggaggggatcacaggggagaagcagggctcttcttcccaccagagttgcagagcaaaacatgagggaccggcaaccacctgcagcgaacttgggtgttgccagcctctggtttcgacgaggactctggcccacttgaggttccgacaatcagcagtgttttcgtccacagccacgaacctcccacaagagtctccaaacttcttgaagagacttctgccccagagatgcagaggaagacctaagattttgacccacacgtggcgcacatcccctctaactcccttaaggcatcccacagatggcttccatttttctaggcagaagcttcttcctctgaagcatctcgaccctgagttaaacaccctctctgcttcgtcctcaaattcaaactccagaagcaagagatttgctctcatatttgacacccagagattcccttccaagaaccatgagttcttcgcccacaacccgaaggaaacggggtccggaagacaatcagagtctccttcccaagagcccacaaggcatctgcccaacaattccttgttcctatccagagtttctttctccatttctagccagatggcatctcgaggcgcggggccatccctaagaggagatgtgtctctgactacactactgctgggcgaagcctgagaaggtaagtggtttttcaacaaagctcctttccattgaaggggagagactcccaaaattctcagtttactagcgagaattttccagcctccaacaaaccctctcccttcaggaaaagccaatgaaaatcttttgttccccgcatctcttacaatgcaaaacaagaatctccctgctctattatttcggagctccagactgtattctctatctccttccgaccatagcttcatgaagggggttctttcctttagcccacaacatgactcaaccccttctagcagcagagataaacctttccctccaaatttgacccatgaagaaaacttagggcctctttcacagatcttaccgctcacttttcctttgtgttcttctatgctaatctcaaaagtcttcaactcaacaccaaaccagcacctaccaccaggggatgttaccggcattgttcatctatgatgaaacaaatattgttcccaatcctttacagagctctttgaccgtccaagctccaactcgtgaaagtcaaaatggttgtacaacatctcagactatgagggtcaatcttcctcccctctataagtattgattcttgttaggggccaatcttctttttcacctctcctcaatcgaatctcatactagcttacacaccaaacctgactggagcttcttttttcgagtctatagtcttcttagtgatcaatgttgcatcaagaatttgttttccctccacaaatacattttgatgctctagcacccctttagcaatcaaccttttcagtctatttgccaaaccttggctatgactttgtagaggctcccagcaaggctaatcggctgaagtcctttgtatcttcattcccttcttttttaggaataagttacttcttttctcactcagaatttgcaaagtgccaagaaaaattcatttggacctggcatttattgcctccaaccctgaaagagaggctaccacctcctccttcctaaggaaagacattctcatcaccaaggattgcataagtccttcatgaatctgtatatttggttcaatttctgtatctgtttgttgtacgcaattgcttgatttaataatttgttgaacatattatattaaaatttgataaatatttactctttctatcatttgtgttcattctttttcttgtgtagagggtaacagac

SEQ ID NO: 11879 - DNA, 6625 bp, Vitis vinifera
  Intron number 5 from transcript GSVIVT01014297001 (locus G SVIVG01014297001) derived from phytozome v7.0 (chr-ID chr1 9; pos 2424250 to 2430874 reverse strand)
gctggcggttctgttgctgacctagtgggttacttttcttgactttcttctacatattaaatgcatgaacctcataaccatttcatttcatggatcagtattaaggaggaataaaacatttctcatttattccccttgtgctaacaatgttatataagccttctatcagatttcttcatgtgataaaatatttctaatactttggtaaaagaatcatcatttggttcgtttaaatgcttattacctgctaaatggattaagatttccgtggaggaatccagtaagctgggaggcagaagttttgcttaagaaaatccttcatagacagtgtcactgatataccagttttaaatggtgtgtttgtcattaagcctcttatctccaaggctctactcctcgaagctatttgcatatcataatatctcttcaaaattttttccccatttagagtttttttttttttttttttggttttttttatatgtttattatttgtttgcattatttgtgctttttatatttgctttgactcatttttactgcaatttttccatgaaaaaaaggaaacaaaaaagaaagaattaggatcaataaaattatgccactttttaaattcagatactaagaacccatttgtttgctttctcttgtctgtttcttgaggacatggaaatggtaaataagccaacaaaaaacatgttgagtgaacgactttttgttttcattatttaaagcagttccaaaaccaagtttcgtaattctttatgccatatttgacattacaactactgcaccatcatcacagccagcagcaacaccactctgcctttgccattgctgccatcacctccaccaatacactgctgctgctgctaccactttcagcaccaccaccgtcactgctgctgcttcatcgcctctgccgaaaatttcctcatactgctgtttccagcagcgctactgctgcttccagcagcgctactgctgcttccagcagcgctactgctgcactctgctgatgccattgtcaccgtcatgctccatcgctgccatcactgagcctaggactaccaccacctccaccactgccaaccgcctcaactgccgttagcacctcctccactaccacccttacaccactagtggcactgctaccttattcccatcatcatttcttacaactctattttccaaaagtctaaatttgatttttttttttttagtgtctgagttttttcttccttttcaatagtggatgagcataaccaccaatcgtatttccgttgcctaaaatgtagaaacaaaatgaagacaacttctttcccattttgtaaaacaaaaaattttgcagaataactaaatacgatcttagttaccaagtatcaatgctcttttgcacttgtcctggtgtataaaagcttcaaatctcaaaaactaatttaagatttcagtttgccatctaggaaccgtgttcttttaaggtttatccatgtcttccaatttatgtttgcttttttttttttttcttttttttgaaaaacctaattcattagtttataggccaagtattcctccaatccttcccaccaacaagcagatgtggtcttggcttgtgagtccaggaggaaagattattacacatggattaataataaaacataatggctattgactggaagcagaagcaaaatcctcataaagaatgaggttaataacgctctgaaaccagaaattgtggagaaatgtggcctttacttctgtgggaagcattagacagtaaaaaaagttcatttgttagtgaaattatgagtttgaaagggggcatcaatggagaaaggcagtggttgataaagatagagaatgctcaaatatcagaatttagatatgattaattcttgctcacatggggagttggggatgattagtaaggggtgatatttcaccaagaaaggcattttgttctagaatacgatgctagtgaacaagatgataccaactaattgtagaagcaacggaacaacttggttttgagacttaaaacggcagtcctgacttttccgttaaaaatttcttttgttgcattccttgtttcatttcctacatttttcatatgtttcttttattattatgaattcagacacgatttctcttattattttgcatgttttcatggttttcggcggcttataacagatataatgttccaattacatttcttgcactccctttctgtaactgtgtgagggctaaatgttgtctgtgttttgatatcactgtctgtggcatatattaagatgcttagcctatgatctctttctatttttctgtaattgtcttgttcagtttgcaattttccattggcattgcatagaaaaatgaaggaacataaaggagaaatggaattggtacagttagtcgtcttgtagacctttttccccagccgccatttttgtcatttcataaaaaattgaaaaccattttccctattgtctccaagaagttctgcctgaccagtttctgcccattaacccagtcaaggtagacacaaatcctattttatgtggtttgattctcttctggtgtgagaatatgtggctcctttaccccagatttaaaaatacagattgtgagtagtggagagtatatcaagctgatgggtggcaaggccttaggcatgtgcaaaaatttctagaagccaaaactttggaataaagtcacttttgcagccacaaaagggacaaagagtctattcttagggatactggaaagtggatactttggaaggttcaggaggtttgtctgaaatctcttagggccaagaggaagttgtagcaaggaaaaattctgctgaaggaagaagtgtcttggagaaaaaaaatctaggataaaataggtgaaggaaggagattgtcactctaaattcttcaatagagtggctaaagatagcagagacccttggtttttattttgtttttgttttttgttttgggaaactttattgaagccataagggccagtggaggattgaggggttaagattggttccctattttcaagcaaagggctagctgattagagcaaccttttataaaagaagaaataaaagaggctgtttttgggtccagatggtttttccttaggtttctttcagggatgtcaggtcagtatgaaaggaatttattggatcttttctctgtttttcataatagcagggttcttaacacaaggatcaacacaaccttcattgcaatggttcctaacaacgcttctgccaatagggttgattattttaggcttattagcttggtcactattctgtacaagatcatggctaaggtgctccctaagcgtctcttggctttgttacaagaaatgattgcatctttgcacggagcttttttggaaacgacaactattggatgtagtattaatagaaaactattttggtgtttgaaaatttcagatttggaggaatggtttcaaaagtaacttcgatgaagcccatgatcatgtagattgagatgaatttcatcttacttagaagtagtcttcactctagttggagatcttggattttggaatgcaacttttttgtgctagtcaatgggtgtgcaaaaggatggattaaggcctcaaaggaaattatatgaggagattgacccagtttctccctttctttttgatatgtaggttgtaggataggggcttgcttgaatattttcaagtgggttgatggcatgttagagtgtgacatctccaatggatgtaaaaaaatgaggagcagtctgatcaaaagctgaaatgttctttccttagtaacaaccctttagcatgctggaggttcctaagagccttaagggaaggttatggggtgggtctttggaaatgatgctggtggaccatgccatattacactcctttatgtacatgtttttggagtgggtcatagtgcatttagggtctagcacgttggctttatttgtctttattgattggttaagctataagtgaggcgagggcgttgttttttgtgtatcactctttttttttgggccttgtatacatcgtgtatgctttaggcgcttttaatacaattgctcttacctataaaataaaatgggttaggttgtacataaaagaaggtttaatgcctatagattggttgggatcatgctaagagagttgttttttgtgttctcttttttgtggcattgccttttggtgcctgttggattcatcctgtgtactttggtatattgcttttttgccatgaaaagaaagggagagacatctacaattcatggatggtgctgatagatatgataagaggatattcatattaggagacttattctattagcctttgcaaggtgcccaggcttaaggtaaatttaagtaaaaacactttatctataattaatatcaacctctattgtctcaataaattagccatagatttaggttgcagtattactgattggactctctctgatctgagtcttcattttcgtggaaattcaatagctcctatgttttgggatctaatcttaggaagcatctttaagagattagatgggtagaagaaggcctacctgtctgttgcaggtaaaagcactcttggtcaatcaaatttaggtcatttccttcttatttccttttagtcttcaagatttcaattaatattgtttctagaattaagaggattcagtggagtttcggttgttgtgatcaggaaaggagagagtttgataggcaggaataatgtctacaggcccaaagttggaggagactaagtattggtaggagttccttgaatgataaagccctcttaggtaagaggttgtggagttttcctatggaaagtgatgctctttggtataaggttattatagtcgtttgaggaagatatttcgtggaaacatcaactcctgcacttccaatttcccaacctctatccgcttatcaggtctagggattccaccatctctattgttttagaccattcttctccttccatgtgatggaatcttgattttcaatgaaatttgaccaaccaagaaggtgaaggtctttcgatgttgttgcattctctgttatctatatatctatcacctttagtggcatatggtagtctagttggttaaggcgaacactgggaagcgtggtccagtaagtggcacatgctcttgggttcaaatcttgccactgatgataccttgaatgtatccgatgcaggttgttgcagggtagtcagcaccatgaggtttaggtcctcatagagagtcctaagggctcaaccataaaaggttcctcagttattttaaaaaaaaaaaaaactatatatccatcacctttgttccggatatcagaattttggtccttgacctctattggtgtttgtccacccatacttaccttttggtttggccaaatctagggaaaccagtcacttttctcctagttaattcatatggaaattcaacacttcatctaagatgagagcctcgcttggcttatggctaataaaagggtcaaagacttatgatctcttacaacaaaggcctcataaagcccttagacctgagtggtgagtgatgtatttgaatagtagtgaatcagtagatcacctcttttctttgctatccagtcgttatggggtagacttttcagagctgctggtttggcatgggggacctcctagagaggtagcagatatgatggctttgctttttgtgggtttgaagaaaatgggaggcatagaacactttactgcatggctaggcttgctttcctgtgggtgatttggttggagagagatgctgtgatcttcaaggatagatggagtttgttggagacagtttagaatgtggtgtactctctctcttccctctgggtattagtagctccaggactctcaggctcctgcttaaatgcaataatcctggattagagagctgcttgttctgagagaaggccacattagtgcattttgaactggttctcccacctcctcttttgagctgtttgaatctcaactttgtcagatgttctgtgagcaatcctggacagataggaattgatggagtatttcgagatcataagagtggagtggttagaggttttcccaatgcctacttggtgctagctttgtaggaacttggcaggtttgacttaggcttacactttgggtttcagcatatcagtgtgaagggtgattcagcaataattattgcttgcatttgtcagaggaagagaggtcctggaaagttggacttcttgttgcataggatttcatatttttcttcaatgctggggatttcctttgtggggtttccatgtttggccaaccagttggcggattctttggctgggcataggactgctagttgagaaattttggtctcttgtttggctgtttttggggactcttttctccctttttcattctgctttgaaggatgactcatccttcccatacttttttaattcatgatgcaatgaaatctttgtttctgttgaaaaaacatgttgtgatgacatttacacttttttggcacaatcccaggtaaatcatttgccttaatagaaaattttattttgcagatccaatctggtcaaccactgg

SEQ ID NO: 11880 - DNA, 2787 bp, Vitis vinifera
  Intron number 2 from transcript GSVIVT01010954001 (locus G SVIVG01010954001) derived from phytozome v7.0 (chr-ID chr7 ; pos 2685290 to 2688076 reverse strand)
tcactggatttgaagaggagaacactgggtcgctggaggatctgaatgaactgttccagaatgtattatttcaggtcaaaaggcccttgacatggactgaatttgggctttcaaggcagggagctttttcagttcttgtttctgttactataggtgttcttatatgcagaaaattttataataatggtttatagccattatatgtacctgagacttttaatatctgagattgctggtgtatttcatgtaactttatttgtgtttcatttcaaagggctgtatctttgatttttcttggaaatgaaagttcttgattgagaggttgtcaatttgattgaaatgtgtggattttttactacacactttttaacaaattcattaaagactaacttctatctgaacttccagattaaagttcagatatgaattttgactgaccttgatccttctagtctccatatgcttggagattttgtgtgttataaatgattgctgctatagttggttgaacctaataaggatgaaacttgcttcaaattgtctaatgtaaacctttatccatgaccactgaaaatctattagcgtttcagtcccaaaatgagtcgtgtccatttcaataaggttattctccccattaaattcagtgtaagcatcaagttctattattttgtatttttaggttcagcgtttgtctgataactaagaatgatcatcttcttctattggctgtttgataaagaacataaagcaagaactattgagtgctaagtgcaatcattagtcatcgtggacctaacagttcagcaaaataattggcttttttaaaggggagagatacgtgagacaacatccattaaagactgcataatgttttaaaatactaagtagtttatcctgtttcagaactttgatctccaatattaaaataatgtcataagtaataagtggtaaaatttcgaattgagtgataatcttatattagcctttggcttcaaaatgttaattattatcttttgtatattatgtttttgcctattatctagcattaggcttaagatgggaattgatatctgactgttaaattttttaattgtagaaatatgttctgaatatctttgttccttcttcttctccttcttcctcttcttcctttttatttatttatttcttgggtgttgaacaaggtgcaagagtacagaatgcagcacctctttttatttttttataagggtcattcattccaataatggccaatatatttctggagttgtattacttttaacatacagttcctggtgttttctgtcaatatctgtaaataaaactcattcataaaatgttcttgaatcatagtttcttttgcaactagcatgcttttgttgtctgttcatcatagctaggtaaatactgttagaactctctttgaatccttatgttcatcatggcttcttatagccttgttttatgtaacctaggtctcaatcggttgaattagttaggatttggtaaccttgatgattagcagttgatcaattggttggtcaatcagtattcaaattatatctagtggctttcaactcttatattgaacgagaaagagttctattttaaatataagtgaagcattatattgtataaattatttttcacgtgtcattcaaccctaattttattgttttgaaaacaggatcagaccggccagtttaaccatcgactgatggccttttcagtccgatctgatgaaatagactgtccagaggttgaacccttgttggacctaatgaatcgatagttcaatcgctgaatcgaacaaactgtctgcaggtttttcacgaaccagtcaattatggtttaaccaaaattccacatgggtttccacaattttctagctcatttctcgcttcattccaagcctgtattctatggcaatttactttctcctgtgatgtgaaggtataaatactacataaatgctttgtagaattgaaacctgggacgtggtttacataatgagttggaggaccaccaacttacaagctatttggtcaatagcatggaaaatatgtatatatttttaaatttttatcatatagaacatttaaataaatatgaatatttatatctaccattattgatataataattattaattataaatataaaaataatataaattaattaatataatagttttaaaaattttaaaataacaaaatacatacacacacacatgtatatatatgcaattaatttaaatattaaatttttatcattgatattataaaaaataagtataaatatattaataatttgaattttattaaatgacatgtgtttaatattaaatgtcaatatattcaaaatgaagaaaaattaattatttaattttaattaattttagaatttttgaaaatattatattatttttttaatattataaatgttttagaaacatatacattttttttatttgcattttaagtgataaagtgcagcctaagtggccatctatgtgttttgcttggttgtaggtcttgagttcaaatccttaaaatcatgaatcctatgtggcatgtggattgctaactcaacaagccatgaatcctacatgggatgcgcattgctaacacaataagacatgtctacaacaccttaaattaaggtatgacacattaaggggtgtttgggttgggcttttacctaatatcaaatcctttaggtgagttttaagcaaggttccaatggaagaatgattcctcttccgcacggtagacccagacaatcttt

SEQ ID NO: 11881 - DNA, 1653 bp, Vitis vinifera
  Intron number 1 from transcript GSVIVT01029126001 (locus G SVIVG01029126001) derived from phytozome v7.0 (chr-ID chr1 1; pos 19329464 to 19331116 reverse strand)
ctatccgggaagcagtgggagttgcgggtatgagaagacttttgtgtgctctttttcaagttttttcttatgtcaaactacaaaattatcatcatccttgcctttccccccttattttcacttatcatcagtcatatcagtaatatcacctcttgcttttagtttctttactacctaaatgttttagtttctttaataacttaaaattggaggttgttatgctagtggaaatgctatagcatatcttggagaagcaataactaagagaaatagttcagaaattaatgtatcatttttctaattttcaaatggagtatgtaaaacattttgttgaagaaaatattcaaggaggcacatctaaaaaaatcaaatattgacaacaattgatttccagtactttctttagaactttatacaaaatgtagatgagtcatatacggaaagaaataaagaatatttgtaacaaaaatatctacaagaagatatcctaaaattaagaaaatcaaacagtatgaataccaaatattgttaatatttaatttttttcagatttatggaaatattgattaggtgtcttcataccatttatgcgcttgattttgtacatttccttgaattttgattctttgtatctccttaaatatttcatttaacatacccctcaagttagaggagtaataaatataaacacctaacttatcccaaaacatggtgaagatgtcattttacaaagatttgataaaaatatgaacaagttgggaatgtatggaaatatagcaagtgaaaagagtgcccataggttctctcgtacaaaatgataattaagctcaacatatttagaacaaacatgaaacataggattatcgagcatgtaaagaacactaacattaacacaaaataattatggtgatttagggagggacactccaatatctcataggagataagtaatctgagtcaactcaattgcatagaaggccaaagatactctgcctcggtgctttggttgtttctttgaacatcaagaggtgcaattggctcaagtaaagacacaataacatgtggtgtagtgggataacctacccaattagcatcactaaacccataaagagatattggacggtgaaatgactgaataccgagtccaagttctatatttggggaagacacattttggcatgcaagtttataactctgtgtattggtaatggaagttgttatttctattacttcatttggaactttatacaaaaatataaatgagttatttatgaaaagaaataaagaatattcctacaaaaatcaaatatattctctagatttatagaaatattgatgggagtgccttcttgccctttacatgcttgattttgggtatctccttgaatatttccttcaacaatttctaagattgccaaattatttttttcatgaccagttttttacatatgaaacatattccaattaaaatgaccattttcttgttgtgatttcaagttactgcaaatacccagttattatttttctcatagaaagcatttttttttgtttgtcattcatcttgatcagtgacgtccgtcaattaatatgaattaatgcagctattcgcctattacagggcaggtgcaagaccaaacccttgatttcatccca

SEQ ID NO: 11882 - DNA, 1789 bp, Vitis vinifera
  Intron number 8 from transcript GSVIVT01033562001 (locus G SVIVG01033562001) derived from phytozome v7.0 (chr-ID chr8 ; pos 19742162 to 19743950 reverse strand)
gcgccttttcgggtaaaacttgtgatccactattctgtgtttaattattgaaattgttttgtcacactcgctcacattttttacaatttatggataaattcacttttttcaaacttatcaagcaggtttaaccacccatccagacctgatgaattttggaagaaccaagcttgcttggtttgttggaccatgctgactgtccaattatgtaaatataaaagacaaatttattttatttttgatgggcaaaaagaggacatgtattaaaagcgccttagagaaggtgaagcaagtacacatgaagtatacaaagaagcccaaaataggcaaaaaggataaaagacaaattttatattgtacattgtgtagtcccataagtgtactggtgttctttttccaaagaaagtatagaatcaatgcgagttgttctagaaaaccaacggatttgctccccccaaagggctaaaagctagggttctttgggtgcccaatgagttatgaagcaaacctgtccccattaatcattcttggtgctttttgatggttgtactattttgtgatgatcagtttcttctgttctattacccctttgaaagagaaagtatgaggattttctaagtgttggagttggccatggatgttatggatggtagtagcagtgttagtttgatctttttttggtctctttgtgctaagaggtttattctatgcttgttcagctgctttggctgtgtttatatcttctctccttcgaacttgtataatttttctttttgtatttctaggacacatttaaatggctgctaatgcttggaagtattaagagttggtgatgtttgactgccattgctaatccattttcatacacgagacaccttattttttattataccttataagcaagatttgaggatgaaatatgcttggggtcttcaccagatttttgatctgatacatgatatttctgatgctggatctgatatgatgatcctatactaaatttgacatgaaactggcttgctaactaagctaagagatggcccattatcttctgactagcataaagataaacatatgactcaggaattaagatccatttttagccttttatcggcatttcttcatcatttactgaatgaactctaggatgcctcttgaatgattcacagccaaaagcaaaattatcctgctaaataatccatacataaattagtaagcatattcatcagagatgtccagttaatgccatttgtggttcctgcttcatataagagactgtcaagtagttgaaggaaattaaattgtactttgaggtggaaactcttctttgccatattcttgttcatctgtctgatgtctcattaattaccatgggaaaaatgccattagagtatctagaggagaaagaccagagttcatgtcagagacggtctgtcttcaatttgcgttgtgacaaaaatgatgttctactaattatagtggagctatattttatatggtctggttcattagtattattttttcctaaaagaggattcttgtgcagttgcttttgaatggaggacctgaatgcataaatcttttcttttcttttcttttttaattgaataaatgccagattctctgatcaaaagaatggtagattcaaataatatcttaccaggacaatgtgcagtagatcatgttatgtattaattactcagtagtagtttctttgggtcaagtttcttaccgaatcgcataataattggcaggggtcgaaagtggaatcctcttcgtcgaaggctcg

SEQ ID NO: 11883 - DNA, 16008 bp, Vitis vinifera
  Intron number 6 from transcript GSVIVT01029827001 (locus G SVIVG01029827001) derived from phytozome v7.0 (chr-ID chr8 ; pos 181668 to 197675 reverse strand)
ctgaactccctcctcagtaagtgatgactatttttgaatgattcccacaaaatttcatccatatagctgagcaataaaataataattcttggttctgtgcagcaaggatactgataattacatctatctgcttgctgagtagaaatatctcattcatgtgagcatgcttctaaaaagtacaatttttggttcatcatttttctttctacatatttattagggaaaaaagaaagagaagaacttcctatatatttcatgccttctctggttttattgaaacaattggtttatttatttcaagcccttacaactatttttttttttatatatgatttcccgtaacataaaatggactactgtcaaaaatgtttttgattttcatttgctcttcaacaatggttctattttacagtactttcagctgtttacaaatattctattgtacaatattgtagcttcacttcctatatgagtgttggtttctttagcttatgatactggttgtagccattcccaaaatgtatggcaacttggctctctaagtcatgtaaatacaatgaaatgcaactagggatgacaacacagatgaatcaatcagggacttgctcatctccacccttattgcaggatatgcaattctgttaatcagactacaatgcctaaatcctggaccctcaatatttggaagtgcaacagtcacaccctgcaccaaggccatctctcatggattatggacggtttttatcatcttcaattcatgcaaaactgtaaatgaaacacctgaaatcctgaaagaatctatatgatgcaaatacacccataatctcaaagttcaaatagcactaaataattttgttcacattataagcttaagatgccacagtagaaccttactatcaatgaaattgaggataaacaattccataaaactataagccatcccaacttagttcccaaatgaaaagttagaggtcatacctccaaagatatctggtgcctttgatgcctgtctgtgtatcgatatttgatggtgtgtgaagttagatgtagttcggaacttgttctattcttattcctcgctttgagcttctacaattgaagccttcacaagcactactttgaacctttttattattagattggaaccttgtaagcaggtttaggagattggtcgagaatacttttccagcatgattacctcctcatcaaagttacatgtagttaaattttgatggatgttgcttatgtatcccaaagcaaataaggattggaggagtgcttaaaaatcgttgcaggtacaataataaaagcatactctaaacctataaaagtggtttttgttatcgagataggaattctagctgtttaaggagggcattgtgcaagctaaaactctgggcctttccaatattctagtagaaggagattccattgtcatttcttgactatataaaaaggaaggaggctcactgagatttcatgggtggcttggccaagtttttgttagattcctagcttagcaattaagtggcaaatttatagcaaaaaggggagcaaaacactgatttcttttgtgggtgatttttggacttcttgaattgtaattagtaaatcttagggttgctcttagacatttttgtttctttcttaagtttacaacttgtattgtttctctatatggagtttttcttttcctttttctttttggtttatttattttattttatttaatagaatcacactgcaccaccttcccctccccctccccctccccccaacaacatagtaagagatattttttaattattttttataagtaagcaattatatattataaatatataaaaaagaaaagaagttatacaccaaggtacacaagacatataatggatagtaaaagacattgtcagaaagagagagcacaaaaacaattactccctccgcatcctacctaatctataaaatcaattaaaggtgttgagccttcttctatgtacatgataacccataacacttgatttatgaggaaagagcactttagtgcttgaattgatgctcctctctttcgaacactcttcgatccattcccttccaaattatcagaaaaaaaatacataagagagttgctctctaaaccttcttgcactttcttcccataaaagagtgatgccaacttaaaaaaaccttcctgattgcaggaggaaggatctgtgcaatgctgaacaaagagaacgaaagctgtcatagtgcccttaccttggcacaatgtaggaaaatgtgatctattgattatgctttgcttttgcaaaggagacatctgttcgccaatgactagcctctcttctaaagctaatccaaagtcaacaccttaccccaattagcttcttatgcaaaaaaacttgcttttgataggagcgatgaattccaaataaataatggcaacagggaaagaaattgcatggcctgactctagaatggaatatgaagatttgacagagtagaccctgttcctagaatccatccttaccactttatccttttcttttctcttcacagaccttccttgtagcattgagaaaaatgtctcaaattatctagtttccaatcactcaaatgtttagttaaacaaggaatccagtgccccctcccttttttcccactcaagcatacaaggagaggaaaaacatacataagggttcattttttgctctatctatcattccaaaacttcaccctcctatttcccacctttaaagatactctatcatcaaccgggtcttctccctttctaatgtttttccatgagcccaaccccaaactcttccctcactttgccaaccacctaacccctcccctcacctccttttccatccttttcatacttttcctaaatgacttttttccaaaaggtttctcctcttgaagcatatctttgactaagagagccttattatccaaaaaaagacatttgagtcttagactcccctttcttttcttctttcaaacaatccatcatttcactagagtgccctctgaatagggatataaaataaatagacaaactagataaggtacttcgaatttggataagcctcccctactttcaaaatatattgccttttccacaacaatgatctacaaaatctttcttccacattgtcctaaattgactctactttgaatggagtgcttaggggaagctccaaatatgtagttggaagctctccaaccctacatcccaattcaatagccaaatcctcattagattgtcattggcaaacaatagatgagacatctcaatttttggccaaaccctatttttccaagaatggataacaaaaactttagttgacatggtcgtgtgccttattaatgccaagcttacaaattacactattggatccactcttcatcatatacttaattgcatcatatgcattacattaagaatctgctttccccaccaaagcattttggaatttggaaactacttttttagccacttttttcaacctattttccatcaccttagccaagagctttcacaagccactcacaaggttgattggtctaaaattttttaggtcattggcacttcttctttatttttatttttattttttaatttttggtaatttacaccataaatctaacattcaactttttttaaaactttccctaatgattttttttttgataagtaaaggatatgcataaaaacggcaaaacgccacaaagtatacagggggaatacaaagtagctaaggcctcaaaaaacaaagagaaaaaaatcacctccctttaagtggatgctatccactctaggaagcctataagggagaacgcctcctcacctacgtacaatttggcccaactccacaaattacaaacaaaaaaattctttaacttctgaacgttcaacacaccccccctaaaagctaatctattcctctccttccacaccgtccaaaaaatacacaacggaatggcgtcccagatctttttccttttctttcccacaaacgagcccctccagctagctaaaacctcctttacagtttctggaaaaacccatttcacatcaactaaaccaaaaacaatatcccatagagctctaaccactgtacaatgtataaggatatgatttacactttcttcctcacatccacataaaaaacaacgatttggaagttgtagtcctcttctttgaagtctatccaaagtaagcaccttcccccacgtcgcctcccacgcgaaaaaagcaactttagttgccacccttgccacccaaatgcttcttgatggaaagcctatgtcatcagacctcgccaacaaactataagcttccttgaccctgaactgaccacttcttccttgcctccacaggactgaatcttcctccaaggagggtttgtgacccctcaatatatggagaaaatcctcaaccaactccaactcccaatcattgaagtccctcaaaaaatttagattccaatttccttgacccgaattttgatcccacatttcctcaaccgttgagttcttttgaaccgccataccaaagaggtgaggaaaacagtgggacagcactgactctgaacaccacacatctgtccaaaatctgatcgtgttgcccttccccactcggaatatcatgttatcccaacaccactccgattctttccaaatctccttccaaacccctactccaaccgccccattagccttctttggcctccaaccaaggccctcctgcccatacttcaccttgatcacttgtttccaaagattatctttgtcacaggcatgcctccatatccacttgccaagtaaagctttgttcaacatagctagcttcctaaggcctagcccacctttatccttgtctgtacataccacctcccatttaaccagatgaattttcccctccatatttccccctccccacaaaaagtccctttgcactttctcaagccttttagtaacgaccttggacattttgaaaatagacatttggtagattggcatgctagccaaagtactttttattaaagtgacttccccctttagaaatatattgctgtttccaaagagctagtctcctcctgactctctcttccaccccatcccacatataaggcgctctattgggggccctaaaggaagacccaagtactgagaaggtaaggaccccaccctgcagcctagctcaacagccaactcctccatctccaccacttctccaactggaatgatttcactcttggctaaattaatccttagacctgaagccgcttcaaaccagaataaaatccaacttaaatgagttagatgatcctttctggcctcacagaatataattgtatcgtcagcaaaaaacaaatgagagatgttcaaagggggtccactaccaccccttaagttaaaccctgatagaaaacccccctccacagctttcctaataagaacatctagcacttccattcccataacaaagagataaggagacaggggatctccttgtctaaggcctttagtgctagggaagaagcctacaggcactccattaaccaacattgaaaatttagctgaggataggcagctccacatccaccccacccacttcgacccaaaacccatcttttgcaacaccttcaacaaaaacttccaattgatactgtcataagctttttctatatccaatttgcatataaggcccttttcttttcgtttttgccacgagtctatcacttcatttgcaattaaggaagcgtcaagaatttatcttctcctcacaaaggcattctgagaggtagagaccacctttccaactactttcttcagtctgttagctagcactttggccaataacttgtaaagcccccccaagagactaataggtctaaagtcaccaaggtccttagccccacttttcttggggatcaaaaccaaaaaagtattgttgaggctcttgaggaaagagctatgttcgtagaagtccttgaacatttctagaatctcctctttaataaagtcccaacaactttgccaaaaagccatagtaaagccatccggactaggggctttatccccattcatctccatcaaagctacatggatttcatcctttgtaaagggcctctccagattctcagcctcttgttggctgatctgatcaaactgaagtctcccaatatccgccttccaccccgtatcttctgagagcaaatttttaaacgcattagcaattccttccctaatttcctgctcctctagaagccattccccattgatcttaattctctccaaagagttatttctacggtgtgcacttgccatgcgatgaaagaaacccgtgtttctatccccctccttcagccatatttcccttgagagctgtctccagtgagtttcctccataatcacccattttctgtaattttcttttgcctctttcttaagctctgtttcctccacagtcataattctctcgttttccttcctatcccagaattccacctgctgcaaggctacggatttgttgcactccagctttccaaagacttctctattccaaactttcagcttctgtttgatttccttcatcttaatagccaatttgtaactagcactgcccctaacatcaattccttgccaccagctgtgcacaagatctttgaatccctcaaccttaagccatatattttcaaatctgaatggagtcgggcctcgtcttatcccaccccccactaacgtaattgggaaatgatcggaaaccggacggggcaacctacattgattaatcccactgaattggtctatccagctaggagacaccacgaacctgtccaatcttgcccaagtctgattattttggcccccattccaagtaaattctcccccctgaagaggaagattcaccaacccaagatcatccacaatttcagcaaatttcctcattgctgagctaattctcctttggctactcctttccctcggaaacaaagtgatattaaaatccccccctaaacaccaagggtcttcccacatccctctaatcgccccaaactcttcccataatgcatccctttccactttggagaaagggccatacactcccgtaaaaacccagatagccccattttctacgttccggaatctgcaagataatgtaaactgtccctcttcccaatctagaatgtccaaagaccttctatcccagcatataaaaatacctcccgaagccccctccgcattcgcagctttccaatctaggaatctcccggagcctaaacttctcgcaatgctatccgacatagaatgaatttttgtctcctgaagacagattaagtccaccctctggttccttatgaacgtcttaataacttttcttttagagctatcatttgctcccctcacattccagctcagaattttcaccttcattggacaatcacaatttggcgccctttgccttgtaccgagcctttctgtttaatccccccctcataatttatggaacattccagtctttttaactccctttcaaacttagacttttccagtagctctttgctatgaattttctcccgtctttttctgattttggtaaaaaaattcaatatttccttctccagcccctccgtagggaagcccaggaactggctgaacttcgccaagccactctcttcccatttgccctccggctcacttctctcaacttgagcatcatatgtgtcaccgaccccttccatccccctgcctttgtcactactacttttgattactcccaattccttacatccattaatcctttcattacaagcctcatacactgttaaccacattgtgttatcagcccgtacttcctcatccaaatccccagaatgatcgtaaaactccccccccggagtccaataaaaaagaatagaattgagatgagaagcccctaaagcccttttcccccaagaacaagaccccgttccatacctcattgattcctcttcaagtccctaaagagtcctaacacttcgttctttccaaaagccttaattgaattaccagaaagccacaggaaaaccatttaggcttaacccttatcctcgttcaagtccaacaaagccctaaacaccacctcctcagtgaaaaaacacctacaatccttcaacctctcgagtgtttaagactttagaagacatcccattgatgctaggtctccacttcttggatcacacaacaaattgtgaaaggcttgaactaacccttcctctatcttctactcctcgtatagctaagccttatgcattttgattttggccaaacaatttcttctcttatgcacattagccatattgtaaaaaagttagcgtttttgtgatgcttctttagccaaatctctcctagagacttcttccaaagaggcccacttgcgatactcttcccttgctatccttttagctttggcttcctcaagagaaagaggtacttccctttccttagattcccaagggcctatttgagtaagagccatctccttcttaactacacattaccaaaaccctctctgctccaaacctttaagttttattttagtgcttagcaagagattgcaacatgtaggtttcaataaagtcaaacatatattataaaatccatttattttacgtgagatagttttgaaacaatgcatataataagacaattcattgtcccaatttctaatatgtaattgaaattttaaggttcaacatgattagttgttggtttaactaaaatgattgatctgaagatgagtgaaattaattattggttaaattattgtttcatctgtatggccaaggaatacaatagtatcacattcgtttgagcatgctgatattttcgtagacatgcttatatttgctcatgtgtatatattttcttgttctattaaaatgatttgtttccttattttttgcccctacaattgggttttatatgatctccctcataaagcaaagtatcatcaaaatgtgtttgatttatactcattattcaacaaaggttccattataataattttagccactttttaagttttttcacatggtattttatcttttgttgtacgcctattgaattctttggatttatgatgcagttgtatctatgcttgaaataagtaggtacttgactctgtaaatcatctaactacacaatctaattaaagaaaagggtcatatgaatacaacataatgcaactaggtttggcaatgggagtggaccaaccacaagcctactttgccttacccttattgggataggatatgggattcttttaattagatacacatactgtgttatatgcatgatattcattttttctttcaataaattggagataatattataaagtgccataaggttgaagcatatagtacacaaggaatatacatgggaaacccaaggagaggcaaaaggaaatgcaagaaaagaagacaggtaaacacaaagaactagaaaaaacaaaaaccaatgaggatagacctagccaacacaacacaatccatccataaactccacattagtatacttgtgggcacttatagacgttgcagtctagaggaatattcagattggatttcccttaagctttaggattgtgccacctactccttcaaaaagcccacactccttccaaaggtagtagaataaacaaaggggaccatttttcactcttctgtttagtctttttgataaatttccatgcaaactagaaggacttccttaaccaacttaggaaggatatacaccactccaaaaagaaataggagaccaaagcatatggcaccgtctgattaatgagaatgtggttggttgactctttaatctttttacacaagatgcacctatttgtcaaaaacaaagccctcttccttgaatagtctaatttgaggatctttcccaagtgcctcacaagcaaaaaagtgccagtttagatcggacaattgggagtcaaattttagaggttggaaatatagttcctttgctactatctaatatgtgaaaaattaatttcattgagaatattctatttctagagagcttccaattatctaagtcaacatctttcctggctacaacagcctcatatggtcactaattcaagcattaagatcgtgaacaatgatgaataaatttggaagcaagttttctaagggctatcctcatgctaactatcaagccaaaatctaatcctcctcccatcacagatagaaaattggatgaatttgaaacatccattgactccctcctaatgggcttcttctcacctccttagtaccaaggattgaaatatcggtttttacggatatatcggtacttcaattttacggatatatcggaaatatcggagaaatatcggtagatattttttcataaatatcggtggagtgaaaattatttaaaattaataggaatgcttgaaaaacttcaaaaaatgataacataagtaagaatacacattttaaagttatcttgtaagtgtaattgatatatatatataattaagaagaaaaatatcgtaaatagagatatattggtagattcgatatttgaattttaaaaataatatatatgaattttgaaagtgtataaagttaaaattgagttaagaaatatgagattgcaatagtccttatactaagaaagatatccatgtagtttcaatatattattagatgaagggagttcatcttgttgaagacagtatttattttaaaaattttaaaatatttttattaaaacatattttattatattttaaatgaaaaattaaattaatttatataaaatatcttatttgagatttaatttttaaaattttattaaaaatatgtgataataactttttctattaatattaatttatttaataataaaaataaaggttgataattaataattatttatatagagagtggaaaattgttctcatgatttttttacatattttattatattttaaatgataaattaaattaatttatataaaatattttatttgagatttaatttttaaaatttattaaaaaatgtgataacaactttttttattaatataaatttatttaataatccaaataaaagttgaaaattaataattatttatagaaaattgttctcatgttttttttttttttttatctcccctaaatctaaaaataaaaaaaaataaaaaaggcacccacttctctctcgggcatcaagaacccttttctgaaggtgtcttccagcgagagaatccctaaaaagccctattttcctctgctactctcaaatctcaatcctcgcaggtactaatctaatcatgttattattttttttttttttgcaacccccgtttgattcccaagaaaatccatccccattcgatttccgggaaaattcatcctcgtttgatttccgagaaaatccattcaaaactcccaaagaaaaccaaaaaaattgcttttcttttgctccctgtgttttctggatctgttttaggggtctctttgctgttgtgccattggatttaaatttcacgaaccctaaatccacgatttttgagccaggctgaaaaacacaactgcgcgggctggactggtaggaaatatcgcgatttttctccgatttttcggtgcttcaccgatatttcgccgatatatcggcgattttgtcgatttttggccgatttttccgtcgatcgataatcggtgccgtttatcgtttccatgccgcccgataaccgatatttcgatgaaatatcggcgacattttccgatttttcaatccatgcttagtactccaatcaccgtccttcaatccatactttcttactgccattttcttccataaattttccctttccattacaaatcttcataatcatttctctaataggccttacaaagcagtgataagatcattgctcctaaacctccctcctttcccacaattgacatagcggaacaaattgattcctgacaaactaagcgcatctccttaaccccctctgggtctccttataaaagttccttctgaagttacttgaaccaatctttgactgatgatgggatggtgaaaaaggacatataaaaaacttgaagactccacaatctgctcttcaagatagataatccaccacattttagtacagtctctttccaggttaccattctgctgttagcctctcaattctaggttccaaactgccttggctttaaacttagctcccaatgtaaggcacaaataagatgaagggaatttacctcttttgcaacctaacactagcagagaatctaaatccccacctggccaactggaattaacccagttctgtccaggttcactgttgaactggaaatgatatcaaagcaatggagaacataatggtaatatcacagttatctggatctatcttacaaagtaccagtatatcatcaggataaagaatgtgggagacaagacctcagtgatcccctcctatatccacattggctattctgctctgaatttccatgacaatgatcaataagaagaaatggggatcctcttgcattgcactgctttgaaaaagattctaacaatggagagacaagacctcagtgaaccaatctaaatgtccccaaaatccatcaggttgagaaggtatgataaaaggttggaattcatgtgatcataaactttttgaatatccagtttgacagcacttttaatatttattttaacattggggctaaaacttttgcaaacaacttgtacatgcctccccactgaagtgattcatctaaggtctcaagtcttttgcactccctctagtcttttgaagtggtccatctaattttcttgtctgaaatgtacctgattaactgaaggatttaagaaacccctgttattcctcgttatggtctcccaattttgtttcaaaaggtcatgtttaattgggtatggacccgactctttatcaccacaaagatccttaaaggatgacaggatctcttctttcccactcatctctccatccaatcttgcatttctattattccatgtaactaaaatttgaactgtgaaatattattctccaaaatctgtggtagaagcgagagatcctcacttgtctcctctttcctgatgcatgatttcctcatctatagagcattgattacaagatggaaaaaaccttttattatgattgccttctttcagtcacatggcccttcaccatatcccaagcctcagtttgcttcatccaccctattgcacctttgtaagatcttctttctccttttattttctttaccaattggaaaggagggtttccaaataaagcataattatcacactgaacttttactcttataagaactgaagccaccacaatcaaatgataatagtaaatgatcagagactagtttgcgaaagaactatggttaacatttaaaaaatggttctcccatcagtggagaaccagagaacaacattctagacattaattgtcctgcctatctagctaagtgaattttacccatgacctaatggaaaatccaacaactcgaactctaaaatcaaattggagaatctattcgtgtctgcttagtttcaagcataattatgtttttccaaggggaaatggattatattgaaatcactccccaatgaccctaaactgctcacagtttcttccataagccgtctcttttactacttaaaaatgaaccataatccctgaaaacagagaaataaagccatcctgattttgaaaatgacaagaaatagtgagagctcccagagccaattcaattttctgtagcaaccctttgcctaaaagattatcctttcatctctgattgctttcaagaaggtccaatgaacaaacctaccctcattaatatatctaatcaaagctaagttaagctgctgattttgtttgcggaatgtcaactagatcagtccaccatttctttcgtaggatttaactattaacatcttaatgtccatcattaaggcctgcatgttctatgacatttttcttttttgataaatatgcaaagagaatatattgaagattttaaaaactatacactaaggtgcacaacttatgtacaaaggacaacaaaaggcatagcttggaggaaaaacacaaaaaactactctcttactcatctagatcccaaacaatgtacaaaaaggtgttgatcctcctgttatgtatatcctaacccatgacaaaaacttctagtgaaggagcccttcaacgattgaactagctactccgcattttcaaatgctcttttgcccctttcattttgaggcaaagcacaaaaaactactcccttcctcatctagatcccacccaatttagaaaatcgattaaaggatgacaacaagctcctaatgaaggtgctcttcaacaatcgaattggctgcttcgcattttcgaatgttttttggctccctgccttccaaattgtccaaaaaatgcataaagaggcaactctctagacctttttgagttttcttcctacaaaggagttatggcaatttaaaagagtttctctgattgaagaaagaacaaagtaagccttccccctttcaaaatatattatcttctccatgttgatggccttcattgaaacctctcctttatcctattccacaccatttttttttcttgaatggggctcccaaagggagactcaagtaagtagatggaaggtcccccaccctacataccaattgggatttaattcactttttacaaggtttattttcaaacctgagttctttgcttttgaagcctcacttgaatctgaagaaaaaacaactcttcttggctctctccaaaagacagctaattgcatcaattgccaacacaaataaattaggagagagagggtctccttggcctattggccaatacctgagctagaagcttatatagcctacccaccaggcttgttggcctaaaatctttcaagtccttggtacctcctttctttggaattaacacaaaatgtagcattctgactttttacatacctcttctggtcataaaactccatacaatggcctaacacttcatctttcacaaaatcctaatagaatgctagagggccaaagagaaaccacaagggcttggagctttatcccccattcaaatccgcgaaggcactgaacagctccttagtgaaaggcacctctaaaccttcaacctctaattgcataaggatttgaatgacatcccattgatgctaggtctccaatcccccagatcagataacaaagtggaaggtttgagctactaccccttccttgatctcattctccttgtggaatcacaccccatcaattttgatcttgccgaagatatgattctaaacttaataaaagagaaggaattctccttttgttgagattcttctgtttctactcttataacctcataattcaccaaggaggttagcctttttcagaccgctatccttcctcgaacttgatctagctctctttctataattagcaatgagtcaatgttttactacctttttcggcatattggagaagtatatttttggctcattctggtttttagtaatgatttccttgatcaagctgctgctgtgagcatcatcatcaatgatatcctttgattaaacatgataatttacaaaggcaccttttcactcatccaaatggaatacttgtctccaatttagagagttaatgaaaacaatatgctgttttttggtcttagtccattgcatataatatgagttggcatggcaaatttatggagaggctgttgcttgtgaagtgtccttcatgtttcatgcttcatgctttttttatgagtgctcaaagctttcactacacattgtttgtttcaatgtgctatgggttcttttatgaaagattcttcttctatcagcccaagaacactgagaaattttttcctgttccatcaggattgggaagaagttaacaaga

SEQ ID NO: 11884 - DNA, 2470 bp, Vitis vinifera
  Intron number 1 from transcript GSVIVT01026734001 (locus G SVIVG01026734001) derived from phytozome v7.0 (chr-ID chr1 5; pos 5844222 to 5846691 reverse strand)
gaacaggtatgaatggagtaattcccctaactaattctttctactcttaatatcatcttttccttggctctataaatatagtaaatactactttaatcttatttgtcttaaaggttatttggggttattctacttaaaatgtctttatctttaacatttttgttaataacatttcccttataaacatttttaaaaagaatcacttcgtgtttggatataaactaaaaaaaaatgttttcatagtattgttttatataacagcaaaatgatttttttttttattttatgaagttattgtccaggaatcatcacttcatattttttaccactttcaaaattttgtcaaacacctaatttttataagaaatgttttcaagcattatgaagtattattaacacctttcaaaatcactcccaaaaaaaattcttaatttattttgtatgaagaaaagacacaaaacaagcctatagaattttcattttattcaagtctaaaagaacatgtttaatttcttaatataagcaaactgtcttaatattgtttgttgccttggtgacatcatcactctttcatattttgatttcttaacatgtttaagaagtcatgaggctttcttgtgacttgagaagtaaaaagtgtttgccaaaaaattcatagatatatatatacacacattagttaattcaggtgcaaaactacaaagagaaactagcattatagttgaagctagaggttaggatatcaagttagaatagttagataaaaaaaatttgatacttaaggtttcatttagatacactttctttatttatttgtttttcaagcaaaagataatagcacattctatataaaatataggaactcttatacaaaaagtatgaacttactttatgttctttaaaattttaaaatttgagaaagtaaaaattttttaatacctcaattttttagaaactattatcctttcaaggtaagtctttaacaattgttacatcttatatgggagatactattattttttaaacaacacattgattatttaagaaatattggaaggttcacgttattgtgttttggcaaaaaaatttgaaggcccaagttggtgcaacaactataaagcacttgtcaaaaagtttatgtatgtatgtttaaccaaatccaaaggtagagagcaaggagtccagtattgtgattaaaaaactaatttagaatagacataagagctaatctttaatttaacttggttaaataatcaagttagaataatttgagcaagaaatgtgataagttcattgaataaccacattagctttgataaaaagatatcttacaagttggaattgttctagaattggggtttgagccctactttagcaagctagaaaattcaacaaatttttttttaacttttatttgctaagctagagtttgagggagaggcctaagttatcatcacatgtttgaagatatatgattcttgaattttcaaaattgtttgagatttaatatagatttgaactactgtgagatattgaatggggatatttacctattatggacaatgttctcattttcttttggtttgtagattaagaagtctaattggataaaaaataaataaataaattcttgctaaaacctaaagagtgaaggatattgtgttgggtttagtaaagtatcaatttagctagtcccaaatagaaaaaataaaaagaaaaaaaggaatatgtcctatttccatttcaatctaaaaaattattttttgatagtgcaaacatcatttaagggcaaaaggtaatgtaagaattctcaattgtgtagtcttttatcatctttgattttgttaacaaaaacatagagcatttagcaaaaaataatttaaatggtcatgtaatgacctcatcccatcctaagctcagagattaattctaatatcttttgtgacaatttgttcttgttatgtaaatattatccactttggtcctaatgagctctcagagcattaaaaatcatctatctagttaagagaaatccaccataaagttatagaaactttttctatctaatataggatattactggtcatgacaatatttttcctttttttaaaagttaaaggtagacaattatttgaagttctacaccaagattctacatagagggtctcatttttatatagaagaactagttaatacttaaggcaatttataatctttatcaatattgttacctaaatgtaatttaagaatatgcattaaataaataatatcactttcagagaatacaaggataatatgaaacattagtttgatctagcattctatgattcaccctccaatccaaattaattttcgttctaattatgttaaccttcatcattgtaattttcatctttcctatctaatatgaggctctttgtttgcaaaatgcttagggttataaagaggaagaatctgaaaaattggattc

SEQ ID NO: 11885 - DNA, 2216 bp, Vitis vinifera
  Intron number 9 from transcript GSVIVT01017154001 (locus G SVIVG01017154001) derived from phytozome v7.0 (chr-ID chr9 ; pos 4783163 to 4785378)
ttggacaggaatatcgttggtcatctgctgttaaggtttactccccccttatgctccctcatggatcctttacctttttgactttcttttgtctagaaaatttttatgcagcttgatgcgcgggcaatgtgaagaaaatgttctcaagaactaactaatagatgagctgctctcctgagggtgtgagggtgctacgaagtgcacgactttagttattgagacaaattctatgttacgtgctctcatgaagatatggatgagtcttatcaattcatgtatacataaatatagggatgacaatatggttaaatatgattactagaaagctttgatggttgggttggtgttgagctactttcaaatgaggggagaaataatctatctcaaatgacatggtttaagttcaaactgtttaaacttcattgacctttctaaatatgttgtaaaagattttattttagcaatggtatgtcattaaactttcaggctattttttggagttggagatatgcctctaaaagagaagctttttggaaataggttattcaaagaaaatatggagagggagaaggggttggagtttatgcattgtgaaaggtgggtatgaggttgggttatggaaagtaatgagaaaggggtgggaccttttcagcagtagagcatcctttgagcttttgggactgcattagaatgtctattggggatttttccttgttattgttagactttgtgaattgattaggctctgtgttgggcattgttgcttgtttttgtgcctttgtgctgtttttttggggcccttttggcttctatgtatacattgtgcataccttcatgctttttcttttgttgataatacaatattccctccttttttttttttttgatggataagaatattaatatattaaaaaggaatgccaaaagagcgactgatggtataccgaatattcataccaacagaaaaatgatacaacatcctttgaggtgggtgatgggtggaaggtgaagttttgggagggtagatggtgtggggaggaacccttatatgtgtattttcaaatttgtgtatgcttaagttttgtataaagagtcttgggtataggatatttaggaagagtgaggggacgggtgaaattggaatccttgtttcactagacacttgatcatttgggagctgggcgatctagatattttttttctcaagattgctaggaaaatctgtgacgaaggaatagaaggataaggtggtgttgatggactcaaggaatggtgtctttttggtcaaatctctatattctatggtggaattaggatgctcatttcttttcttggagagcattatttggacttgtgggtcatgtctaaagggagggtttttttttttttttggtgtgttcttgggaagctagtttgggcgtaggtattgacctgagatcaactttagagacgaggatagtcattggccaacatatgttacctatgtaaaagcaaagtggaatcaatttatcaaattttacttcattgtttcaaagccaatgtgttatgatagcttatgtcctctttattggtgtcctatgggtcctttgttctttggttagggagactctcttaagttagcataactttcttttttttttttgataggtgaaaaaggatatatattagttagcatgacttatttatgggaagaaaatgcaagaaggtttagagagccatcccgttgttattttttggacaatttggaaggaaacgaacagaaaaacatttaaaaacgcagagcaaccagttcaatcgttgaagacctccttcttgagaggcttgttgtcatgggttaggatgtgcataagagaaggactaatgcctttagttgattttgtagattgggtgtgatctagatgagggagggcatcactttttgttttccctcctccaagctatggcttttgatatcctttgtacatgacttgtataccttggtgtatagtttttagttataaatatattctttataattcttacttatcaaaaaaaaaaaagttctttataattctctttgcttacttgtcaaaaaaagaaaaaagatatttatcgttattagtattatgtgtagtttctttgagcaatataatgaactctttaagacttacactttattttctgtttttcttttccttctagagaataccgcttgattttctacaaggtgaaaaatt

SEQ ID NO: 11886 - DNA, 9577 bp, Vitis vinifera
  Intron number 9 from transcript GSVIVT01020924001 (locus G SVIVG01020924001) derived from phytozome v7.0 (chr-ID chr5 ; pos 17074712 to 17084288)
aaaccgagtcttgagcttcattgctaaacctgcaggtcagtcagctacttttgggaatggagctttcactctgaatttagaggctgttcagcaaattttaagtcttataatatagcatgcatatctgactattatcttgtaaattagtgttcaaatgatttttttcatgtgtatcttagttattaaaggctaaaagcacccttacaagtgtgcctcttggaacctaggaaatcatccttgcctacgaaagtaaactgccacacagataaaagaacccttacataattaaatgagtaacaggataaattatctccaagcaatcaactccataatatgcatatatgcttttgccactaaaatatgcctcaagatgttccatagaaccatcatgaaagtactttataatttgtagctaaagataatcgactacattcttttcaaagacaatgaagtaagctccctagtttgattcttgtgaatagcactcacttcctcatttatgtaactaaagataatcgactacattcttttcaaagacaatgaagacgttccaagtttgtttacctcgatttagttcaattggtaaatcattaggaacaaaaaagggatgataaagggaaagtagcttttgggtaacttgtggatttcttgatcactgctagacctataatgcagacttgggaggtggggctggtggaatgtgaagaattagacgatgagtgcttcccctcgtgagtagacgtgagatctatgacttatttttagcaaatgatgaaaacaatggagtaattgttgaaaaattcaacatctgcacttgtaaagtgtcttgaaggctcatgaaaatacctaaagaaaaacaattatgaggaaaaagtttgttatggctgggatcctcattatgaacaacagcaacacaatcaaatatgtgcaaagtgagttgaaaaggtgagaaacttgaaaataaaagggaaaacagagtctaattattcatgacaatggagggcaaacgtttaatgtggtggcatgttataagaacaacattatcccaaaaatgatagcgtatgatcaatatttagtaaatgattatgctttcacttagaaatgccattttattgagaggtgtgggcacaactagtttggtgaacagtgccaagattaacccagtgcacaccaaaaagggaatagatcaagttccacaacattttagccttgccacaaaacagaagaaggtgattagtagattcctcctcttctttgcacaagtaacacctattcaggatattccatctcgtccttttctgctggtcaagagtcaaaattttgctgcatgatgcttcctaggcaaaaaaactcaccctcactggagcccatgacctccaaataatactacacggaaaaagatcactagaagcccttgtgtaggagcaataaagggatgcaactgaaaatttgccattcttgctttctctttgactcaaaatgtcctccatttctcttctcatagccaagggttatagttttcgaaacaaagtctccacttctcccaactcccatctctcaatcattaagatgtcttgaaaagtgagggctccaactaccaatcgccaccctcccatgcttctaacacccaatcttctttatttactgccaatagacgtaagttagggaaaacttttttcaaagtttggttctcgcaccacaagtctttccaaaacttaactcttctcacattcccaactataaagaataaagaggaatctacttcttataccctcccattcatttctaattgcttttcacacaccccaacaccataacctcctttcacttctcttgaacaccaccccccttcctttactccaaacttcccaatgatgatttgtttccaaaggggctccctctcttttgcaaatctccaactccactttccaagcaaagctttgtttagggccacaagactacaaattctaaggcctccctccttatcttcacgaactaaattccaattcactaaatgaggctttttctctagggcatcgtcacctcataaaaaattcctttggattttttcgagtcttgaactcacctttctaagaataacaaaaagagacatgaaataaatcgggggacttgataaggtgcttttgatcaaggtaagcctcccacccatagagaggtattgccttttccacattgttaaatctttttcggaatctctcttcgatcgcatcccacatcctggaagatttaaaagaggcacccgaaggaagacccaagtaggaagtgggtagcttatctactctacaccctaacattgaagcaacatcctccagtgtctctaccgcccatcctgcaagaataaccttactttctctatattcacttttaacctagagaatgcctcaaaccacataaacacccaactcagatatctcaattgatcactgttggccttgcaaaagatttgtgtgttgtcagtaaacaaaagatgggacacatccacccctcttcattgctttttcccaccttaaatctagagatgaagctgccacatctggctttgaataacgactaagagcctccatggccaaaatgaatagataggaggataatggctcaccttgcctcaagcccctagagttgcggaaaaagcttgaaggagttttgttgatgagaatagaaaagcttgttatggaaatacaccattttatccaacttatccacgtgtgcccaaaccccattttagtcatgactgacagaaggaaatcccagttgacatgatcttaagctttttcaatgtccatttttaaaagaaggtcgggtctattgctctttaacctagaattaactgcctcactagcaatgagcattgcgttcaaatatgtttgccttgagaaaaggcatgctgagtatctgaaaccaccttccccactactgttttaagcctgtttgccaatactttggcaagcaacttgtataaaccgcctaccaaattgattggtttaaagtctttcaaatctttagctccccctttctttggaatcaaaataagaaaagtggaatttaagcttctttgaaaagtgtcatgaaggaagaactctccaaagaaagccataatctctgatttggtaaaatcccaacaaaaatgctaaaaagccatggtaaaattgtatggacctagagctttatcatcagaaagactacttagggcttcaaaaacttcctctgaaaccaacaccactagacttttggacctatcttcccccaatgctttgaagtgtaaaccccttatgctcagtctccagtcccctgtttccgagagaagagtatgataagtcctacacaccccaaccttaatctcttcatcaacaatcaaagtaacctcatcgactctcactttagttaacaagttccttcttgcacaagcatcggccaatcgcttgaatctcgagacgttctttgaaccaatcataggccaactactggattttcgacaggcgaggtcatatcttgtgaaaaaacttggtgttcttgtctccttcccttaaccagatttccctagatttttgtctccatgaattttcttctaataaagcccacttcttataatcctctaaggcccccctctagcctttgtctcttcaagagaaagagggtgttctctctccttaaattcccaaaagtgaatgcgagaaaaggcttttggtttgttagaggagacattgccaaaaacttctttgttccacattccaagatccttcttaagagcctttaatttctcagcaaggcaatgacggctagtactagtaataatatacccagtccactagtttctcatgagctcttagaatccatcagttataagccacatattctcaaatctaaaaaggatctcatctttttgaccccttcaccctcgagaataatgagacaatggtcaaaagagagcctaggaaggacaaaatgagaaatacctgaaaaatggtcctcccactcatcaaagactaagaagcagtccaaccttgaagctgcctgagaatttaaacctccacaccacgaaaacagatctccagaaagcggaaggttcttcaacctcaactcctctataacatttgagaacctcttcatatatgccatgaatttgaattattccttctttcccttggaaatctaatagagttgaaatcccctcctatgcatcagggatcatcccacaaacctctaatagctcccagttcatgacaaaaatcctctttctccctccttaacattggtccatacacttctatgaacagctaaacaaaaccatcttcaacatttctaaagcaacttgaaatggagaaccctccacactccaactccatcaggtccaaaactctattgtcccaaaaaatcaaaatgtctcttggctctcctctggcatcgattgcaccccaattcaaaaaccttccaacacccaagcttcttaccatttgtaaagacatctcttgcaccttagtcttaagaaggcaaaccaggtctgccttttggggcctaaccactaacttaatcaacttccttttctcgccatcattgagcccacttacattcccgaaaaggatcttaatcttcatcaattgactagaaccaactcccaattgttcttgtcgctccttctaaacaaaagagaagaacctccacaactgactgaataactcaatctccttagctccctttcaaaaagagaggaggacaaaggtatcttcttctgccctttacttggggtcccatgtctaagtttcttccttaatttcctcaacaaagcccaaatttcctcttcaaacccctcgattggcattcccaaaaatttgctaaattctgcttgcttggtaaagtcattgtctaaaagtgaatcctcacaatccagaccattgaaacccccctcttgatttgaggctgaagcaccgttatcctccaacacaaccccactctcttgaatgagagaaattttatgggaagatagctgctgaactgtcatgaaaaaccattggtagaggccctttcacagcgtgagacacattttccgacactttccctcccaacttagaaaaacctttccctcccagctcattacccatagtctctctatggtttcctccctgatcagagtttttcacaacccagaaaggagtagaagaggaaggcctttccccccaagagaattgagtccaagaaagcattccttggaacctgagagctttgtctaaaatagctttgtcggctacaggctttgtcatcgcctccgagaaggacgactttaatgcacaaggatatgaagcttctacgttctctaacgcgatcaacaagttgctaaggctccaacaacttttatcttttctggaaagaatgaaaggagtagacccaaaggcaaaagccttaagacccttctccactccctttttaaagtgcacttgactcacttccaaaggaacttgggccttatttaacataggccttatgaacctccaacctctaggaagcccaaattgacccatgacccattagataggccaaagtcctcatcaaccgccccactaggctcacacccaatgatgtaaggggagggatgggtttctgcaaacccattagtccccatcgtttcatggacaatacctcctcttccttttgcaaagcacgagtctaacaaggattcttgggcttccacctatttagaaagtctaccttcccctctcaatttggcacgtgacttaacctcaccctcttttccttccaacctttctctgcaacaccgagaaggctacacctcactcttccatgcaaaaatctcccaccacaattgaattgcaaagcaagaggatcccatcaccacttgcaaagaactaggaaacttccactctctaatcccaacgagaattttggcccatttcaaattccgacgctttgccatgtcctccttgaccaccacaaacctcccacaagccaagtaaagtttcctttcaacttccaattgacttgagcctagttccttagagagatgaagtctaggagctagtcagaaagtccctcccccccccctcccccctctcgtcttcccacaagacttttgttcaagacttactcatttttttgatcacctcattttcaatttcaatccacacaacattataatgttcagaagagccaaaggtcacattgcctttgctatcgagcccttattccaatcgtcactcccactaggaaccaacaccttcctagaggtagctttgggctcctccgctcttctttttcgggaaacaccaaggcttcttaacttgctggataggattttccaccctgctacgaatcctctttcttcaggaaacaccaaggagaacctctttccttccacatcccagacagtacaaaacaaatactgctttactttgttagtaagtgactccaacaagtatcgtctccccatctttaagaacattgcaggtctcaaccccttccactagcaaatccaagcccttaccactgaatctaatttgtgatgagaagtttggacccttttcgtaaatcttgctaatcaccttccctttggtttcctcgattgaaagctcaaaggcctttgattcaacattgaaccaacacttacctccaagagaaaccaccaacattgtctcacttttcctattgattaacctaattataactatgaaatatttaattcatatttgactcatttaaatttgttttcaaataaataggtcaattgagtcataaatatgtttggttgaggcattaatcatataaacttatgcaagatctaacttaagttgattattaaatgggttacacgatctgttatctgtttaataattatgtagtatttaagtttatgtttttgatatgattattatttgtatcgggtttgggttggcctatgtaatagaatacctaggctttgacacgacacgaatacaacccaccaacatgaatacgacccaccaacacgaattgccacccctacttgtgattgattgtgtacactctagtgcattatccgctcaaatacctttgatgtcatttaccaaattgagcaagaattcattgtagaatatagagaaaacatgagttaataatataggtcactttttcattaagaataatcttgtcattcaagggaaatcatcaacaaatataatatgacaaagtaaagaaattcattcaaattggagtttgaggttaaccccaaatatatgtgttgaccacattaaaagattcagatctatgactatgactactttttatgaaggaacaaggatgatgcttcacaagctttacgttctaaacaagacacatgactcaacatgagcacaactcaagacaactttgttaaaggtggatggctcaaatgaaaatgacattaaagagtagggatagtaacactcgatatggatgaaagaggtttatcaagatctggataatataatccgtcttcctcatgccatgaaccaatcatcctctttgtcctgaggtcctgaaaaacacatgaatggagagaaaaagttaagagaaaaagttatatgagacaatttaaggcttttgagtatcaaatgtaaacaagagaaggatttcatcttgcagaatagagtggccaaagaatcttgtgttaaaagttttgtcacagtgaagcttcatggtagaggagagaacttggaatctgggaagtggtttgccttaaatggagagatgaatcgaaaatatacatatagggttttggtaagccttagttgggcaaagacagagaaaaagacctagagttttcaaagtcagggagaggctcaaaggagattgtgcaatacatagagaccgagcagagattgcatgatgaggaaaagtaatcacatgaaagaaaacggaattgctagaggctgaaagggatatgtctttttttgatgttaaaaatgttctgatgttttgctgaaaaacatgaccactgtaatggtccatccaatggtaaaaagtgccccatctcttggtaagacttgaaagaaaaaacaatataactgaaagatgagtctttggtacatgttgaaccaggtccaatgcgtgcgccttgagctgaaaaaaaggctcctttcacctgaaccaaagttaagtgccgcttgtgtacctctctgcatcttgcccgtgacatgtgcctcattgtgtcttgcccatgacatgtgcctcattgcgtcttgcccatgacatgtgccttgtgtcttgccctgacatgtgccctgacatgtgccttgttgtgtcttgccctgacatgcgccttgctgggtcttgccctaaaaacaatataactgaaagatgagtctttggtacatgttgaaccaggtccaatgcgtgcgccttgagctgaaaaaaggctcctttcacctgaaccaaagttaagtgccgctcgtgtctctctgcactttgcctgtgacatgtgcctcattgcgtcttgcccatgacatgtgcctcattgcttcttgcccatgacatgtgcctcattgcgtcttgcccatgacatgtgccttgtgtcttgccctgacatgtgccttgttgcgtcttgccctgacatgcgccttgctgggtcttgccctgacatgtgccttgctgcaccttgccctgacatgtgccttgctgcaccttgccctgacatgtgccttgctgcaccttgcccctgacatgagccttgctgtgccttgcccctgagatggacctcgttgcgccttgtccctgagatgcaccttgctgtgccttgcccctgagatgcaccttgctgcaccttgcccctgagatgcaccttgcccctgaagtgcgcctcgcagcaccttgcccctgatatgtgctttgctgcgccttacacctgaatgtgcttctctgagccttgctcctgaatgtgcttttctgcgccttgcacttgatattgccacacgcctgacactgccctctgtgccttgtggctgacatgcgcctcaatgtgccttgtgatttcccctttcctatctcctcccttcccatgttgatgctaaataaaggcactggaacctttaactggaactgttattcatttagtgccttttttatttatttttttggtttttttgataggtgatgctcttttgtcttttcctttttgctatcacatgcaattgaaccttaaacgacccctgtaactacccctactccttgccacttaatctaggccttgaggaccacttagtgcatccttttcttttggaccaaagaaaacatatttggtggctgctttaattgttctgcatttttgcattgtttctcttcacaagttgtatatatttaaattttctttttaccaattatgcccttgatagagacttaacaagaaaattatccctgttgtggagttaatcagatgccaagtatccttctaatgttacattttgattcccataaacaagataaatgttgattgtggatttatttctagagaacatgcttgtctgccaagtccatgtaattttttcaatgatgttgcatctcttaatagttttccactcatccacaggtctaggat

SEQ ID NO: 11887 - DNA, 12797 bp, Vitis vinifera
  Intron number 6 from transcript GSVIVT01008372001 (locus G SVIVG01008372001) derived from phytozome v7.0 (chr-ID chr1 7; pos 2729909 to 2742705)
ggatcaagacccccacctaggcctactattaacaggtaaaggatattatttggaattcagttaattactatgtaaacactgttctataatagttttgaacttctgtagacttccatgagcagccatgaattaagtcaagtttagaaaaatatgtagttcagtattttaagatctaattttaaattgggtcaaaattggcaagaatgaaattgaaatactttgtggaggtccacttagtttttgcattggtatgctggagtctggactcagctatctgacttgtataatttagagttgttccttaattggtttcaagacacagaatttatggtataaaggatgtgtttttgtgttgccatatttttagtagatttttggatgggttgggcttggataagggagcatcttcttagctctttcttcttttattctattttcatcctcatgggtgctctatgatacttcctgtgtgtgtgggttgccctcccttttattaggggctctttgatcaaatttctttgtctgtgtgtacgtgtgtagatagataggtagatacatagaagacaatgtaggtttgggatattaactaatagttttggagtttgcatcatctctgatgcagaacagcacttaaatgcagaataatgttgtctactatctttcaattagtgggctaaaggtctggaaaggtaatgtttttagttgttcttattttattttagcagtgctattttttgtccaatggtaaaaattgcttcaatggtcatcttaatttttttttttttccgatttcttaattgtgttttaattttttttcttccctataattggattgattttcaccacaccacatacttctttctcttctttctttttctcattattcaaattttcttcacaatctttcttcaatacccttggaaaaaaatggaagataacattgtttgagatggaggaaattatctacatgagagtggtggtttgtagatggaagataaaatttgacattacaattgtagcatttgcactggagagcaattgctagtaccaaagaataacattgacattgttattttagcattttgagttagagatgctcttaggttgttagtaaggtcttgattgaaatgatttcttagtgtcaagagaaaaggtctctagagtttctagactgtaactgatatagggttttggtgatgtgctaaaagtatgaataggtttagggttgtaaaaatagtatatttcaaggaacttgatctggtgcatacctcctgtgtttttgcatgaagagacttgttctctctctctcttcctctagaaaaataagttttggatatgatacattctccaaaattttttggttagtataatagaaacataggaagctaattaaagctaacataataccaaggattaaattgaaagcaatctcatatagttacgaaggaattgttagggaatttattgacctgaattgtgtagagattgtcaacccttataattgattttgcaccctttgaaattgttcccactgtgttagctatcggtatactaagatactcgatatgtttcttatgagaaatggtagttattgttgatgtgtatcttgttttgattatggataactttccgaactggttatagactcattgcttacaggataaaaaactccttgttcatgtgtatctcattttgattatggataactttacaaactggttgtagactcatagtttacaggattgaaaactccttattgaagatccctaatgcacaatgtcactttggctaacctaatcatgtaaaagtgtcaagaagctcaatggttataaaataataagaaacttagggacaaaatagtaaacataaattatcatcaggataaaggaaaaccactcacttgtcgatctcagtctttggcaaggagcacatgtatttggaagcaaaagagagtagataaaccctaggacaaccacttggaatcccaaggagggtatcttaactgggattcatgtgcaatattggtagtctcttgtttaccttttacctcttgctgttaatgaattgcatttggagtacactggttttactttaaggcggtaacccgggaatccccaagtttcgggacaatgtgattagaaaagtttctaagcatcttgatggctggaaaaagccttcaatccataggtgctggtgtccattctttgaatcatggttagaatggcctccagaattgaaaagattcagataaggtggttgtgattgagcttgagtgagtcaaagtggcaccatttgattaggtggaattctattgttgtttcaaatgcaaggtgtatctaggtttgggtaatatgatccttggaaatggttatgaaggtttttgaggctggtgtttgttttggcactcctgattaaaaactcatcattcttgcaactatagttaagatgctaatattacgattagggaaattgaagttcattgatacccttggagagccatatctcaaggcatttaagatcttttctgtgatactggatatatttttggtaatgaacaaaaaaattggtttctgggagtgcctttgttaggaaaaaactctttaaaactgattccctcagtattatatggttgcttatgctaaaagtctcccaattgctaatatgttagttcctttataaatttgctcttgtgatatttccaaatctttctttcatttttatactactaaaggtccaagaagtgtttggctgctttctttttcccaataataaccatcttcctaatagcttttacaatatatattatacatgaaattatatttgaaaataattattgcgcaaaaataataattgttagttttctatatgacatccataatcataattatgtcattattgttatacagattgctattctaattatctgccctctcttcaaacaagatcccttttccagatattatttataagacatgttgtgtgtaaaaagaattatttgagcaattaatgtaaaaacaattatttatttctatgtaacatatctattgtaatgaattataatagttataccataaaagatgttatgtataattttttttctgtattattattattattattattttttgtgtttcaatcatgtgtggtaatttttttttttgttttcatccctgcctatttggaaataagttgagaagaaaatttgcatgtgagtcatgcatacacatagacatgtaatatatgtatgtgtgcacatacatatattgcaattatgaagtataaagtaacacatatctaattatgaagtattggaattatgtatagatgaggcgttaatgtttatggtagtctttattgattagctaggctctaagtaggggaaggaagttttttttgtttctttttttgtttctttacccttttttactttatatatgtctaggggcgccaattttgacaggattcgaaaacaacaagaatttaaagggttcaagttaagtgtaattgtgttaacccttgttcgagtttgattgttcaacccatttatgacccatttaacccatataagtttattaatttatacattaaaaaattataacaattaaaaatatttatttaattataaatatcatatgtaaaaaaataaataagtaaacttttctatattttattgtaaaaattaaaaatatttttattaaaacattaaataaaataataaataaatataaaattaaaaattttaatttactttttatattatagaaatattattattaaaattaaataattaaattaattaaaatttaaaaaattaaaagttgaaagttaaagcaactaaaaagtattttaaaataatatatttataaatttaaaataggttaaactaattacaattgttttaacaggttataatcaaagtttttaaaggtgaaagcgtaaggcgagacgtttttgtgttcgtgaagccaggtgtaagccttgaggcgtaagctttttgagcctcacattatataattaattaatattttaaaatatataaaataaaataaaataaaataaaatagcataaataaaaacatgaaaacaattcattagaatcataaaaaaaaaagcatgctagttccctactttcacaaaaaaccataacaaagtcataaaatagaaaatagattcaactatactaatagtttcaaactttaacaaaaatagaatatttgcaacaacatccatcataggaaaccaataaggatcattcacagtgttgaatgagagaccttttgtatacataaatctaccaatttttctacacatttcattcctttcttcttacttccactttgaattcaaagtactttgtctaggttgtgaagtggtaaatttatccataggtcccctaggaataggttccccactcctactcccactctctaatgtccctattgttttagacaagacactctcatgcattgaagttggacccataccaatttcttggagtaattaatttcttttcgttttttgatccttaaaattggccaatgcctttttgaattccaatctagcatcttcactaactttgttgcatggtttcataccatgatgagttccgactaagtgatgcttgagtctattcacccctcctacgtatctttgattgcaaaatttacatcttaaatattgctccccggaaacttcaataacatacttccacacaaaatcttttcttgaatttttcgaatcggaggaactcattctaaaaaaaaacaccaataataatattcaaatttttatataacaatataattgactaaaaaataataacaagacataattgaaaggaatttaaaaatgaaatacataatttaattggtttaaatttaaaaaaaccaatatttttttagaggaatttaaaaattatacacaaattttaattggaatttaataatgaaataaagaaaatttgggtggaaattaaaattaaaccagaaataaaaaaataattttaagcagaatatttaaaccaatttaccagaatatttttttttaaaaaatggatgaagagagaaacaaataacgacttactggctgagagctccaattggtcaaaatgatttaaatatatatattggatgaagaggccgtttgagagttaatttgataaaaaaaataaaaaatttgatgaagagccgcttgccgagagagagacgagcctctgtgtggactatcgagagagacgaagagggagaaaaccatggaagagagagaaaaccatgggagatgaagccgagaggaggaaagaaatgaagagaggggaaaacatgggagatgaagagaggaagatcgcgagttcgtgacatacctagagatgaacaagagagattgccgctggagaagatgcactgcggttggtcgctgcctgaggttgagcactccgtcaccgcttgaggtagggtttcaatttgagtttttctcccaatttgtgtttgccaaagttttcaatcgggacttgggttttgtttcaggaattacttagggttttttttttttttttttttttttttaatttatgctcatggccacatcagctcccacaaagcgtatgccttcttcttggagcataaaaggcgcgatcaaagcgcgcctcagtcacgcctcactggaaaaggcatacgcctttcaggagccgcattttatttcttacgcctcaaggtgttttggccccgcctcatcctaaggcgcacccgagaaacgcctttaaaaacttgggttataattgtgttaacaagttattatcatgttaataggttattgacgttcgacttaactcatttattaaacgagttaaatgggtcatatcatgttacttatgtaataaataggttgtgttcatgtcaagatccaaatttttaaaggcgtttcttgggcgcgcctcaaggcgagccttgaagcgtgtctcagggcgaggcggggccaaaacgccttgaggcgtaagaaataaaacgcgactcctgaaaggtgtacgccttttccagtgaggcgtgattgaggcgcgctttgatcgcgccttttacgctccaagaaggcgacgtacgctttgtgggagctgatgtggccatgaacagaaattaaaaaaaaaaaccctaagtaatccttgaaacaacaacccgagtcccgattgaaaactttggcaaacacaaattgggagagaagctcaaaacgtaatcctatctcaagcggcgacggagtgctcaacctcaggcggcgaccaaccgtagtgcatcttctctggcggcgatccctcttgttcatttccaggtatgtcacgaactcgcgatctccctctcttcgtctcccatgttttctcctctcttcgtctcccatgttttctcctctcttcatctctttccccctctcggcttcatctcccatggttttctccctcttcgtctctctcggtagtcgacagagaggcttgtctctctctctcggcagtcggcttttcatcaatttttttattattattttttttatcaaatttactctcaaacaacctcttcatccaatatatatatatttaaatcattttgatcaattggagctctcagccagtaattcgttatttgtttctcccttcatccattttttttaaaaatattctggtaaattggtttaaatattttgcttaaaattaatatttttatatttctggtttaattttaatttccacccaaattttctttatttcattattaaatttcaattaaaatttgtgtataatttttaaattcttctaaaaaaatattggttttttaaaatttaaaccaattaaattatgtatttcatttttaagttcctttcaattatgtcttgttatttttttttagtcaattatattgttatatagaaaattgaatattattattggtgtttttttttagaatgagttcctccgattcgaaaaattcaagaaaggattttgtgtggaagtatattattgaagtttttggggagcaatatttaagatgtaaattttgcaatcaaagatgcgcgggaggggtgaatatactcaagcatcacttagccagaactcattatgatgtaacaaagttagtgaagatgctagattggaacgcaaagagacattggccaattttaaggataaaaaaacgaaaagaaatgaattgctccaagaaattggtatgggtccaacttcaatgcattagagtgccttgtttaaaacaatagggacattagggagtggggaacctattcctaggggacccatggataaatttaccacttcacaacctagacctagttctttgaattcatagtgaaagcaagaagaaaggaatgaagtgtgtagaaaaattggtaggtttatgcattcaaaaggtctcccatttaacactgtgaatgatccttattggtttcctatgatggatgctgttgcaaattttctatttttgttaacgtttgaaactattagtatagttgaatctattttctattttatatggttttttgtgaaagtagggaactggtatgcttttatttatttatttattattattctaatgaattgttttcatgtttttatttatgttattttattttattttatatattttaaaatattaattaattatataatgtgaggctcaaaaagcttacgcctcgcctcacgaacacaaaaacgtctcaccttacgctttcgcctttaaaaactttggtcaagacgactttacatgattattaaatgaatcgtatccgagttgaataaattttcactatttttttacctcaatcggacacgttattacccattgccactcctatatatcccctatatgttgtgctcttttgtagatgttttttaaatagatattttttgcttgcctataaaaaatgtctaattacgatagatgttgaaggtaaaaggggaaaatataaggcttgcatgattgtcttatgcatgtaaatatttaaaacttgagttttgatgggagcaacttaacaagatatgatacttcaatgttgcttggttgggttcttgtgacttacccaatcctcggttcttggggtaaaaattgcatatttgtggttttccttgttcttgtgaggcggagttagctactttccacattataaaaagaaaagatacattaatgcatagtttcatcatgaagcttcctgaaattttaattataaatttatgttccaagtttcaactaactcatttagagaagataccattattgcaaaatttttgggtaaaaaaacagacaactatatacttgcatgaaggtggacatatatgttcatattttccatgttcaatagaaatgaatttgttgttttgattaaaaaaaaagaagaaggataatttcacttacctccttagaggttttagttaaatacaactaactttaattggtttgaaaattcgtcaaataccttccttatagagaggagctgagtgaaaatatgaaataagaagactaggggaagcatgtgatgaaatttcaaaaaccaatgggggttgggtgtatttagccaaaacctcaggggaggtcaaggaaattaacaaaaaaaaaaaaaaaaacattggctatcttcaaagttctaactcattaatgctcctaccaaaaaggaaaaaactaagaaggcaaatttagatttagcaaaagtttcttttatatatttcttacttttaactaatataaaatacatatatatgcatgcgtttggaaaaagtgtcttcattctacatttatcataattcttaaaattaatattcggatcactcaaagtcttcgttctactcttgccaaagtctttatttacaactttttggaatgggtttagggtgtatgtaggagattgctctttgtccatgattgattttattgattggttgagctttaagtaagacgtgggtgttgtttcttgtgtaacccttagttgtgtttggcttattggtgccatgtttacaccatgtatgtgttttgtctttgataggcatttttaatataattgatttttgcctattaaaaaacaaaaatcatttcattctaacaaacatcttctatatttgttggaacaatgatcatgttgtaaggaatgaacactattagatgtaaagagatggggatgaaagatgatcctttgaaaaagtaaatcaaatataacggaaaaaaaagaaaaagaaaacattcgatgtctctaatatttaagtaggttggttgcccctaataaaaatctcttaaggaaccaaagcccctcttagccaaacgaaccaccacttgatatctaggtctttgcataaagaatatataagatctttgtcattgttatgaatcctccttggctgagtaagacactagggacctgtatctcttaaggaggctcatgaaataaataattgtgggatctttccaaaataaagtatctcgcatctacggtagccatgttcaaaccttcctaaagagctaaaaagtccaattatcaatagaaactcatctactagtcagttgggacattcttgtgatctttcttttataatatttaataattggccaaatgcctaattggcttgaactccccaaaatgtgatcatcaaatttaacttgaaggaaacaaaatgcgatagcccgagggtaggtaatttccttagtcctttgattacttgtgcaaattaggaatattaaaggggtgggtttggaatggatcatgctcctcccaaccttgctcttgttgagaaatgattgttctcagcgtaacaaccgaacaaggtaaaaaatcagtcactatgaaaacccaaaacctaattttaaggagaaaacttctatttcaatataattcattgttgtttcctatcaaaaaaaaaaaaaaaaaaaaaagggaaaaacaatcttttaaccttaggttttttttttttttgagattagaaatagaagatgtattaattaaagtgaataaaaacatgagacaaatgagaaattcttcccatgatatacaaatgtgatcaaaagacccaatgaaacctccactttacaaggaggaccatacgaaaggaatgtactctttaattacagctaatctgatctcagaaacaaaagctcaaattttagggcaaaccaatcccaaaagcataatatgaaagacaaaaacacaccagacaaaatcccactatggatgctttgcaagaatcatgaacaaaactagacaaaaataacaaaataaaggttagagaaagagataattgatggtaattgaggtgagaaggggcaacatgcaaagagatctcaccgaaacaactgctgcaactgatgataatcttttctttcccatgtttcccaacaatcaaaaaggaggtttgagaaggaaattcaaatctttggttgggaaatgtttaatagcatccacagctttggatttctgaagcaagaggtgggtaatggaaattgcattgcatttgtggagcaagaggcaagatatggagaatgctgataatagtaagagaggagaatgaagagagaaaatgaaaggtgattagggattgtaatgttggttttatttatttattattattattattattattattttttaatggcatgatggtaggttatataagaaagataccaaagtaaattttcaattttatctgggttggaggggggagcaaagcagtagattactatgtcctacatcaaacctgattcagttattttgcttatttttattttacttattatttccaaacctgcctcttccccaattacgccttctctaaattgtcctagaaggggtgggttggagtaggtcacccgaaaattctgcccaattgtcatcaccagtgcaagcaactttctaattcaaaaatatcggatgagacttaatggaatgtcaaggaactccttgctgactgacatctaagatgcaaggaagtgtattttatcccataactcctccgtggaaccaatcctattctaaagaatcattgcattcctctctaaccaagacaaatcaaatcattgctggggtcactaaccctattcatctctccttggtgtgatccttgtgagaaatggtcaacacgttgttgatctgttaggaacaacactaattattctagttaaaggtgaaagcctttgccataggtcataagagggtaattttgaaacaagtagttaattgattcccctccctgctacccaaacatgtggcacaatcatggacatagcaatgacattatattatgtgtgtatactatgcatctaggagatttcttggtactcatatgtacattatgtatgtaaccatgttgtataactggcaatatatattttgattatttatctcaactatatattactttggttaattattctagaactttatattaggaactgcattactcttagcaatcaaataacttggaacagggagctgttcctccaatgcctacttactacctcttaattttgtaatccattggtacaatgacagaaaacaatttatttgtgtgagaaatcttgattataagtcacagattcatgagcagggctccactttagacgtgtccatgctacacggtgcaagatcctaggggcattatccttctattttttataagccagccatcagatgatcctactggcttattcatctgatatctgagatttcatttccatcaatttgtctaatcttaatattgaaggagaatctgttcttggttagctatgatagatgagttttgtgtttatttattttattaacaactttttttagttgtttccatgggctttggattatagactatgacagtcatagatgtgtcataatttgattctactctcttggtttcctacatcagctaactcaggggcagacctgttatttagtactattgtcgagtagatctgttaactaagaggagagcagttgactccttattagtaggcaagtagcagtagtagtacaggtgatggtggtggttttggtatttggtagcggttagatcttagatggttagcatgttgccctggtaatgcttgaaaagtttgtgggtagaagaccaaaaaagtgcgtctgtggctaaatcaaatgatctagactaacatcacaaacatgtgaactccagtttgcttggatacataattaattggtttctgggttaatgtgctttacttttaggttttaatggaagttgttattggtttgaaatcattcctgaattcttaattttggcatattaatatgttgttgatgactcgaccatggatccaaagttgatttttacaagtttcttttgttggttcgactcagcttatggctgcatttctggctaaagattcccccaaatctagatggacgtaaacttgttctcattctcatcccatcttttgttagtaaagccagaaaaaaaaaaaaaaaacaccaaaaaaaaggaaaaaaaaagcatgtaaaatcaggatactagtaatgagcaagaagaatggttaaaaccaattatgtatttaggtgacttaaccccagtcaatttccttttccttatctgtgtgctaagtggggaaaagaattatgaccttttggcaccatcctttgtgtaattgaatgcaataagacgacaatatatgttctgcaacttatgtgcacctatctcgcaagttgtaaggccaaaaaattttagttgattcttttttctaaggttagacaatgttatctgattcttttgtttcttgccctcttgtgcagtgctgataaatcacgcctaaaaaggaaattagatc

SEQ ID NO: 11888 - DNA, 18532 bp, Vitis vinifera
  Intron number 1 from transcript GSVIVT01013864001 (locus G SVIVG01013864001) derived from phytozome v7.0 (chr-ID chr1 6; pos 5545603 to 5564134 reverse strand)
atttgaacaccaataaactagtggatatacacgcaatgagatgcataagatataaaaactatcttttctttatattataaaagcgggaatacgactttgttgtaattttgttacttttttatttttatttttaaaaaatatctacgaaagcaccattacttttcttccatagggtgggataatatggtaattatcaataaaatgtgggttaaaagatgtagtaaggcggcaacgtgtattgttgccattatgccacctatcatgactgcgtttggaaagctcatctttcacaatttcattcaacctctttttttcctttacttcgttacgttcaataggttataatttgaatgcaatagagatagttaaaacactttaagatacttttttcaaaaaacatttctgggttaaaaaatttcaaataattttctttaaagtgtttttaggagaatgattatcaagtatttatccaaaaaaaaaaattattacaagtgaatttttaacaccacaagcggtttttaaaatttattttaaaaagtatttactaaattttgtcaaatttttaaattttttttttcaaaaacactactaaacaaactcataggatttttcttttaagtgtttttagtataaccatttgtgggtcccgcatttttacgtgtgttcccactcaacggcgaaactcactttttatttatttaaaattgattttgtttgttagaaaatgacttggagtcgccacttattttttgttatatttttaaatggtaaacaaaataaaaaagaaaactataactgtgactccttattttggaaaatgtggtatgtgaaaaaccggatcgggcacagggtcaggttacttatcgggaaggtacggtaaagaccgtagcaaccctctaagtccctaaagtcaagtctctactaatgaaatgaagctgacgtgacaatcgataagaaaatcaatggatactcaaaacgatcatgcacatatgagaatcagtacatgcataaaaaatgaccagagtagatgtggatgcgtacctgagcaatgatccataatgcactatcaagaaatgaggttagtgcacaaataatggacataaaatatatctcacatgccactaaatcgagtacggagtcatcacgtgtcacaattcaatcaaacggattttcaaaggaaacatccaatgatgtagagtccccaccaaagcccaatttatcttttatggattggtctcacaagttttattatttcagaattgtgaaaattcattattacttatatgaaattaagagaaccagaagattatttgaaaaccggagtggaattaaaattgtctgagagaaaactagatttttgaaatttatttgaaaattggagattcgcaaattaaatttaagaatttggatttaagaaattaaatttgaaagaaattggaactttgaaaattatttgagaatttgaaattttaaaaaattaaattatgaaaattgggactttggaaattaaatttgatagaaattagaatcgaaaattatttgagaagtagaactatgaaaattaaattatataaattggaatcttggaaatcattcaaaggtggaattgttaagaataaataaataaaatgataataataataataataataataataataataataatgacgatgatgataataaataaataaatatgaaaattagaaattaagtttggaaattagaaaattggagtttcagaaattaataactaagttcggaaatcgggattttgaaaaattatttaaagatggaattttaaaaataaacaaataaataaaataataataataatgaaaataataatgattaaataaataaatgtgaaaattggaaattaaatttggaaatcataatttaaaaaaaatgtttaaggacgaagttttaataaataaataaataaacggaataataagaatagaaaaaataataattaaataaatgaacgtgaatattggaaatttttaaattggaaattaaattcgaaatcagaattttgaaaaattgtttaaggatgaaatttaaaaaaataaataaataaataagataataataagaataataaaataatagtgattaaataaataaatatggaaattggaattctggaaattagaaattgaattggaaatcgggattttgaagaattacttaaacatggaatttaaaaaaaaaaaattgaaaataatcaaagtttggaaagtcaaggttataaaaattaattaattaattttttttttttttttgcatcaaaagttgaagaaaactaagaaaataataaagtaaaaaaaaaaaaaaaaaaaaacaaagacatggtggcatcatcacgtgtacatgtaaaatagctttacaaacccatttttatattacaataatgccacactatcccattttccaatgcacatttctcataaattcataccacaaacccatgcatgcacctgccataaccacaccaaacccatttttcaatattataacacatatttcactttttcacccacttcaaacaccaccaccaccacggacgctcaaagcagtaaaacctgtattactatataaaaaaacaaccatgcatactttgagcctttgcagggaggaccttaaagagcccaaactgttccggaaaacatagacttgaactttgcatgatacttgatacccgaagcaatgcatttaaaacctatggtggaggagataggagcttgatggtccgtggaagggtgatgagtttgaaggttaggatatggttatttgcaggataaggattcatggtggaatgaaaactgaaggtatggatatggaaatgggtgtgatggatgagagtgggcatgaagggtattggtcatgtatgcatggttccatgcatgcgtctaggagagggaagagagtataccagggaatgtatgaaaacctgagcgaggggaatgttgagggaaaatgggtttgaaggtaaggttaatggaatggacactaggaatatgacaagagaatgggtttagtggaagctttaagaggagtactaaggagttacatgcatgaactgcatgcacgtgggatggatgagtgaaaactagaaacagaggatacagtgcagggaaacatagcatgcacaaaaggaagtaaggctattaagtctagctctcttccgtgaagaacaatgagatctggaagctggtgggaagttttgagtggttttaacacatgaacaatggcatgaccatcaaacatctcattacaaatgaaacagggaccaagcaaacataaatgaataacaagttcaacacatccagacatcaaaataaaccaaataaacattccaatatcaacaaggagcatgacatgaccgtgaaaaatggagagcttaaagtgtgagttagttaaacctaaacgatctcctttgagcaaatgtcactgggtcctcagcgagctgcaaactcctttctcttaaaaaaatccccccaaaaaccatttttttttttccaaaacgtcccctctcctggcagttttctcctctaatattttcttatttctctccaagctaccccccagaaatccttaccccccccccacatctaccaaaggaagcctcctctgtagataacccgaaaatgcactctctccctgttttcgtcttccccccctgccatcacctgcttcactgtgccttattaagaaaacatgtcatcctctccaaccaccaccatgggcaagttgctgatggctcaccacacgtcccgtgctgctcatttgtctccagaaagaggtctccctgccacttcaaaaaaaaaaaaaaaaaaacaactctctcgagtggtcccaaaataaaagaaaaactattggtttttgaaggggtctacaccattgtctttgaaaatgtttttaaaaaaattacatatttaacgtaattaattaatttaaattaattaattagaacttatataattatacctattaatttttttttaaaattatctaataaacaatcacaaattattatttgtcatggtggtgagtatgacctaattaaataagatctatttgataagattttttctaaaaatttcaagaaataaagaaaaaaaactattaattctattgaaatagaattcctttaagtataatatttcctgaacttttaaaggactaaaataataatcttatatagatgagatttttaacctccataattaaaaaaataactaaatgttaaatgtgaaaaaatctttttcatctaataaatatacactatacatccaactcgggtaaacaaacgagaccttcggtgttattctttaatttcagaaattaaaatttatgtatacaaattttattatgccacatgtaatttttcttttaaaatgaaaataaaatttagactataaaaagtttatatataaatccaatatatttagtaaatattaatatttatatacacaaaacaaaaccttctctaatttcttaatatacaaaatacaatcatatcagggacaaatatttttgactcacattataaaaagaaaacaacaggaagatggaccaatattttggaaattttttttctgtctacacttcacgtcatagaaatatcttggaaagaaagcctttataaaaaggaataaatacaacgaaaaaaatataaataaaaaggtaagaagataaatattaaaagttgtggtagaaaagtggtttatttatgtatttttagataatttacataataatttttaaaaataataaattatttaatcttttattaaataaacagtctattatttgacttgattttttgaaaattgaaaaaaaaactatttttttaattatattccttgttttaaaataataaaaaaaaatacttttgaaaatcaaaacaaaagttgaattttcttttcaaaaaaaaaaaatcatacaaaactaatatatatatatatatatatatatatatatatatatatatatatatatatatatatatatatattataatatctgaattttaatttgaactataattgtaatgtgaaaatgggtaaatatatttgttataaaataaaatatattcaaacacaaccataaagtacataaaaataattttcttataatttttggaagtaaggctgtaaatatgatagaggcaaaacctgtaaatatagattatttattaggacaagagtgggaattacctcaaataaataaaccaataataaaatatccaatatctagtagtttatatgaaaaccaagatggaagtgcaagtataacctttgaaaattataaaactgtaaatgtagaggtagagtcagatattgagataaaaattgtaaatgttatacaagaagaaattttgctaaatattgaaactgtagaaaacctatataaaaactcagagttagtcaatataatgttagaggaatttagtaacccaacgttattagaaaaatgggtagatcaagaaaactttgttgatataatgtgtaaaaactatacagatgagaaaataatagaacaactttataaagccaacttgataaaaaaactgatagatataaaaataataaatcaatttactattcaaccaaaagttaaagaaaacatagaaatagtctcaaacgagtcagtaaatacaataaatgaagaaaaagaatttgtaaatgtaaaaaatgaaatagtaagatataataagccttacaataagctaaaatgacctcaatggaaaactaaagcagaaccttctagttctttacaaccaatatatgaatatgaaacaatactagatatagataatacacaagatctcaggaaaacaatagaaaattgggagcaatctttaaagcaggtgtagtagtatcctttgaaaaccaacaagaaatttatgaattttgtaaaagcacccttagaggaaccgtattacagttctttagaaacatggaacaagaaaacaacagttattttcaagaagttagaaataattttagcgtatctgtatttataaatttaataaaactatatttttttaggaacaactcaagaagatataaaagaacccgcagtataccctcataagttagagcaattaaaattatgtaacctttcgtatataagggaatatgaacaaaaatttaggaaatatgcaatccttgctagagtagataaaacccctaaatatttaaataaatatatattaaaaatacaaggacccgtaggacttagactatggaatgaatttacaaactccgaatataaaaactctccttatataggtgatagaatagaatttgtaaaaaaaaaaaattggttagaaagagaatgtgtaagtataggagaaagaagtcaaataaagaaacaagatataaatcaacaactttgtagaaattacatataggagaaaatttagacataggatgtagagaatataagtttagaaaacccaagaaatataataaatttttaagaagaaagtcaagaaccttttataaaaaatgtccataccaaacaagatataaaaaacctggaaagttttggataaagagaaaaagaaccacagaaagaaaaagacagtgtaaatgttatttgtgtggtcaagaaagccatataagacctgaatgtcctgaacttagaaaaccattaaatgaatcaaatagaaaaactcaagtaaaaataaatctaataaatgaatatcaggtagatagtgaagaagaagaacttattagtgaattagattttgaaagtgaaaattcaagtgtgtatagtatagatgatagtgaaattgaaaaagaagaaatttgtatgatcattgaaaaagaggaaaatcaacctaagaaaacccctttaaatttagaaaaccttgttcaacctttagaaagtaaaataaaaccttataatatatggaaagatttacaaataataattaaaggaaaaatctcggaagaagaggaaggcagttgttcaaaccctaaagaaataaaagaaccactaaatcctgaaaaaacaaccatacaaacaatagaacaagtaaatatggcaaataaagttaaatctatcatttttccaacaacaattaaattaaaaccatagggtagacgcaatgttagatattggagccagtaaaaatcttttatttgaaaccttagtacctcaggaagaccagcaaacattagttcaaccaatagagttagtccaatataatcaacaaaaactaacactaaccaagtatatttcaaatgtaccaatcataattaataacataacattaatgttaccccaaacttatcttgtatctactataagtttatatccttttattttagatttaaattttgtacattctttacaaggagggataacaatacaaaataaccaagtcaattttcatcctaaaaccacaacaattgtctatacaaatatggaaaatgtattaaataaaaatcataatgtaacatctcatcaaattaacaaagtagaagcacaaaagaatagcataattaatgactactcataacaattaagaaatgcagatagattagaaaaccttatattataagtagaaaaaataggaatcataggagaagatccacaaaaacattggaataaaaataaaacaacctataaaataccaattaaaaacccagatttaataataaaaacagtagatatagcatgtaaccttatagatacaaaagaatttaaaattcaaatagaagaactgttacaaaataacctcataaaaccaagtttcagtccccatagatcctctacctttttagttagaaaccataatgaagaaaaacaaggaaaagctaggatggttattaattataaaagattaaatgataatacatatgatgatgcctataaaattccaaataaagattctttaattaattctattcaaggatgtaaatacttttctcagctagattgtaaaagtggattattacaaattagattagaagaagatagtaaaccatggacaacgttttcatgtccttgtggattaaatgaatggaatataatgccatttggactaaaaaaaatgctcatcagatattccaacgaatgatggataatattttcggtaaatattcttttgttcttgtatatattgatgatattcttgttttttcatatactcttcaggaacacataaagcatttagaatttgtttttgaaaaactaaatagtcatggatttatggtaagtaaaaagaaattgaaattatttaagacccaattagaattagaagatgggcaattaaaactgtaagatcatatagtacaaaaaataaataattttccagataaactcgaagacttaaaaacccttcaaagtttttttagattattaaattatgctaggccatatattaaaaaccttagtagattagctggacccctttatagtaaaacaaaaaacatagggcaaagatattttaaccaagatattaaacttgtacagaaaacaaaagaacttgtgaagcatcttccaaccttacatttacccttagaaaatgaatataaaatagttcaaactgatgctaatcaaacaggatagagaggtatacttttagcgataactaatatagaagaagaaaaactttatagatattgtagtgcaacttttaatgattatcaaaagaaccttagttctatagacttagaaattgaagcaataatattagtcttagaaaaatttcaattattttttaaccaagaacaatttactttaagaaccgattgtgagaatattaaaaattctttgaaaacaaaaattcttcaaaactgtccaccaaaagatggataaagattcaaaactctttaattggtttcaaacctaaatttgaacatattaaaggaaaaaaataatttattagcacattggttaagtagacaaataattaataatgttaataatactaatgattgattttatgattacatgaacatggctcaaagaaaacctactaaagctagaacctttcaatatggaaccatatgtctaaacgaagtattgaatccaaatctaaggtttaattctttattttctcaaaacctttttgaagagcataaggttattgtagataatttttggtctctaaaaccatagagttttccgaactaaaatttagaatacgcttatggaaaaaccgtgttagctttagccgaacatttacaaaaccaattgattgccttagaaacccaaaaatgtaaaaacctcaaaatccaaaaaaatcaagaaaaactgatagaagatttgaaaactagtacagtgtcaaccagtcaaactagttgttcaaacagtcaacctgaagtaattagtttaattaagaaatcagttcttctttttgaacaatatgaaaaacttgttgttaaaaacctaattggagttgataactactctttagtcgaaaccttttttctacaaacccaatataacaaagtgtttaaaaatcaagcacttttgtataaacattttagaaccaaaaatgtcgggataaaaatagggtatatggcatatcatgaccctgaatttttctttgttatatatctagcttatgtaaatatgtatgttgtaaataaagaaattttttatctggtaccccagttcatggaacagggaattttaaaaaatgtttttatgaaccatgtatctcaaatccctgaaaatttcccagaaaaattgaaagatattttaacttatctttttaaaaccgaaaaatagatagacatttcttttgaaaccattccacctttatttcaaaccgatggattagtagtactagcctatcaccatgtatatataaaacataataaagaaccactcatccctcaacaagaaccagaatgggaaatgacccgttgaaatgaattttcagaattttttactcgctttagaacttttcaaatttatgatcttagaccaacccgtaacaaattacttcatctcattggtgagacaaaagctatgtccatatggagaaacaaacctttagaacacatcattgttccaaaaccttttattacttctgaagaacaggattttataaccgagctcaatgtagatataccagaaccatattcctacctcaacgatgatgcattattttgggacaacctggatgatgaaaattatcataatctacaaaatgcaatggaaagatgatgtcaataatgacgacattgaagaagtaaatgcgtcttcaactacaaaaattcaatgtagcagtccaagctcagaagcagtaaaggcatctacaagctacgtattatgcatgtgataaaaaagagaagaaaaggacaaggagaaagtggaagaagtacaagtcggatggtaaaagaaaacaaaagaaaacaaaagtcaaatctcataaaaactttaccatctttgtattcattttgtagttattttgtaccaaacctctgaacaccttgtaaatatttttcatgtcgtccatcaactgccccaaccacttaaattaattttcacctgtcacttgtaaatgctttgtctataaattagttataatagaagaaagaagtgtggtgtccgaaggagtgtgcaaaagtgtgtgtaaatgtgtctgtgaaagaaagttgtatcttcagccttctaaattcatcagcaataagaaagtaagaatttttatgttaaatttatgctcatttagaatttattttattttgtatatttttcttacccttagggggtaaaatgggtaaaaagataaagtagggaaatgaaaattatttgaattatttttcagttttctttactagttaatacctgcgatatacatggatactttttatatataatgttcccatcaacataaaaaaaaataaaaaaatcgggttatttagaaaattttgggtgtaaaatcaaattttaaaactagggtctttagtcttaacccttgacttgtaacccgtttttgctgaaaaattggtgtgttagggagactctgtctggtcagaaggggggtattaccttgacacgaagtgatgttttaaatttttattattattattacctgaatttttgagatatccgatttcaaaaaagtaacttttatacattaaatggtttcatactatagcttgaagttaaatatatattaaaataataagtgtttgaaaatattgatattaaaataatgagtgtttgaaatgtttatattaaaataataagtatttggaaatgtttatattattttaatgttagtaataaatgcattcacactttaattgattttaagataatattttattcatattaataattttttcatatttataataattgtattatttttatatcgtgaatccatgatgtcttttatatgatttcttaaccaaatttggaaaagttcaagatggttatttcactttttccactttttgaattaatttttctagaaaataaaaatagaaaaacaattttcaaacatgttttcaacccatttctagtagtggtttctcaccatcttgaatatagtgttcagcgcctattagatagttgacagttagttaactaatagttggttattaccaaactattatacatgctactattcagttgtaaccactcatccaacatgtcatcttgttatagaattggctattactcttgtataaatagctcctttgttcatagtttaaacaattaatgagagatcacttgtagacttcttttcttgattcagttgttgttgttatcatggtaccaaagccaaaacttctaattgttcacacttttccgccatggctaattaagcttcaagccctaaccaagtatttccaattctttttaatcatacactttctatcaaattagatttctcaaaccaccttatatggtgacaacaagttctaacaactgtacgaggtcattatttgtagtgctttcttgattcctctctttcacctccattgatgtataattttccaagagatacagataaaggaatattgaatccagagtttcttgcttgggaatagtaggatcaactattggtgtctttgcttcttggatcaatgactaaaagtttgctcactcaaatggttggagttaactctatatcagaaatctaatcagttcaagtcttttttgcatcacaaaccaaagctaagatctcttagttcaaaactaaattacaaaatactaagaaaaatgatttgtctattaatgattatttgctaaaaatcaagcaatcgggttaataagttattttgttaagcctgttgatcatatagaggcaatcttcgatggtcttccaccatattatgagttagttctactagttgtaacttcaagacctgaggctcaatctgtagaacacatggaagctttactattagctcaagaaacttgaattgaaaagcgaattaaggaaggtgatcaagctttttctactaatttggcacacaagaaacaagttcgacattgtggctatcatttaaattcttcaaactccttttgtcaaggttctaaaagaggtaattctttcaatctttatcgaggaagaggttattttggccatggcttaggttgtagctcttttggtacccatggtcaaagacaaacaagtaggagaaatgacaataaaccacaatgtcaactatatggtaagtttggtcatgttgtcttttactactggtatggattcgatgagaatttcaccccacaaataaatcaatctcaaccttcatttggttctaatcaagctcatatgactcatgctctcatattctacttcttcatttgatcaaagttggtatatagattctagtgctacaaactgtcttacaccaaatctcaataacttaattgaacatacaacttgtatcgatatagattgcgtgcaatgggcaatggtcaaggtattaccatacaaaacatcggtgagtcttttttttttttctagtccttttcattcaaaactcctagctctcaaatctttgcttcatgttcccatgctaaaaaagaatttaccaagtgtttccaaatttgaaaatgacaataatgtttattttgaattctttcctaactcttgctttgttaaagatcaggtcactcaagtcattctcaagaaacgaactcttaaaaatggcttatatgcttttgatatagctttctttgatctcaactcctcacaaaattcacatcctacttcatgtattgtaccaagtgccaatttagcttttgtttctttatatgtggcatgataggcttggacatccaatctacaaattgtaaaatttgtactcaataagtgtaatgtaattgatattaataaaatcagtccttccttttactcatcttgttgcttaggaaagattcataatttcctatttcctttttctaatatttcatacactgcacccttgtagcttatccacactgatttctagggtcttgcttccaccacattttcaaatggcgacttgtattacattcactttataaatgcatattctcattatacttgcctttatttgcttaaatgaaaatctaatgcctttaccacttttcttcaattcaaaaagatggttgaaccctaacataacaattaaattaagtttgtacaatctaatgggggtaaggaatatagaacttttatcgactttcttcaatccaattgcattattcattatgtttattgttctagtgctcaccaatagaatggtttagctaaaaggaaacatcaaaccattgttgaacatggtctttccttattaaccacaatttctcttcctttaaaattttgggatgaagctcttcacactagtgtttttctatctaatcgacttcctacatcagttttaaagggtaaaacacctttggaaatcttgtttcatcaagaaccaaattacttatctttcaaggtctttggttgtaaatgttttcctaatattagatacttaaacactcataaataggcttacaaattaatgacaaccttttctaggatgtcttttacaaatgtcttttaccaaacggaaagattctaatatcttgggatgtaatctttgatgaagatactttcccttttgcaaattcatcatatgtttcaaactcctcttttctacctatgtcttagttttcaccttctacattatctcatttacttcatgaccattcttcattgtttcctttaagtttatcacccatagaatctaccccatccccataatcacatcaatttattcctttttcccatgatcctacttatgttaacaatagtctccaattgccttcaatgtcttccacttcttgagtttatacttgatccatatctagtatttacaaacctaaagtctacattgcttagaaagaaccttcaacagttggaaaagcacttcaacatgagcattggaaagcagctgaggagtacatgacattcttaaggaatgcaacttggtccttaaaatcacttctagctaaaaaaaaaggctatcccttaaaaaatacaaagcacaattagtaactaaaggtttccatcaacttgctggctttgatttttcataaaccttcaaccctgttgtgaagcctaccaccatcaaagttgttctcactctaactttgtctaagagatggaatgtcagtcaattggacatcgataatgtctttcttaatggtaccttgcaaaaagaggtttacatggttcaacccctataatttcaagatcctaagtgcttagaaaatgtggaaactacacaaagccctatatggtttgaagcaggctcctagagcctagtttgatagactttagtctacattggttctctttggctttcaatcttctacagttgatcaatttatcttcattagaattatagtagctcactctacctttgttttaatctatgtagacattatattagtcactagtagtgactctcaattcatcattgatcttgttacaaagttgcacaaagagtttgcctttaaagatcttagtctaatcaattacttcttaggtcttcaagtcactgacacttcaaatgggttacatttgtcacaaatgaaatatattagagatatgttggctcgagctaaaatgcaatttgttgaaggattttcctctccaatgaatagtggtcaaactttgacaacttttggaagtgatgttgtacccaatcctcaaatttataaaagtattgctggagccttacaatatgtgaccattactagacccaaaattagtttctctattaattgagtatgccaatatatgaaaaaaaaaaaaaaaaaaaacccttagaaagctcattggaaggtggtaaaagaattcttcattacttggctagttcagttgaccatgtgcttcatttaaaggaaataaatttttaaatctagtgaggtttagtgatgcagattgggcagttgatcataatgatcgaagatcaacaacatgttattatgtatatctaggctaaaatctcatatcccgacattcaaagaaacaatcaatagtctcaatgtccaccaatgaagttgattattgcgtaatcttgctaatctcactacaaaaatcacttgccttcaatccttgctcactgaacttcaaattcctctacgcaaaatgccaatactatggtgtgacaatttgagtactatgatgttgtttgcaaatccaatacaacatgcttaaacaaagcatattaagttagatttatattttgttaaagagaaagtcatttgaaagctcagagaagtaaaacatgtgcctttcatggatcaagttgctaacatattcaccaaggccattccaagttccaagtttgttgatctcaaaaccaaactcaaagtagaatcattagctaccttgagtttgagggggtttgtaagatagttaacagttagttaactaatagttggttgtttctagattattatacaagctgctactcaattgtaaccactcaagcaacatgtcatcttgttatagaattgactattacccttatataaatagttcctctattcatagcctaaacaattaatgagagatcacttacagacttcttttcttaattcaattgttgttattatcaatgccaaaggaaattattccaataacaatgcctatgattgtgaagatatttaatgtaataacaatgaattatttcttgtagtaatccaaataatgttactaagtatagatatttatacctattcaactttcctttgttagcttctatagttgctattttttattgattaatgtaagcctatagacatttatacttattcatcaatgaaagattaatatttcctcaaacaattctatatattttattttcatatagtatgaaagcataaatctgcaacctagaaaccatattttcttcttcctcaaacaaaggaagaacttctactcaatattcaattagtcttctagtctaattttagtcaacttaagtagtataaggtttctcttacaatgatatcatattcttcccttagttcacatccaagcatgcttcatcatcccctaattgataataaattgaataaagaaattgaggacaaaaaaggaaacaatgatgtcaatatgttatacatgccatggatcaacaacaaagcctttttctcttcatgacttccatggatcaacaaaaacgccttttttttcttcctgacttcttagaaccatgaaagtaaaagttttgagtatgatttttaatgtaaaaacaacattaggtttacaatcacaataaataaaaaataaataaataaataaataaaggaaaggcatttgaaaacatgttgatgtctataaaaaaaattaaaattacaaattacaaattatttaaaaaataaaaaaggaaaaaaagtcattggccctcggtggtgtttgaaagatttcaaattggttcatcttaatcttattgtcatcaagaagctttgaaaagttaacaaggttgattgcttttgcaatcaatgaatggatttttgttatatttgtttttaagtgttaatcaaaatcctttaagctagtgtttgttttttttaacttaattttaaatagaacttaaaactaaataatgtttaatagtgttaagtatgaggttatttatttttataatattttatttatattaaacattaaaaagtaaagaaaaatcaacatgttatttttttcatctaaaaaaagtcaaataattttattttttctattcaataaaaaatttataataaatcatgaaaaaaaaaacaaacaaattaaaatatgaaagtaaattactttcaacagaaagttaaaacaattttaaaaaagagtatattttcgcaagatttttcaaaaaaaaaaaaaaggcaaacttagggaatgatggaggcataaaatttgatttgaataatatcatagattagtcaaaactaacatatgattgaaggaagattagtaaaaaacttgtaatttaatcatatgatggaaacaaatttagagtatatttgacagagattttaataaatatttttaggtttttttatatttgaaaattagaaatgttagaaacactttcgaaaataactatcaaacacaagtatgtctgatagtgattttataaaacgtttctaacatttcaaacactttaataataaaaacacattttaaaatcattgtcaaacgggttcatataattgctaatgaaattgttttgttcataataatgataaatttatttaataaaaatataatatattaatcttaaatttttatgttgattaagttgttaattagtttttatttgagactgacccgaacccgaactcatttaccaagcccaattttgaaacgggtccctccatttctctcaaaaaaaccctactaaaaccctcgtctctgtttctgtctctgtctctctctgtgcaaattgtagggttctaatctgtgtagaaacgagggcaagctctaagggttttcatatttcaaaaaaccctagcttggttccgattctatgttggttacaagatttccttggtcagttcctcccttctctctccctgtctcgctattcctctgctttttttttttttccttctttttccatttttctttctaatttctagtttatgatttttgattcgcgctttctgtttctgtgcgattatcgaattaatgctttgatgatttcagaggaatattatcttttaaatatcttctgacattattattattattttttttttctaaataataaatcaaaaatccaggagtattccgctcaaggtatgtagttgaaacctgaaggtgagcaaagaaatagctatctaactatgaccatgttgaggtaccccagagaagtgttttgtgaggctaattctggggaacttatgtttggaaccacgttgttggttatgacacaataaattaataaagctgaaagtataataatatgtcagatcaatttttttctacaaaatttatcaaataaaagggaaaggaaatttagaagataaggcaacaaagtgtaatccttggaataca

SEQ ID NO: 11889 - DNA, 6449 bp, Vitis vinifera
  Intron number 2 from transcript GSVIVT01018821001 (locus G SVIVG01018821001) derived from phytozome v7.0 (chr-ID chr4 ; pos 19590006 to 19596454)
acccaactggtacaacttacattctgctttatttctgtgattgacttatgactttataatatttatttcttattacctcattggagattactatttggtactcgagtgtgttaaaattctattggaagcatgtttatattaattgaacaagtatgcctgttatttggtgaaacttttggtggaacgagtaaattgcaagaatcttcttgcccttcttaattttcttacgagaaagaaacttggaggagggcattgtaaaacactgatgatagctcttgtttttcctgtaaggctaagaactttactttgttgaggttcgtcaaattctcaaatgaagatggaattttgaaaacttattatttaggtgcctttcaattgttgaagtgccaacacttttgaaacatggaaggcaacattgtgacttttgttgaaaacaaaccatttagaggaaattttttcaaaaacataaaaacactatcaaacacattttccatatcatttttcatttattttttatggttggatgcacaagtgatgattagtttcagaaagagttaaaaggattatagaagttgggagctagggtggtcattgttgcaaaccttttttggtgtgctaacctatcttaccaaaacattcacaatatatgtaattacattggttgtgttgacatttttggctattggaaacccaagcttgcatggcattagctcaatgtgatatgagcttttcaactagattcaaaatcttagctaagatcagggtgactcggttgagtttggtattttgttgaatcgtgaagggaattgacaaactcaaatatgatttgatactctcgggatgattcacatgatgaatttgagacaacttcgagatgcgctcaagttgatagctcaatgcctttttggaaccctgtccgtagaacaccttggtctgtagccttaatgcaatgtttttagtgcttatcccgaaaaaaggagaggcaggtgaagggaaggacttcaggccaatcagtcttgtggggagcctttataaacttcttgcaaaagtcctagctagcaggctaaaaagagtggttgacaaagtggtgtcaaatagttagaatgcctttgtgcccgtagacggattctagatgcagccttggtagcaaatgaggctattgatttgtggaagcaaagctccaatgtgggtttattttgcaaattggatatagaaaaagcttataatcatataaactagaagttccttcttttggttttagaaaagatgggtttcgatcctaaatggaggcagtggattcacttttgcatttcttctgtgaggttgatagtactagctaatgatactcctacgaacttcttctcaacttataaaggtttgaggtagggggaccctttttcaccttatctatttgtgttgattatggaagccctcaacaggttagttgctaagacctaggagggacatttcattaggggcttcaagattgaaggtagaggggaagaagggactcaagtctcacacttattgtttgtagatgacattcttcttttttgcaaggataatgaaattagttgaaatattggaagtgcaggagatgacgaatgttgatagagcaacttatctttttgggtgtaaagcagggaagcttcctacttatctaggtttatcctttggaacccctcacaagtcttgtggtgtgtgggatgcaatcaaagagagattgaaaaggaaattggctacatggaaaaaatagtacctatccaaaggaggaagacttgtccttattaaaagctctttataaaacctccctatctattttatgtctctttttgtaatccctaagaaagtgaagagttcaatcttagagctaatatcttaataggaaatggtagatgtacaagattttggtaggacaattgggataaggagtctaagttgaaagacgtttaccttacacttttcagaataacattccacaaaaatgctatagttgcaaacttatgggaaagggaacggggcgaaggtggttgttgggaggttcaatttagaagacccttccaagattgggagttagagaaggtgacccatttttggagcacatttttccattaaaagtgcaagaaggggaggacactttaatatggaaagatgataggaggggaaaattcaatgtcaagtcatattgtaatcctttaagggttgaaaataatttaatattcccagccaaagagatttggggatcccatgctcctcttagatctcgttttttttttttgtttgaaaagttgtttgggggaagatcttaattgtagacatgttaatgaagaggggatggtccatggttagtagatgtagcatttttaaagatagtaaagaactagttgatcatattttgatttattgtgatgagacgagagctttggaccttgttgtttttcggtttggcttgggtgttcttggctttagtgagaaaccttctcctagaatggaaacttaaggggttagggaagaagaaaagagtagtttgacgctttgctccaatttgcctattttggtgtatttggagagaacgcaactgaaatactttcgaagatgaagaattgttagattaaagttttaaggatctcttaatccagtcaaagttttaaggatctcttcatccggtcacttttagagtggtcctaggaatctttggaattagagaatccttttattttgaatttcttagatgctctttattgtggctagctttgcacttgtttaggattttttttgtcttaattggtgcttgctttggtatattctgtgtatattgcctgtatacgtaaggtgcgcctcctctttttagcgtttcttaatacatgcttttgttgtctattaaaaaaaaaaaaaaaaagcctttatggaacccttcattgcctttgtatttctaggttgagaatgagagaagagcaatgaagagaagtaagaggtatgaaaatgaagaatattgaaggagagatgggagtagcgtacctttgggatcctctttgctattgttgattcactcatctcaagctttagttcaagctgacataggaaatgagtatttgtgcagtaatgggtattatttgaagggtcgttgggcttaaatgggcaaatgggtatttggtgggaacttatttgatgggaagttggatcattaggtgtttgggtttaaattggcaatgggtatatgatgaaaatttggctatacgttaaataggtatgcccctttcattggctctcttttactttgcttattaaaataactaactaaataaataaaaataagaaattaaagttatataagattttaatttgactatgttttttatgagactaattataatttatttgaatacaattacatcattgagataagtttaatttagttgtttttaatataaactaatatcaggaaattaataattacttaatagcaatgctaaatcacaggttataattaattttaaaaattataattaatttgttcttgccctgtttttgtaaaatccacatgaatcaatcatggtctaccacatgtctaatatatgccatgcgagctccattattgcacaacaattacaagccatcacatgtctttgtatctaataatacatgctcaagaccactctccactaacatgacacatagtgtgtcttgtccttgatctctaatgtacgaagggatccctgttctccccatatagctcttatgccataatgctgcaccatttggacttcgaggcgtatctccaaatatattcttggttattcggatgcctatgaaacatggatgtccacctatggcaaatggtgaggggtctctcctacgatacccctttgtgaaggtggacactgtgcacccgagaggattgattgtttcactcctactacaacgaggatgttacctctagaatatttgtggctagatgatcttctacattccccttgaaggtgttgcccttgacattgcgccctgaagctagtacgtttgcttgagtcaagagcaaggcttgagggatccaaaatggacttgacacatctcaatagagaaattgtccttcccaccattgagcattttgggattggaacattggaggtttatggaggtgggattaacatgcatcaaacctatctcgactagaatgagagttagaggggaccattgtgtctttgagacatgtatcatcttcaagagcttccctatcataatcaattattatgagagttactattttagagtacaccaaaaatgcttcatttcctaccaaacaaaaggaggattttccaatgctccttggtgctgtccttgattcactgccactctctccaaccccttctcacctttcactctactccactctcccctcaaattattgatacctcatcgtcctttgtggttgacttcctacatgtaagaaccttaaataaacaaaattaaagttagtatgaaatgattaaataaaaaaagtttttaattctagatcctatcataaactaatccaaacacatgtttttatactatttaaataatattacattagtataaggttattttattattatttttagtctgtttaattttatttctttttctaataattttcataattttttttaaaaaaattcttgagcccattgctgacctaagatgcttagattgatgcgtctcaggacatcttgagtcaatgactaatattgcaactttgaaccatgcaaccaagttgaaccaacgctatgggttaaatatatacgttgataaatcctttttagttgcaatttccataatctaaccatagttatcttttgcataaatcatgtttattttatcagtttgcccaagtgtttgcatgatcgctgagtgaaaaaccaagttttgctttgtatagtgcatcttgtcttgtttgctgtgagcgatctttaattagcctttgatacacaaccaaattaatttaaatataattcctttcaatctacaagctagttaccaattcagtcgagtcaattaatcagacttaattattaaattacttagacaatgctttccagtttttgtgttaatgtgagatgctgctgtaatgaaaatcaacccacgcaatcagagatggataccgaacttacatggaacacctcttcacaagatgaaaaaccatggtagccatctcatccatgaatagtccactatatcaaggaaattacaaagtgtggtcttaacaaatgaagtgttcctcaaccaaatcactaatcaaagctctttgaacaatccttttgcaactttccttgatcttccaccagtccactctctgaagtttttttgaataacaaagtctgagactttatgttgaagtcatttcaaccttggaatcactcattgatctgatctgaacttgcttcagattgatttcccaagaatgttttttaaatcttcaatctatattgaactcttctctcaaacttcttacaattggtgacctcaatgatgagaagatgaagcctataagaattctgactagatgaagacaatccggataatcattcgatgaagaaccagaaaaaaggcccgactctttcaagaattctctctatgaaattctaaaattgagagaacttccaacttggagccagttgacccatttatagccaaaaaccattactggaatgtattttacacctttcctaatgcatttgaatataaaaaaccaaatcttgaagctgaaatatgaaaatcatagctcccaaaatccttttgctcagaaatggtcaaagtgccaccacttggtgcaatccaagtgcttggtgctctgcaaaattcccaaaagagtagtccagcatgtaagtgctacctagtagtgcatgtaaaacgcctggcactttttccagagagagtacctactggaaagtgctactcccagtcacagaaagtgcctggcacttttccatgtgcaatctcagctcaaaaacaattccaaaataaagctgaatttccacgcaactttccaaccttttggtggattgttttgcacactgttcccatcctttgagcatcaagtcgataccaatttttctgtctttggatttcctcttgaggaacttccatgtatgaagtgtgttaaaaaccaagcatacccgatcttcagttttcactgggcattgtccaccaaccttgaattcttgatgatgtcttctttagtgattggtcatgaaactcaagatgatatgatacaaaagatacaaacttaaaagaaaaaccaactgccaacactaatatacatttacacagagttcttgttgagttatgtggcttgtgattttgattcttagctattaggataaatgatcattcttttagtcccttgaagtttctacttaactgtctacctttttgcagctatctttcctagaatcaatataagagacccatac

SEQ ID NO: 11890 - DNA, 1834 bp, Vitis vinifera
  Intron number 1 from transcript GSVIVT01016720001 (locus G SVIVG01016720001) derived from phytozome v7.0 (chr-ID chr9 ; pos 625611 to 627444 reverse strand)
cgctctaccaccccggcctcttggctcctcctcaggtgcgagtcttttttggtttctggttctatttttttccctgggatttgtttttgggtgatcgatgtccttgcgattagatgtttggatttggctcgtttgatttgcggagttggatgtctgtttttgtggatttgttaaaggctagggttgtggattgtttttgtactttaaggggcttgtgtctaggggtctggattgctagcttttggaggggattggattttatattctagggtcctgaactgtttgtatctgaggaggattgggaattttgaaagttacggttttgaactctttttgctttccgaaatattgatttttattatggctaggattttttagatgaatttattttggcttctcttccttttggtggtcgtgaaggtttaatgtttgaaaatggatatatttttttttattgttgtcattttcgtgttaaaaagctttattttgtgctctatcaattggatgatatcagtcatatctttctcataggagctgattttgccaattccagtatgaacataaattcacttatgtggttagtgtctagcaggattaaggtagcttttacagtttcgttggtggttgtgtatttggacttgtttaacatttttaaagtgctatttctctttcttcaccaaaaaagtcatgtttgatagtggacttaaaagtcatttggctttgtttggtttggtcgaaagtgtcttgaagcaattgatgtggctcctttctggtgatgtcatagtttccagactcaacttttagtagttcaggggtgacacaacatttttctgttccacaccaacgtagccaattagctttagtcattttttcatcaacataatgctttggggcaaaaagagagagtaaatggctgctagtattgattatttttatcacttttgaattacccaaccataagaagtcttgaattatgatggttgaatggccaagtagctggtttttcttctttttagtttgaactaaggatgtggagtaagcatctcgggtacaggtcataagttaataagtcagtgtttcttctataattgagaattcagttcattgttagtcaaatgtcctcctttatccatggtgtatgaacctaaaagaatgatgagaagtacagtagatattttccttggccagcagaagtttagaagaaattttcattattattattttttccttcaaaattcaaaagactctgcttgtcttacttgcttttattctttgtatgcgagtaccacttgcactacaatggaaaacaggaatgggaaattgaagttcatttgctaacgctagttctgtttttagcattctctggcttcattccatgccgtcttttcccccaacttcatctttaattatcagtcaaaaagttttgtgaaaatttcttaagtaaaatgatgagaaatggtcaactggaaagacgatagaattctcaaggtgctcaggctctctcctcctctctttctctctccccatatctgtctatcttttattccatctagggttagtttcaatatgtgagaattattatgctaactctagtttagattggatctacggttttttttttttttttttacatggaagtgtcagctattgatgccttctgagaattagtgttttcccccctttttgggttgaaattactcttgatgtgggtagatgatttaggggcttgtctttttatattatttttgttctttttctttcttttattttcttttcttttttacatttttattttgcagatagagccaataccaagtggaaatctgcctcctgg

SEQ ID NO: 11891 - DNA, 5875 bp, Vitis vinifera
  Intron number 1 from transcript GSVIVT01011666001 (locus G SVIVG01011666001) derived from phytozome v7.0 (chr-ID chr1 ; pos 5395420 to 5401294 reverse strand)
ctccgttttggtgaatttggcccgtcaagttcctggtacgaagcttgtctttcactcccatttcaatttttgttttcgttgttgcattggttagacttaaaaaggagaatttggtaatgggcattgtgtatgaagaatgaacactaacaaaattgactcctagtcgtgcatagagatatgggttttctattttatgggtatattgtccaaattatgaaactagaaattggccttattgagtgacattttaggggtgttttttcattgctttgataactcatttctttttataagagcaaccaaacggtgttgggtttttttctctttctatttgacctttgttttcctgttcaaagcttgtgggcaatctggaaaatgagggcagcttgatgattctagaacttggaaatttgatttgaccagactattacccatttgtatcaaagtcacagacataggcgccaataaatcctgaaaaagtagggtagggaaattgacctgtctactatgtttgacacagcacttgatttgcaatggatttaacttcaaatactatgtagaaatcaaagaaccaaaggtgtatgattatatgactgtacataaatatatgaataaaatggaagtgcctaaattctgcaacatcattgataaaaaaatgttgtttattcttgttctcccttttaagaaaagattagcatttttttaattgttcaagttaatgataatatttttatgttttaacttcttctttttttaataatcaaaatagaacaatctctttctttctccacatcaaaagagaaataagtctctcaatgacattttttaggtcatctcaatgaattatgcttactggttatccttgtaaactattaggcttgaacatagaaaatcgagattctttacttactatgtgtgactgtggtggttaaatgctgttagaaactcgtatgcctactagtcacactagatattattatgtgaaaggtatttgattgacaagtttgtcattgaagaccatttccaaatttatttgattttattttttctaaatgcatgatttaaatcaggtctatgctaagttctattacattggtctttttttttctcaatagaattttctgttgaagaaattataataaagtagttcccatcctttgcatgggatagctagtttgcaagcaaagattgatcctgaacatatttccaaatcttgtgctgtatatacattttttgttgcgcttactgttaaaagtaatgcaaaattgaagacgactgtatggctagttcttttttttttccacaacataaatgctaaataaaatgtaaaaaacttctgcaactattataaagcagttgatgaatttcaaatggatcttacactcataaaatttgatattatggggctcatattgaataatgattgcaatgaaagattttagctgttgtagtattggaataagctgttgctaatgcaatgaaagcaatgttcataactatgaacagataatactatatttttctctacacctctccttgttggaactatttatgccacttttgctggcttaagataatatgtggatattcatataacaccacctgttcttgctagctcatagattttgtggattgtcattccataatttcacctattcttattggcttagggtgtgtttggattgtgtttcaataactgcaatgagtttagtgatagcaaataaacattgcatgaaaaatattaagatatgtctgtcaaaataccatttgcacaaaaggaaagaaaaaaaaaatgcttacttacacttcttgtggtgcctggagaatgagttttcaaattagggcacatggattccctagttcatattctagtatagaggggaatcttaatcttcacaaaccttgtggtagcagactcctcttttttctctgttattttttatttttatttttctcattcaattgcatgagcgagagagagagagagagagccatttctttcgaataatgggtcatctggtcttttctcgctcccttgcatctcattctttctttgctgcagtgaaatctttcttttgtatttgctttgttggtggtgaactagatttctaataacaccattggtaaagttggtaatatttcacaaggcttctttgtctcctttgtgaatgaatactatcatccatgtgaaaaaaagtcaacattatccttattttaaagaaatttgaagatatttagggcaaaaccaaaacttgggctggacttgtaaacttcatctttgagttttgtgattgaatcaaatgcattttaaactacattcattacatagattctccaacaaatcaatgatattggtatcggacatgaatggcatggatgtaggcctctcccaagcatctgtgtagaactttacacttactttactcgtggactctactgaagaggggcatatttgtaaaccccaaaatttgtctcatacccattctcacttattttattttatttttatttactattatttatttacagggcttattttgattgtgtttatttgggctcattccattttaattttggcccaacttatgcctaactttccatacccatatgtgagaactaatcctagccattcttttgccttttaacaacttaagcctgcttaatgttaccaaggtagctaaacactttaataaagtgagctttgaaagaatacaagtgtgttgtactaatgaactgtgcaagacttaaatgggtacaagccttagtgccttgatcaaatgaaagttctctctttattgggatgtagaattctcttgaaccttcccccaatctctacactatgaaacatataacatggtttatgatgttttgaaatattctagaaattccttgttcctacacggggtttcacacaattctagagtactctaggtgcctatttataaataagggagacataaccattaagtaaactcataagtgcaatacacttaaattctaatgtagatctagctaacctaaggctacccatagaattctagaaaattccaaggcttccaaaaacttctaggatattccacattctctagcaagcttcatataattgtcttctagaacctttctgtcctactatataaacaaggatgccatttgtgttgtgcgagacatgaatatgctttttctagctgtttaaaattccaattaaaaatggtccaagtgtttgaaaagctctccccaccaaaatgtgagcattaagtcagtagctaaatcattcacagtatgtcaattatttaaagtgataagaaaggaaaattgatgggatgatatgaaaagtaatgagtcttaatagcagataaacatgatgctctcctagaagattcttttaattcatttctaactattagttgaaatttaatttcttagagtgcatttggaatgaaaggaatttgatagaaaagaaaacaattgatttgaaatgaaggaattcatggaaagaaatattttcaaaggatttggtggaagaagttttaagttttcaatttcttttaaaaagggtgggatttcacatgatttggattttattgaagtaaatgctaagttatagtttctacttttccaacgatgcccttttttctctatctttttctctgtaacttagtatgttctctctttcactttcttcatctttttcttccatcagtatcatttaattttctttttctttttatactttaatagttttttcatagtagaatcttctcatagatttctatttttatgattattgatgcagtcatataggaattgaaataaaaaaatattttattgtaataattagtaattttttattttttaaatggtataagcaattttctgttttgattgaattaaaatgttgaatttaaaataatttaggtcattctaggagtgatttattatttttgttttatgtggagacttcaaataattaataatggttgttcattcaattttttgaagtagatggtattcttaattagttttttcataatgaattaatttatttttataactaaatttatttattagtttgattttaagtttgaatgattaatatttaaatcactctcatccggagcactttggcgagcatgccaacctatcttatgtcattattgcgcatgccaagagtggttaaattaagacttgagaaaattcaaagggattttctttggggagggggagcgttggagaagaggccccatcttgtaaagtgggctattgtctgtactcacaaaaagatgggtggattggggattagaaatctttccattctcaatagagccctcttgtgcaaatggagttggcgttttgcggttgaaagagactcatattggaagcttattattagtacgaagtatggggttgaaagaggagggtggagcactcgtggggctagggagggccatggggtagggctttggaaggaaatcagcaaggaaggtttgttattgctcaataatgtatcattctcgatgggggatggtaaaaggatgaggttttgaaaagacatttggtgcgggaacacgcccctttgtgaggcctttccctccttgtttgatttagcgggttctaaagatgcgtgggtagcggactattgggacccaatgggggaagagggaggttggactccccacttccttagacctttcaatgattgggaggtggaggagctggagagattcctttcatccattcaaggaaagaggctggatgctgatgtggaggataggatgctgtggaaagagacgaaaaatgagattttcattgtaaaatctctttataagtctcttgttcatagctgtgcagtctcgtttccgtccaatattatttggagtccgtatgttcctacaagggtgagtttttttgcttgggaagcttcttgggagaaggtccttactcaagatcaacttaagaggaggggctggattttagccaacaaatgttgcttgtgttgtgttgaagaggaaacgataaatcatatccttgttcattgttctaaggcgaagattttgtgggatcttgtgttttctctttttggagttaattgggttctgccgcttacggtgagaaacactctattaagttggtatgtttcgtttaaggacaagaaacatagaaaggtttggcgggcagttcctctttgtttattttggatggtttggaaggaaagaaatatgatagtctttgataatgagactttgtcgactcaaagattgaaaaattcctttgtttgtaatctcttatcttgggctaaatcttctatagctgtaggccccttaactttgtttaactttgtggaatggctgggttcttgttgagggccggtgagtgcttgtgtttttgttgtttttttaggtgacacttgtatactccctgtatgctctgggtcacctttcaagcaccctttttctaacatatctttgtgcttttacctataaaaaaaaaataaaacaaatgatttcttttccatctttattacaatacgatacaacagaaagaattgttttcatttcaattcccataccaacatgatgaaggaattgaaatccaattcattttgtctcaagttcctttaattgaattattttcctctagaatttggttccaagcacagaatatccatataatatatctgactttagtttttcttctgtttagaatacgatatatgagtgtcacaaaaagtgaaacctatgttttatgaaattgcatgtaggctttcctgttcaaaatataggttagtgactccaattttaaacattaggctacacgctacactgagttttcaatttaaggagtaaactggacattgagcacatttggcagaggaact

SEQ ID NO: 11892 - DNA, 17913 bp, Vitis vinifera
  Intron number 11 from transcript GSVIVT01034710001 (locus GSVIVG01034710001) derived from phytozome v7.0 (chr-ID chr 13; pos 8152846 to 8170758 reverse strand)
gtaattatacggtaaaggtaagatttgaaaactcagtgtctgatatacttctaagctcccctcttttgtattttgtgtccaattaactatatggtaattgaatcgcctctgtgagagagcgctatctgctttgtttgtttctatgggctaattcgatactcaaataggaaagttaatctagatggttcttgttgtccacaaccattcctaacttactttattaagatgaattctttgaatagcttggaggagtatgaggttaaagagaaagcctgtttggtttcacttggtggtggttacttcattacataaacccctgagctattggcaacatcatattgtgatacctgatatattgaccacatttagtttagacctccaagtgaaatcataacagatttgttctccactttccttcaatatcttgctcatacaccattttactaacaattattggataaaatgcctgtgtgcttaccactctggatatgagaaagtagtttatctgatctgatgcgagttgtggatactggttagtggaaatgaagagttagtacataatatagactggtactattgctactccttatccaatgaaatgaaaattttctgttgtacgttttgaaatacatcccattttctaagacttcttcataatatttttacttatcagtaagggaaatagaattcgctaccagtagcaattagcttctggggaggatgtagatttgggatctactaaaattgagacttacgtattgattttgctttaattcattgagatttttttttttttttttacaacacgtatagacaattgtgttacaagaaaaggaaactacaattatatacaatcaaaacctagaaagagtcgatgatacgggatagatgaccacccacaaaattgctctatgatatgagtagaagatatttgactttttaaagaagaaacattgaatccccaaaatcctccttatgaattgggggaaaaaagaaaaactttcacaacacttctcctaaagctggtttgaagatatctaccattcctagcttggtaaattatagattggaatagttgccttagaagcccttggttagaacattagcagacggttgttttttttttttttttaaagataaatgacatacaaattaagccattctttggcttttacttaataaagtttttgtccatctcaacgtcttgagttctattgtgttgaacagggttgtgaccaatattgatgactactttattatcacagtagagcctcatagaactatcatgagccaccttatccttcattagctaccttagtcatgttaattcacaaattccatatgctattgacctggattcagcttcaactccttatctagcaacatttggttgttttttacttctctaagttagcaaattgcctacaataaaggtacagtatctaaaagtagatctcctattacttgtagaattttcctaattgacatcagtgtaagcttccacttctaaatgattattcttagagaataaaaatccctttccaggggttcccttcaggtatgtcaatgtcttaaaagtgacattcatgtgatcctcatttggagaatgtataaactgactaacaacacccacaacaaagacaatatcaggtctagtatgggaaaaatggatgagcttgccaactaacctctgatagttttctctactcagaacaatactctctgctgctactccaagtttgtgatttgcatctgttgagtgtctcttggtttacaccccaacatagctatctcctttagtaggtttaggatatacttccattgtgagaaaattatctttctttcatctagcaaccccaacccccaaggaaatatctaagatcacccaaattcttaatttcaaattccttggacaataatcccattggactttctattttgacaacacaattacagattaagataatgtcatcaacgcaaacaataagaataatgattttattgccttcaacatgtttatagaatacggtgtgatcaccttatctttgcatatatcccaacttgttgaccgatttcacaaacttttcaaaccaagctctcaaggattgtttcatacagtggagtgattttttcagcttacaaacttgcttccttccaaaagtttcctcaaagcatggaggtaattccatgtacacttcctcctctagatcatcatagagggacacattctttgcattcaattgctgcagaggtcactctaaattcggagcaagtgataaaagaactcacactatgttcatcttagcaactggtgcaaaagtcacctcctgatagtcaatgttgtaggtttgatggaacccttttactataagtttagccttgtttccattgattgttccatcaactttaaactttaccatcaatgcctatttacaacccattgccctctttttggttggtagttccacaagttcccatggattgttcttatataaggccttcatttcctcttgaatagcctctttctactttggatttgttagagtttcctgtatagttctaggagtattagcataagaaagattagtagcaaaggtcttgaaagattaattaagtctgtcctaagaaacagaattggagatatgatgttgagtacaagagctaataccttttctgagagctattagcacatcaatgtgagattgtgattcataaatgaacgcattatatatagactatcctgaattttttagatccattatgtctgatttaaaggattgatagtgaggaaagctttcaacatctttattccttcaaaagtacacttgctgctctctctttttctttatgattctcatccccataattttgagtagaaattggagtactttttcccttgtggttacggatttgaacattttgttttcaagaaattttttgagtgttctcaaggaaatcaaagatattaggagacaaaaaagagggcaatggaatggataaaatcccccaaaactgatcttccaccttgctactttccccttgaatagaaagatcacttattttcagaaaaaaaaaaaaaaaagtagcatccattgtcacaaaatattttttgaaagaaggatgattacatttgtgccctttttgtgttgggagcatatccaagaaaaagccatttgacaaatttaggattcaacttgataatgaacatgagcaaagacaagacacccaaacacttcaggaggaagagcagagaatatgaagctggacatggaacaaaattctttgagagtattaatgggtgtattgaattttagaacatgagtttgcattctattgatcaaataagaggcccgcaggagagccaatgccctggttaaaattaagataaatggggtgaggcttacagaggaacaagaagtgagggaaggtatcagcctttcagaagcgggagcccttgagtttcctttttctgaggctgagatctatgcagcattaatggggatgaatggggacaaagccccgggtccggatggtttcactgtagccttttggcaaagatgttgggagattgtcaaggaggatgtcttggatatgttcaaggagttccatgaacagaattccttcattaggagtctaaatcatacctttttggtcttgcttccgaagaaaggggggggcggaggacttcggtgactataggccaatcagtttgcttgggggtttgtataaattattggctaaggtgctggccaacaggcttaaaaaggttataggtaaggtgatttctcctgatcagaatgctttcatcaaagggaaacagattcttgacggtttcctaatcgcaaatgaggtaatagactcttggcaaaaaaggggagagaaaggcctaatctgtaaattggacattgagaaggcgtatgatagcatcaattgacaatttttattaaaggttatgcaaaagatgaccttcggatcaaaatggataggatggatgtggagttgtatctccactgtcaaatattcagtgctggtgaatggggttccagctgggttcttctcaagttctaaagggtttaggcaaggggaccccctttcccccttcttatttgtcatgggaatggaagttctaagtgcgctaatcacgagggccgttgaaggggggttcatctatggctgtaggatatggaaaggtagagggcaggccgtcaatatatctcatcttctgtttgcggatgatacaattgtattttgtgaggcaaaaaaagagtccttgttgtatttgagttggattctcttttggtttgaagctgcttcaggtttaaagattaatttggacaaaagcatggtcattccggtaggggatgtggaaggggtgcttgaaatggcggctgaaattgggtgtagggtgggacagctgcccactgtttacttggggctgccccttggggcgcctaatagggcctcctccgtttgggatggggtggaggagaaaatgaggaggaggcttgctctttggaagcgacaatttctgtccaaaggagggagaattactcttataaagagcacgctggccagcattcctttgtatcaaatgtcattattccgtatgcctaaatcagtggcaagaaggcttgaaaaacttcaaagaaactttttgtggggaggagccaatggggggaacaaggctcacctagtcaaatgggaggtggtgtgtgcagataaagaaaagggagggttggggttaaggaagttagtttggttgaacaaagctcttctaggcaaatggatttggaggtttgcgcgcactaaggaggagctttggaaaaaagtgcttgaggctaagtatgggcaagaggagcttgggtggaggacaaggaaggcaaatggggtgtttggagttggagtttggaaggaaatcttgaaggaatccgcttggtgttgggaaaacatggtgttcaaggtgggaaaaggcaataaaataaggttttggattgacccttggtgtggaaacaatgtgctgtcccaaggcttcccggacctcttttccatggctgcccaaaggaacgccacagtggaggaatattgggatcagaatctgggtcaaggagggtggaatttaaggctgttaagagacttcaatgattgggagttggggctggtgggcaatcttttagttgagttgaggaattatagagtaactgtggaggaagactcggttctttggaaggaaggagaggacgggctgtttaaagtcaagaaagcgtataaggtgttggctaatgctgtaggagcggacttccctcatagcaatgtttgggtggacaaagttccaacaaaaattgtttttttttgcttgggaagctacttgggggaaggttcttactttggataggctgcagagaagagggtgacaattccttaaccggtgtttcttgtgtggatgtgaagaggaaacgatcaatcatatcttaattcattgtacggtggcaaaaggattgtgggatatcattcttgtgttgtgtggtgtacagtgggtgtttccaaattctgtaaaggaggttcttagtagttggaaagactcttttgtggggagaaaaaggaaaaaagtatggaaatccatcccgcttttcattttttggacaatatggaaggagaggaataggctagcttttaaagggggtgtgttagcttttcagaagttaaaaacttcgtttgtgtgtaatttttggggttgggctaaattgtaccattgatatggagtcgaattccctaataggtttcttggagtggctagcctccaagtaggggttgggttgtttcgttttttgtttatggggtttgtagcctcgtatacttcctgtatgcttcgcggcttcttgccttctttaatatattcgcttgcttatcaaaaaaaataagaggctgccaaaattggcttccgccacctgatattgtttaggaacctacccccatttgaaacattaaagctcttacaactttaagtaaatgctgttttttttctctcaactgtcccattttgttatagtttgtcaatgcaagatgtttgatggattatccctgtgttcatcaagattagttcctaagatttttgaaaaatcctcttttccattattatttcttaagatacaaatttgggcttaaatctatgtttgaaccatcttgtgaaaattttgaaaggtcttaacaacctcaaatttatttttaaggagatatgttcacaacaaacaaatatggtaatcaatgaaagtaataaaccatctataacatgtgatacttattgacatgacaaaggtcccacaaatcactatgcacaatagaaaaagaacttaattttttgtaaacttgggcatgaaaatgagtatggtgatgtttggaaagctcacaaatttcacattgaaaatctgaaatatttctattcttgaataacaaggcaaactacttccttaggttggcaaaactatgtctcaacctgaagtgccatgatttgatttcatcctcacaaggcaaagaagtctcacattagtgaacccaagatattctccccatagctttaggttccttctcaaggatatataggctatccacatttttaacatcatcaatcctccttcctggagacaattcctgaaatttatagggagcagaaaaaaatttggctgcacaatttaggtctcaagtaagtttgctaattgaaacaagatggcaagataagtttgggacaagtaaaatgggatatagagttagattctttgaaatagataccgaacccttgccagcaactgaggataaagactcattagctattttattatttaatgaccttcaacatggagaataggaagtaaattaatttgaaaaatctatcattagatctgtggtctctgaatcaattatccaagggtctgatttcatttttgaagtattcaaaatagtgaaacattacccatttgttccaagtgacaaaaagaagaaatggtttgtgtttgccttataaatgtataaaagtgattaagttgttccttgaatattctctgagtgtgcagtgacctgattctttggtagttcagcagtggcttgaagtcctttgtcattatttccagaaaacttgtttccttagctcttaccttgaggctttccatgcaacatccagcatgtctttgtatagcattatttgtgactgcgatcacacataacttatcccgttcatcattcttcttgccaacattcctttgcccatttaataaggcatccttgggtttggtagtgactagggtagaattctgtgtttgagtttctcatcatgactaatcaccttctcttctcccttctattggaagcatagacttctcttagtgagggaatgagtttggtgatgactagagggcctcaggtttggtgatgatcatgcaaaattctctatgaggttcctatcatgactaaccacctgctctcttccctcataacataggcataaacttcccatagtgagggaatgggttcttttgctaggatttgaccacgaacctgatctaatatagcattcaggtcttccaaaaaatcaaacacccattccttttctatcacttgttaaccttagcaccctctactacacacttccactcagtcttggtaaagattcatctcttgccatagttggttgatggcgctgtgatagaccatcactgtactcttgtttggtctcatgaacttgacacctcagatcataaagatggcatcattcccaatattagagtagataagtgtcacgacttcttataaatctctaaaaataggagaaaccaagtagctttgattgatatctggttccatggagctgatgagccatgacatgaccatggagttttctgcatcccaagcaaaaaacctcaagccttctggatcccgagtcttccttaaggtatctagcagccccatctcctacccttggtaaaaagcttcacagactgggatgtttagcacttaactttgtttgagaactaagataccttactgcttgatggtcagggtaccacacaaactctcaagataataggtaatacctctaatgacaaagggcttacacatctgtataaaacactttatcattagtgcaatacctctgtttagccacattgagtctttcattgaagtaagtgacaggatgcccttcttgacttaagacatcaactatgccaacacctgatgcatcacatgccacctcaaagacttttgaaaatttcagatggctgaagacatgtgccttgacattttgcattcatctcctcaaatgcctttctttccccgtcattccaatggaactccccttttctcctgtaatcagtactgagagtcattatagtactaaatcccataattaatcacctatagaaagcagtcaatccatgaaaactatggacttcataaatagtcctgggcttaggccacactctaatagatctaactttctaaggatcagtttctatgccctttaaggagattacaactcctaaaaagatcacttggaattgaaggaaataacatttctttagattaacataaaatttttcaatccttaaaagagtgtcaaacacctttctaaggtgatctaaatgctcttcttgagcttgactgtagatcaggatatcatcaaaatagaccactaggaagtaagtttcctatgaaaggaggcaaaacttgtgccataaccctcataaatgtactaggtgcactagataatctaaaaggcatgactgaccactcataaagtccatcttgggtcttaaatatagtttcccactaatcttctgatctaatatggattagtgatgatcactattaatcttggagaactgctcttattttgccataaagtctaacatgtcttctaacctatgggaaacctatactttgcagttatttttttttatggcaccattatctatgaacattttccaagaaccatcatccttagtggtaaacaaggcggggatagtgcaaaggttaagattatattaaataaaactttttctagtagtctatctacttgcctatttgtttcaactctcattgggattcaatccatagtactgaagattaggtagttgagactaaggattaaaatttgttcatttattgttgaaatattgattgaaatatcagcttctagtggcaatggaaacaatttcatagtctgacttttatctcattgattttcggaatttatcttgaacttttgccttttttttcttcgagatttcctgattaatcgcttataaattggcaaatttttcctgcatctcacacttttttcatgcgtgtgtgccacattagcaatgcctaaaaaatttaagtgtggagaggtgaggctcgaacttagccccttcgtgtagaatgatggcacctcatcacttgggcaactttgcccttcttataacatatacaaatattatgtataatcctttttttttgtgatatgtccatgtaattttcatatttcctaattaaatacaagataaacatgaactcgtaaattaaattatgaatgtttgttaataaaaaaaatcatacatatatcatttcttttatatccttgaatatatccaaactagatatacatcattttaacattaaatatgttttcaagttctgcatattattgccaaatattacgaattttatcatacatatattattattcttaaataagataatttcaatgtgtattattgtttttttatcatggggtttttttccaacatttgtatagactacaagttttaattgatttccttcccattgatagttttttcctggatttttgtccaatatttcctcaaatttttggaaaatcaagtcaccaatattttgtcagtctttgatattttcatgcttggctgagaccctagaaccaaatcaatggtgttggtgttgtgccaactggataccgatctgtctagctttatcggagtcagatgaacttattccctgcacaaaaaggatgtccagacaggtagtccagacacgcctctccgaagctaaagtcagaaatcagtaaggatgaattcaactattttgaatggctatgtagcatgtacctttttcatgcttctcgaggggtttttatagaacaaatggtacctttgtcacaacattgattgtgcattcatgcctttcttgcgatgatgattgccatcaaggcggatatcaagccttaataagacagtcaacgccatcatctcagcgcggattggggaatcataccaagcaagagctgttgacgggtgtcatttgttggttgtcgtgcaagaatctcggaccatgtagttgattgtgcatttacgtttgttgatgttgctaattgcatgtaacgactaattgacattgattttgggtataaatgccatctagtctatcgctcaggcatcaagtgtgattaatcatgtgttcaatgcttggaaactttgactgggttagtttgtctgtttggaagtccttgttggcttggtttgtccattccgtttgacattgaggaagaaggaaatttctcacttcttgtaccagatggagcttatttggtccaaacgaattgatcccagatggattatctacttaccttggatgaccaaagggtcttgagtttggaaaggacacgtggagggaagctccccacaaatggtatgttgaatgttctagtaactcactaggtagatttttaggagttatatcttgaatattaactaaaaatttgttgactcagggtgggaatgtaatattggatgctaataactcatgagcaacatgtttaattaccaaggttaatattacacccaaatttttctcctttctcaaactcatttcatgttaaagtatgaaggttttgcttaaaagtttgagtagaaattttaggtgcctaagatgttgaatccattgattgggtcgatgtcttaaattgtggcttgctatccttttcagtgggtttatgtggttttaataggatagactttgcctttggggcttggttcaagtggtaaaggattagggaaggtttgtgagaggttccaagtttaagtcctaaaggggacaaaaaattaccttttagaaaaaaaagaaaaagaaaaaggataggcttgccattataatttaacaagagttttccctaccatgatgggtgacatatgtcatctagttaagggtgacctaagagaataagagcaacatccatggggaagtcatcacaccaaattctatttgaatagtctcccattgtaataggactacaattaagctttatctacctaactctatgtgcatggagatgtggtttaggttgaagtcttgtcctagcaacaatagctttagaaattacattcatgcagtcgttactatcaataataagcttgcaaattttatcctcacatttaatgtgtcaaaaatacatgtgcacttctactcattgccatatgccagagtgaattaaaatatactgcatggcactaacttaggtgtcatcattagcccattcttcaacatcctctccttatttagacacttaatctaggggctcgtaaacttgatcaccatcttcaccttcttgtgaatccttaggctttctatggttagggtgcgatgtagacaatgtaatgctatatgaataatggtgacactctatgttagaactactagactgaggattacttgaagctgactctccacccctatcactactcactccctgactagcattgttattgccacgtaaagtaatttcattggctttagctttgctagtggacctcaaatttatttcctaccctatcctaggataaatgtcaagaatggtaagactccctggattgagaaatcacatgccatcacatgcctctaaacagaaatcctaaggtatctctcaatctctaaaaccttgtgatagacttcctaagttttaggagaatgaaggtttacctttttttgactttttgatctcaacccatcaatgaattttaccatagttactcaatattcctctctcaaattgcatctcaattgaagctcttcaagtagtatgtctcactagggataattgcctaaatttaatgcaccaatctagcaactacctctcataatatgtagggagatatttttctttcatattttatttcattttagtctaaagggtcattgacccattggttcctcacctaaatgctctaggttagactggataccttgccaatatcgcttggtaaaaccaacaactttcattttggtgaagcaaatgcgttggctgttcaacatgtcataccattcaaagtaatcctcaagatcaacttactaattagggaaaacattagggtataaccatccactttaaccttcttgtttatatcacttgaattatccttgagaaatgtctcaaaggtacatgtctaataagctgataaagttcctattgtcacagacttagtctttccctaagctcgtgtggcacttagacaaaccaagacacttgatcttgctaagtcaaccttactcctgatgcttagctcgctaggctaagatgtacacgacttggaagctttagaaggcatagtaggcaatacttaatgaatggaagcttttgttgctctcaaggatactttacaagtgcttaggaagctcacttgcttggtgccttggccaaatgagggcctcacctatttttaggcaccttaggaagtctctagaaccttggagggtttcttacaaatcaagaataatctagaagctcctacactagtctatgtacaaggctatgtacaatatgtctttggaagactctagaacaccccacactattccagtggtctcctagccatgtgtagagatgtgtggacatctctaggcatctctagaagcttccacactcttccatcttgtagctaagtgtagatgactttaggggtctctagaagcttccttcccctatataagcccatggggagggtcatttggagcatcttgtgacactatggtatcctcccatttgttatggtattaaggggtcattgtcatccatgtctcctagtccattattaggattattgttgaatgtgtcattttggactttacttccccctataagtttgctaaagttcttttgtgaagcactaatgcatgtggatacgaggccttggagtgatcttagacttcctaaatggataggattgtggtcattagtaagcattccatcatgagactctccctgattttgtcctttggtggaggaacttgttgactaaactgatgtccttcaattgggatatccctaaactgactggtagttgggagaattgcctagccatgtcagaatgaaattcagtcaattcagaatgaaattctgccaaaaggtcattttagagttggtctattgaactttgttgagataatttgggtcttggattagatgattcatcaaggtccaggaataaagcaagtatagaaaaaaaattatgagattggtgtatggaactttaatttttattttatttatttattttcaaatatgttgatatacttcttaaatcactattaagtagataaatggaaactgctgacatgtgatgtaaaaattaaaatttaataatggaatattttttttaaaggtaaggttaggaaggaagaagacaattaaagagttcaaatagaagaatgaaggttgtaaagtagttcgctaatcagaagatgactcacaaattattgttttttccaaataataaaaaatatgaactttaatgaaaggatacgtagcttgtcaattctttaattagtctctagagtaactgtcatctcataattaaagtttgtaaggtgtgaaattgctattctaaaaccttttatgatggaagttggtttttttttttttttttttgttggatcaattttctctgataccaaattgatgtaggacaatgacaacattttctttgtatagaagagaaattaagataagaatggaattagatgataaaaggagaaattatgagagaataaggagagagagagagagagagaggggggggtgtggggttctcaaattaataatgatccttccattattgtaatcaatcctatttctaagcaattgaatatactaatcctaaaggaaatacaattttagtctagttgaaatattaaagtgataagtattggaactaaattaaaaaagttaattttaataagaatagaaatcctaattttaaggaaaataggaatcctaattcggagcactcttgctagtatgcttatttattttatgtccttgttcactatgcccaggtcggtcagattgagatattagagcagatttagagggacttcctttaatgtggggtggctctagcacggaagcctcacttagtaaactaggggattgtttgcttagataagaggaagggtggtttgggtgttagatgtctatctttgcttaacaaggctcttctttgtaaatagtgttggagctttgtaacaaggctcttctttggaagcagattattagtagaaagtatagtgtagaagaagaggggcggtgctcccgtgaagtgcaagaggggtattgggtgggtctttggaaagctataagaatggaatctcttgagtgacaaaattgattttgaagtgggtaatgccagaagggtgagtttttggaaggataattggtatggtgataaggccttatgtgtttttttcccctccctcttttgctcttacctcttcaaaagaggagcaggtggtggacatatggggctccacaattgagggtggcggttggaatccgatgttctctaggccttttaatgattggaaggtggatattgtggatctcaagaatccaacaaaagagggtatcccaagacttggaagatagggtgctttttatagtgacaaaagtgcgggaagttttctattaagtctctctatgatgctttggagctaggtgatgtagtcccttttccaaggagtatcatttggagcccgtgtgttcctcctaaggtgggtttcttcttttaggaagaagtgtgggacagagccctagctttggatcaggtgaaaaggaggggatggtctttagcaaaggatgcttcctttgccatgtcgaagaagagaccattgaccacattctaattcactgtgctaaggctagggtgttatggcagttactttttgctctctttgaagtgtcctaggtcctgcccttattggttagagagactcttctcggatcacatggatcctttgtgggcaaaaaacgtaaaaaggctttgaaggcgacccttatttgtatttttttagttagtttgaaagccttttgataatgagttgtcggttcaaaggctgaaaactcctttgtttgcactctttgggcttggactaagttgtgtatagatgaagggcctcttcctttttggtgatagttgtatacttcctatatgcttcgggtcaccttttgggtgccttttctacttattcaatacaatcttattttacctatcaaaaaaagatcctaatttaagtgaaaatagaaatccttttcatcctctatgtctacatctagaaaaaaacttgaaatgagttgttttgatccccatcgacatatgtggaggaagtagctactatgttgggttttagagtgggggtgcttccttccacctacctggatctacctttgggtggtgccctttctaaattagcattggtttggatgcggtagaagaagatttcacagaaggcttgctacgtggagaagaaaatatttttcaaaaggtgggaggttaacttggtttaaaagcacctttttttcaacttgatttattttatattgttttttgtcatcctaaggaacgtggacttaagtcttgaaaagattcaaaaagattttctatagggagggggcgctcttgagaaccaagttggttgtctgcttgcatgaaaaagcaacaaggaggtcttggcattaaagatgtctctatcatcaacaaagtgttgcttggcaagtggagtttggataatcttgtcaaagaagtagtctttttgaaagtaggttattattgggaaacttgggatgaaagaggacggttggagttcttgtgaaccaagggacaggttttggggtgggtggaggggttgggtttgggagtggagagtttggaagataatcagaagagggccggtcggacatcttcaaagtagaacctaaaaaggagatggaaggagggtgaagttctagaaggatggatgtgtggtgaatctcctttgagcatttctgcccctttgttgcatgccactgcatccttaaagaatgcataggtggtggatatttaggagcagttaggtaaaggtggacattggaatccacgctgctttggacaactccatggctgagaatcagaaaaagttgagaagtttcttttaaggttgcaagctgaaacaatggtcagaagtgaggatgacgtggttgggatagaagagtcaaaagtttacagtcaaacccttctattcttctccagcagacatagtttggaatccttgggtgccaacaaaggttgggtttctttgcttggaaggtaacatggtggaggatattggatctggataaataacaaaggaggggatgcgattttgtgaatagatgctatttatgcaaagatgcagtagaattagtgaactgcattcttctccactaggcaaaggttggtgttttatggaagctggttttatccttgtttggcattgcatggatgttggcttcttcagtttgtgaggccctccttggttggaagggatcttgtttttttggaaaaagcataagaaggcttggaaggatgctcatttttgtgtgtgtgtgtgtgtatttatatttaacaatttggaagggggaaaatcaaggggcttttgaaaacgtggagtaacagatcaagtgccaaaatctttgtttttttccaccttttttatatggattaggagatttgtagatgagatgtcaatgtctatgatagactttgtagattggttgggttcttgtttaagggaagagtgttgttttcatttctctcttcttattgttgcattttgttgtcctttgtatatgcccagtgtgcttggatgtgtttttttatcaggcactgttaatattatttttgctagcctatcaaaaaaggaaaaaaaaaaaaatcaaagtaccttgtttcctattcacagatttgatcaatacagctataagtgaggaaatctggagaatgtagaattcatcttggaaatagtcaaggatcttattatcaagtagtgttctgaaacctggactacaccaaacatccaaaattcaaactgttggaaccatgaactggtcaaggattccatttgtggatcagcagaaacatcctaaaagtgtaacagtgaaggtttaaaggcttgattctaagatctaagtacgtatgtgccaccatcaagatagtatggggccacgtgaacgtttcttagttacatgaaagtgtcccagagtcataatttgttagtttcttgttgtgggtcccatagttgtttatgtagagaaataggactataatgacgtaagtgaatcatcatatgttgctttcttgtttttcaaccttttacttaggtcttaatcaatggctggaaattctattcaaaggctaggattgggtatagttagcattacaggtttgagaagaggtcatagtaatctcttctggttttagtgaatatacaaattgagaatttgtagtcttaaaatcctttgcttgaaggccttcgtcttcttaatttatctgtggttaaaatttttcttaatttctcttttttgcaggtttgtgattttggtctttcccgttcaaaggcaaa

SEQ ID NO: 11893 - DNA, 28896 bp, Vitis vinifera
  Intron number 2 from transcript GSVIVT01001716001 (locus G SVIVG01001716001) derived from phytozome v7.0 (chr-ID chr1 0_random; pos 397294 to 426189)
tgctggtaatgtcatatccttgtattaatttttattttgatatataaacacatgtttcatgtctgtttgttatacttggaaagtagggttctccttttgtcctgttttgaagtagtatttctgctttggtttttcgggtgcatcatctagctgcttctttatttgatgttcttatatactaggattgtatacccaatttttcaactttaaagagttccatttcactagttgcttgaaatgaactggcaacattcctattgtgaaccttcccatttacaagcacacaaaacactaaggcccttaagcaaattagctccataagaaacattattttggtgcatattttgctcatatatctatggttaaatgtttcatactatttgcacaacaatttttaaattaatcttgtaaataaccaagtgagaaacagaggttggaaccattttgcaaaatatcatggtcaaagcttgtgatttctttttagatctttggatatagttattgaggaattttatttccttttgatttatgattagtgatttgcatatttatcatataaatttataatcatctcactttagggcatttaatagaggtttttatttagaatctaggttataactattgaggaatttaatttcatttttgttgtaatttccatatttattgcttaattttgaattcgcctctctttgcatattaacataggaatttgttgttgaattcatctcattggaaaggaattccaaatagttggtttgggtattgagaaagaactagcaaaattgtattgttgaggatccaagtagcttttcatattacaatacctatgattaaatccattaaagggttttcgctccatttagttatttctataatcatagtggtgatttttcgtgaaataaaggaaatttcactttattaacctagaagtacatatattgcattagcatgtatagagaaaatataaaatcctagaaatctttgatatttgagagatactaggagatattaggaaaattacaatgaaccctaagtaaaaaaatacttaaagacctgtttgggaacatttttttaaaataattctcaaaaaatggttttaaaaattagttctatattatcttctagaatataagtctgtttgagaacttggaatattctcaacttgttttttgtgtttctaaatattctttaaaaataatttttctctataatgctttattttcaatcattcttcatatttgtgcaattatattttaaaacatcctcaaacaataagtgaaaacttctaaaacatttaaattatgttcttagaaaacaccctattttcataacaagttctcaaaaagctattttccattaaaaaaaaaaataccaaatgtgtttttaagtttggaaaacaattcccaaacatgctctaagctactaaactatttttacactactctcaagttgagtcatacatatctataagacacaacttgatacacaaagtagtaaaaagacttctttagtaaacatgtactcattaggatcttaagttttgacatatgaagtgatcactttcttgcttgtcacatcttctcataaacttgagtgtccacattaaccaaggattccacaccattcgataactatgtcatcattgcaaaatcatcttgtttccactcattaaatcccttagattcttttggtggaggatcttctatgaagtgattgaactttccttttgctccaatatacacccatatcacactagttaacaaaagataattaggtccattccattttatggaagctcgaacacatagttgtagaacactagcccacaaaagataactaaggccactcaatttttatgtattaaagagcatgatataaattgtgaactcaaaccctacaagcctaagcttttaggaaaattggtagttcaacatcacataattattttataccatcattgtctattgaatttcatactggttcattattgcgataatcaccaactagataatgaagaacattgtatactgaaaaactttgaagcagagggaaaaaagcaatagttttaacacttgactcatagagccatccaaacacatggaaaagaaccagaacaccgagttatcgactcgattggaatcaatcctacacaacataaaaacaaatcaatctagatggatcatactagaaataaaactataataaccttaatcaacatttatatgttgaggttagagggacagtggagaaaataattttttttttaattctttctaaggtattaatacaaggctatatattgaataaaagttctgactttaaaacctaaacaaggaaacgaagaatctaacaagtaaacaaattaatcctcgcaagattttaagatctatataatattgtacaactatacaacactcccccttaactatggaaatatattacatggttaatgacttgatcccacttcttccaatactcccccttaagttggtgaaaagatatttttcattctcaacttgttagtcatttgttaaaatgctaacctcaggagtcctttagtgagaacatccatcacctgattagtaatacatgtgtatggcatgcatgctttgaccattatctaacttttcctttataaaatgtttatcaacatccacacacttggttcaatcatgatggattgggttatgagctaaggaggatctgtaactcaaggattgtagaggtaattttaaggggctaatagcttcaccttattagattatgaacactagttcatagacatattatatagtagatagcaaactatggactcgagcacttagtttctcgttgtaatatacgtaaggtactagattgtagttgacactttgtaatgggatattgaatcaactttaaaattagattatgaggaagctaatattgtcatatgggtcccaatagtctctgcttgagttcatattccctcatgacatggtttatgagagttggagtggttcttggttcacttatgtgcataagggccttttgataattacacaagattgcacaggagttagtgaatggtatatctagattgggctaattgattaattgaagtcttattgggttaattaatcagttaagatcatttttcggctagattaagtgactcaagctttaggtgggttcaaatcactcaagccaatgagaaagcctataaatacccccttagggataaggcttcatctcttcttccattcaccattctcctacacatctagagagagaaccctagcctccaacattaagaaatttccattatctcaatgctaaggatcaaggatgagtcatcaagtggaagatcagtgggtttgtgagactttctctaaagaaccctagcctccaacattcagaaatttccattatctcagtgctaaggatcacgaatgattcattgagtggaagatcaatgggtttgtgagactttcgatgactattacgcattcgacaacgttcttcaccacaaggatttgatctagaaacttctagatcttcaataagcacactaaacctatttttttctagatttaaaattgttttcgaatgcaattgtttccaatgtgcatagatctagagccctagggagtttttgcatgcacctaacaagatccaaggccatggaataaataatctaggattcccctttcgtcaatctctcacgattacctcttaatacttaagtctcagatccacttatcttatgatcaactgatatactttagttcacaaaggacatatgccaaaccccactaaagaaattactatgaccatatatttcatgatcataaatctttaatatcacctaaggggacaaactatcttaaacctatgagatattgtattacctatattaagaatatttgttgccacctatctaaaccactagtcatgccattcatagggaatgtattatcacctgagaatcctaaccataagtcaaaagtaactaataacctcaacactagcataatattttcttaaggttgagaacctatacaacaaagttgcttgaagtagtcatgacaactcgatagccattttgtcatgactcttcataggtattatttaatgtgtaactgaagaaatttaagagagagaaaaaaatacttcttttaaattttctcacacctttcaaactaattcttgcattgatatttgtatatgaatggctaagaaaaagaaatctaatccttgactttaggggaaaatctctcataaaatcataaaataaaattagaatagaaaacaactatatcacatatgtaacattgttgtggcataactgtagctataacatagctctgcatatagttgtaacttctggatttccacactctctctcaagcttggttgtaaatgttgatcatttctaacttggatcttaagtcttcaaagttgattctagaaagcgctttggtaagaatgtctattgtctagagagttgttgaagtaaattaatgaaatcgtcctttcttttatcctgtccttaataaaatgacgatttatttctacatgctttgttcaatcatgatgaactagattcttagtgatacttatgacaacttaattgtcacataacatctttataaatcttctattggaattttcaactcgtttaagagtctgtttaaccacatttcttcataaattctatgtgccatagctctaaattttgtttctgcgctgctaagaactataacaaattgtttcttgcttcgccaagtaatcaaattcccccatacataggtgcaatatcctgaggttgttcttaggtcaattatggaaccagtctaatctgtatctgaaaaaaaaaaatcaatccttcttttttgtgttcttttgaaatagagtccattttcttgagtcattttgagatatcttagaatacgatgcacaactttcatatgtttctcagttggattgttcatgaattggctaaccatgctgactgaaaaaacaatatttggtcttgtgtaagagagataaatgagttttcccacaagtcttggatatctccctttatccactagaacatgtcctttgaatgttcctagcttagtagtttagtccataggtgtgtttgtaggtttacacccaagcatcctagtctcctttagcaagtctaggacatacttatgctaggagactacaatacctattttttatctagcaatttccatcccaagaaaatatttaagattctcgaggtctttaatttcgaactcatggacaagaaaactcttgagcttgcctatttcttcttcatgatctccaattctttcctcataaacaatgataatgtcaattctttcctcagcagtgtgttttacaaatagagtgtggttagactaacactaggagtaaccaaacctctttatggcattggtgaaatgatcaaaccaagctcgaggagattgtttgagatcatatagagattttttttaatttgcaaaccttgttaatggttgacttggtctcaagacctgaaagaatttccatatacacttcttcgtttaagttaccattgaggaagatattcttgatgtccaattgatgaagagtccaatctcaattaacaactagcgacaatagaacgcaaattgtgttcaatttggcaattacagcaaaggtttcttggtagccaattccgtaggattacataaatctcttagcaattatccaagctttatacctgttaacactcccatttgctttgtacttgactatgaagatccacttactctcaccggattcttcccttttggaagttcagcaagcttcaatgccccattcttttcaagagctcgaatctcttccttaatgattgtcttccattcaggtatttgtaaagcttcctagatattgttgggaatccatatatcagtaagattggcaacaaaagcacgataactttgtgacaaactcttgtgggagataaagttattaatcaaatgatttgtgcaaaatcttactcctttccttttgatgatggcaaattgagctcatcatcttttgactgattaggattagaatcaatgttacctaagagtgtctcttttaggactgaattcggttcaatttcatgtactagcttgggatatttttattgttctatattttcttgagacttctttttccttaagtagacaatgaactcactgctattgacagtctgagattggtttaggtgaagaggagtacttggcttggtgtctatgaattcggtagtttggagcgagagacttgaagtaggagagatagggttagagttgtaaacaataacagactcaagtgttgcggtttagtcatggtttctatttcccaaaactagtattcttgaattctattctccgcctaaatatcaggtttaaagtaatatgactaattttcaaagaatgtcacatctatggaggtgtagaacttttttgtgatggaagagcaatacttatagtccttctagtttggcgagtatcctagaaaaatacacttagtggccttgggatcaagcttactttgatgctattggggaatgtgaacaaaggctgagcaaccaaatacctctagtggaatggaggaaatgagttgagtcttagggtatgatttcagaaagactttgtatagtgtttggaaactcaagacatgagaagacattctattgatgagataggtttcagtaagtacaacttctcttaaaaaattctttaggacatgggaggagagtgtaagagcctttgcaacttctaaaaagtgtctattctttctttcggctatattattttgttgagaagtatcaatacaagaactttgatgaactataccttcttttaacaagaattcccctatgatagaattgaaataatctctttcattgtcacttttcaacacttgtattttgtcatggaactgagtttggatcatgttataaaattttttgaaaatttgagccacttctaatttttcattcatcaggaatatccaggaaattctaatatgatcatctataaaggatacaaactatctagtctctgttatgttccttatcttatatggtctccaaacatcactatgtattatgaaaaaatgatgagatagtttgtatggttgaattggataggacttgcgatcatgcttagataattgacaaatttcacactgaaacccatttgaacttttagtgaataatgatggaaagagttttttgagatacaagaaagtaggatgtcctagacgatagtgtcattacataacatcagtatctttattagaactaaagacaaaaaaagattgtttttcaccaattgttggttgaagttgtctttcaatataatcaatcactatgaagatatagaatcccaaacacaccttagtattgtcaatcgttttcctcgaattcaaatcctgaaaagtatagtggtttgaaagaaatttagtaacacaattcttttcttgaatgagtttactaatggaaaatagattacaatctaaatttggaaccaaaataacaaagttaggtccttagagatgacaatagaacctgtaccggccacttttgaaagagaaccattagctatacgaaccgtataatcctcagagcaaggtttataattttgaaaaattatggcatcttcaaccatgtgatcagaagcttttgagtcaacaatccaaggagtcaaattttccttctttatttttagggtagcaagaaaattacctttttgagcaaggatcttgacccaacgatagaattgaaggaatttgattcctattgggactaattgaacattttttgcaacagtttcaattgttctttgttgaacgaattggaattaggtggtgttgggttgtactcaatagtgacatggtgtcctaaactttctttatcattttaaggacatgaaggcttccaatctggtggtttcctattgattttttagcacgtgtccttggtatgacctggttttcagcagtgatcgcaccaaagtctcccttttcttggtcgattatcgttagagagattgagaggaccccgagtcactagggttgaaccctcggtgagaggttgattggtttgtgaccctaccatgactttctttctactttcttcttagcgcacttctaaggcaacttctcggatgttgggtaaaggtttagttcccaatattctgcctcgaacttcatccatatttttgtttaatcctaacaaaaaatttgtaggtccatttcttcttaatgatcttcttgtatttgattgcattggttgggcagtcccatttgatggtttcaaacatgttcaactattgctaacagctaggtaaaagattgaaatattgagtgacagacaactcaccttagtgtaaatcatggagggtcccttctacttcaaatgcttctattgtgtcttttgtatcggaacaagtctctcttgctacttcccagatttattgtgtcgtttcatagagtataaaattttcctttatgtcattattcattgagttaattaaccaagacataaccatattattctcaaccttccatgctttgaatttccgattttcttttgtaagtcgaggcattacaccgatgaggtagtcatccttctctctacaacatatgaacatcatgactgcatgggaccattgaagatggttttgcccatttgttttatgtctagtaatgacaagagtgacaccatccgatccttcattgtttcttgagtggaggtgacttctaaggttgaagagtccttggtggccattctgtatttggtcatggatggattgaatggttcagaattaactctaataccatgaaggaatttgagagagagagaaaaaatacttctttttatttttctcacaccttccaaaattattcttgcatcgatatttatacatgaatgtttgagatcatttgctcaagaaaaaaaaaatctaattgattgtaggagaaaatctctcataaaatcaagaaataaaattagaataaaaaacactatatcacaactgtgcatacaactgtggcactgttctaacatagctgtaacacaattgtgcatacaactatacattttagatttccatagtaaccatatacactagcacactaatcataagaaactcatcctaatgatcaaaacaagttataccattgattagaaggtagtgcactatgacttctaatggattgcttaagtctatgaaccaatcgtgaacaatgtaaggaacctacgacttgagtctattgtgcaacttctaatgcactcaagtcatgtacaagacctaaatgctcaaatatgctacaatgcaaataggatagaaaagtgaaattgatataatataaatatataatgaattcaaatgttactatagagaattggtcaagaatcatttttcttaaactatagtttgggttgtaattgtatattagttggctaatctgatttctgtaatttattagtcaagatattaaaggaaattagttgtattaactgtagagatacgttagtcttcagagcctagctggtagtctttatttccttttttatttttagcaacaccatgtatatattcaacaccgtataccaattttataatcaatgaaaaatctaaaaatcttttcctaagaaaaccacatggtattagagccaaatattcagccaaagagtgagtgatatcgccatcttcttgagaaagagatggcggagaaaggagctaagacaggtgagaagccagcgactagttcgaatccctctctaactgaaaacccagcaattcaaataacaacccacaagctgaacggagaaaattttctccgatgggcacaatcagtacaattcttcataagtggcagaggcaagatgagggtatttggatgacacacaagcctgttttgcatggagaagctgggtatgaaacctgatttgttgaaaactcaatggtgatggcttggttgatcaattctatggagccagaaatcagccaagggtatatactttacaccacaacaaagaagatttgggatacaactaatctaatgtactcaaatctaggaaacaactttaaactctatgagttgagtgcaaaggcaagggcaattcaacaaggagacttgttggtaatggtctttaaatattttgtatcaagaaattgatttgtaccaagatattatgtggaaagacccggaggatcacgccacttactgaaacttgatcgaaaaggaaagtctttaaattcctttctggtttgcggtctaaatttgatcaagaaaggggtaggattttgagtagctcacccattccatctcttcgggaggtcttcaacttgataaggagagaagagagttgcatgggctttatgatgagtggaccaaattcaaccacagctgaaacatctgcattatcaacaacaaatcagctgactgcaggaaacaaaaatattggagcaaatttggtctatgttgtggggaaaaatgcagggaagaaggatgacaaagatagtttatgatgcgaccattgctaaaaaccacgacacactagagatagtttctattcatgggagactagggaatttaccctagaactttagaagaggggcgtggctggaataatggtggtggaggacgaggctagaccccaagatcaggtgggggccgaggcttccaagcagtagcagatttttcaaaacagcctaagcaaggtgatactgaagttccaaaccttactgaagaatttctgaattccttccttgatcttttcggtacacaccatacacatatatatacacaaatgactgaataaaaaaaaaatcaatctagcttgattctctcttaaaattaggaaactgaatcctaaggaaatatcctaaatgatctctccttttttattcctaaaatactttcttaaattaaaaccctaactttgaatgccaaatttcaacactccccctcaagctggagaatatatatcatataatcccagcttgcaagttaagtcttcgaagttaggcctaggtaaagctttggtgaggatgtcagcggtttggtgcttggtaggaacgtagttcaatgtaaccgtctcactagtcaccttctctgtgatgaagtgtctgtcaatcttaacgtgcttggtcctgtcatgatgcacggggttctttgctatgcttatagctgcctgattatcacacatcatcaaaatcggagataaactcgtttgtcccagttcactaagaaccctttttatccaaatcccttcacagattccctgtgctagagctctgtacttaacttctgcactacttctggctacaactgattgcttcttactcctccaggtaacaagatttccccagacaaaagaacagtatccagaagtggaccgcctgtcaatgatgtttcctgcccaatccgcatctgagtatacttcagtgtcacgattctctgtctttctgaagaatagacctttcgctggtgtcatttttaaatatctaagaatcctgtagactgcttccatgtgttcctcagtggggttgtgcatgaattgacttacaacactcactgcaaagccaatatctggccgagtgtgtgagagataaatcaagcgcccgacgagtcgttgatatctccccctgtctaccggcgtactctctttctcgataccaagtttcttctgactatccatagtagtatcaattggtttgcttccaagcataccggtctccttaagaagatcgagtatgtattttctttgagagactacaattcccttccttgatctagccacttccataccaaggaaatatttcaaatttccaaggtctttaacttcaaactcttctgacaaatacttcttcaaattctgtaattcctccatatcattcccagatagaataatatcatcgacatagactatcaatatggccattttcccggcatgagacttcttgacaaatagagtatgatcagcctgaccttgtttgtagcccagcttcaagactgcctttgtgaatctatcaaaccaggctcggggtgattgtttaaggtcatacaaggatttttggagtttgcaaacctgattctttgccatacttccttcgaaaccatgtggtatttccatgtagacttcctcttctaggtcaccatttagaaacgcattttttatgtccagttgttgcaagcaccaatcgtgattgacagccaatgagagaagaatcctgatagtgttcagttttgcaacaggagcaaaagtctcctgatagtctatcccataggattgtgtaaaccctctagctaccaaatgagccttgaatctctcgactgatccatctgctttgtattttatggagaaaatccacttgcaccccatgggcctcttcccaaccggcaaatctgtgatagtccatgtcccattcttctcaagtgcatcaatctcatcttgtactgccttcttccattctgaaattttgaatgcctcttgtattgtgttgggaacctgagtatcatcaagagaagtagcaaatgctctgtaagatggtgatagcccttcatacgtaacataattcccaattggatgatctgtacatctcctaacacccttccttaatgtaatcggcagagtacaatcatcaatgctgggaattaacacctctccagccctatcctcacctatgttctcttcaggtagacttgaaatggagtcaatatattggccacatgttggctgtgatccgtgctctaattcctgtcttttcctcctcctgatgtaaacttgtaagttctcattagcaagttgtggggctataggttgaataggcatgggagactggatggtcacgagagaaggaacatttgtgggctgggctggctggactgatgacagcatgggtgtggacaactcaatgagcgcggattgggaaggatttggtgactctgagtaagaaaaaaggtacagcctcaagaagagactcccaaacttgatgttcattcatgctctcctcctgaacatgagatttgggatagaagaagacatgttcaaagaaagagacgtccatggtggtgtaaaatcttttgttggttggagaatagcatttgtacccttttttggttggagaataccctaggaaaatgcacttattggctcgaggagcaaatttgctacgattttgaggatacacatgaacgaatgtcgtgcaaccaaatactttgagtggtaaatcagaagaggctgcacgggtgtgagggaattttttaagagaagttgacgtggggattgaaaggtaagcactctggatggcatacggttaatcaaataggtagctgtgagaatggcttccccccagaaatagtttggaacattagaggaaaacataaggcaccgggcaacctccaagagatgtctattcttgcgttcaaccaccccattttgttgtggggtgtcaacgcaagaacttatgtggataatgccgtgattttgaagataactactgagactactagtaaagtattcctttgcattatctgacttgaggacttgaattttggaattgaattgattttgaaccataagattgaaggtttgaaaaatgtgcccgacctctgacttttctttcataagaaaaacccatgttacccgtgtatgatcattaacgaatgtcacaaaccatcgagtgccagaaatattttttatctgtgagggaccccacacatcactatgtactaaagagaaaacaatcgaaggtttgtatgggatttgatgatatactgttcgagtatgctttgcaaactgacaaattttacaatgataagatgctggattttttttttaataaataatttgggaaacaattttgcaaggtaaacaaaggtatgatgaccaaggcgatagtgtaacattataatctcactatctttattgaccttagaatttgacacagaattgaaagactctaacatactctgagactaaacgcaacttgcttgagagacttggtttgagaattggccacaagggaggaggtagagcccggaacatagttcagcactgccaatcatcttccccgatttcaagtcctgaaaagcacacaagtttggataaaatttagtaacacattggagatcacgggccaattttctaatggacaaaagattacaatccaagtttggaacatggaggacagagtcaagatacaagtctttagtaagttttatggaacctgtcccggcaatttttgactttgaaccatcagcaatatggacggatgaatgaccattacttggcttgtaattttgaagaatagcagcatctcctgtcatgtgatcagaagcacctgtgcccactatccacggcttcattcctcgattagcagtgaaggctatccaggtgataacccgactcttggtagcttggcatgtaagggtatcaacaaaatttatacctaaggtccttacactaaagtagcaaagctactgtagcatagtggctctaggatcgaacactgggaagggtttttactttaactggtgaagttcggaggatggagtgaacttttcttaataaaaattaggttaagatgaaaacataaaaagatgaaggtgtcgtaaactaaactaacatgaaaataggttaaaagatggaaaaagaagtttctcaaagctttggatagccatgcttaactcactgtgtaaaaatggagattttgggacttttcacctcgagttggggaagcaactaaggtgatgcttacttcccgaaccggtatgagtttaacaactgagttttagtccttgaaaacttacaaaaagggtagctgaacctcataaatgctcttttattgatataggtcatctcctcgacttgcaatacaatggctcgtaggagataactaatgaacgtcagtggatctaacaataagaatccactgagaccaaaagattatcaagtattggccattcaaagcaagtcagagggattaaaagctttactttgaatgaaaacatttatgacgctcagctacttacatttatggcttggaaatctccatcctgacacgggagcttcacatggaatccattacttcaagaaactaaaaggttttagcctctcatccttggggatttcatcccccaaggatgtttggctactaagaaaatgagaaagaaaagagaaaagaagcgtatgaacaaaagtgctcttataacttataaagttacaggttacaagattcgatgatgtctgaggctctttacctctatttaaagacaataaaaagctaaattacaagagctattacaaaagcaaccttttcattggttgattacaagggtaaaataggtatttacaaagctaaaaatcaagcaaaatatcttggagaaccggcagtggaataacatcaacaacgtctcaaaacaggggattcaaaggaatttcgcaatgtgcctaaatccacttgcgaaattttcgcaaggtgggtcttcatggtgcgaaatggcaaaatttcgcaccatgaagaaaatccccttgcgaaattttcgcaaggtgaatttgacatgatgcagttgtcttccgaaggccatatcttcctcatttcagctccaaatcatacacggtttgaagagttggattcttgacttcataagatttcaaatggtatatagcatgcaaaaaatagacttcgggaagtgcttcaaaagtgcgaaagaagactgcagctgttttcttcactctgttttcctcttctccattgcttgtgctcgtgtttccacttgaaattcaagcctataattgtccaaaatccttgcttaactggcccaaatagctcctccatcaattggcatgcttgaattggttcataagctaataaaaacatgtaaacttgccacaaaatggttaaaaccaattactaaggaccttaatgaattaattgggttaaatgaatatgattactacttaaaggtgcttaaaaccattataattagatctacaaaatagcactttttggtagtaatcaccaggtagtactgccactgccaacttggcttaatagtttctgtagcatctccatctgctctttgttgaatggactcggctcgggaacagatgtgctctcagagttggcagccacgtgtgctctgccatctctgtcaaaccgtggatttggtttccaatcatccggtttgccatgaagcttccagcaagcctccttataatggtctagtttcttacaataatcacaccaaggcctatcccgtttctgacgatctccaccactactgttaaatgaccgagcaacaagggtagaggcatccaatgttggggcaggttgctctttggatcccatcatcactttctttctactttcttcaatagctgaatatggttgatggaaattgggaagaggagaaaatcagagataccggcctaatggaaaagaaaaacaaccgaggcaccaccggaaagatagaagaacacttcccaaggcacgtgcagggattggggttgagaaaaaaatagccggaggacgtcggaaaaactgttcggagggcccgcggaagcaaaagaactccaaaagaggcacgtgcagggctcggatggcagaaacaggtatgaaggatggctagtcgacgtcaggcgaggctggaagaggaagcgtgttgccggaaagtggctcacgcgccctcacgcaccggcgcgtgagatgcagtcgccggccggaaaaacgcgcgtggctggcgcgtgggtggttttctggctccggtgctttgggaaaaattggagatctcctccaggcgctccttgcggtgtgagaaaaagacgtcgccggaaaagttcgccggaaaagtcgcaggcggaatgttttctgacgacgattcgactgactggaaagcgttttctcccttggctatgagaacagggactgatggccggaatgagagatggccagagagagagatggtcagattgagagatggtctgatagacttggccggaatgaatgatggcctgaataagaggcggccagaagggattagggtttcagaaaactggctctgataccatgaagaatttctgaattcctttcttgatcttttcggtacacaccatacacatatatatacacaaatgactgaataaaaaaaaaaatcaatctagcttgattctctcctaaaattaggaaactgaatcctaaggaaatatcctaaatgatctctccttttttattcctaaaatactttcctaaattaaaaccctaactttgaatgccaaatttcaataccttaccaaggagcaacatgagcaattctataggtttatattccaaaattcctaaaatattccctcctcggtcaagtaattttaatacaaccctttctactacatacttgaaatctcactcccgcatcataaatttaggagcaatcaatcatatgacaaggaatccaagtatgttttgttcttacactccttttaatgggactcgaacagtaaaaattgttgatgttccttaactaaagtaaaaggaataggcactattcaaatttctaagaacctgagtcttacatctatattacatgtgcctaacttttcttataacttgtttccattagaaaacttaccaaagacttgaattgcattgctaattttctcccaaaccattgtatttttcaagatttgtgtatggggaagaagattggaagtgctagggaggttgatggactatttttttttttttttttattggaaacgacaaagagatatattgataaaaataagaagtacaagagaaggatgaggaatcctcccaccaaagaaaaactaaacaacattaatatgaaaacaagaagttacaaagtaaaaacaaacaaactctctaggttagaccaacctgttggaactacacactgctagccaatctagttgtaacacgttaaggggaatgcccttaaaaaccatggaacaaaaagcccaaagagaagcaaggaagtgaatggaatcccaaagattctctgaattccttactttatcctcaaatatcctcgcgtttctttcccgccacacaacccaatttaaagcaatgcatgcagcttcccacaaaactatctctctcttggataatccaaaacctttataattgatggacataatgttggagatgcttctcgggggaacccgatccatcttggctaactgaaataatttgtgccacaaccccatcgtcaaagaataatgtaggaaaagatgatctgctaattctccatgctttatacacaacttacaaatgtcaggactaagagcttggtagggtcttctcaattgtagcaagtcattagtatttaccttcttgtgtgccactaagcagacaaatgacttgactttaaaagggacttgagaattcaatacaaacttagtagggaaaactagagaagaatcggaaaggtgggacaaggctagaagaaaagacttgactgtaaaaagccctgaagaatataaagactagaatctcgcatctgaaaccgatggggataaatgcaaacgatcaagtgaccgcatgaagctttctaaaccttctatctaagaatcgaaaaggttgcgatgaatattaaagttccaagagaaggggtgagcagaaccgaggattgaagataaaagaatatttttatccgtgactactctaaatagtcttggatattggaaacccaaaggttggtccccccaccacaagtcttcccaaaactaaattcttttcccatctcctaccacaaactgagtatacttggaaaaatcctaaaagacttgtgcaatagccttccaaggacaacgatgtgaccaccttgactatagtgttggcatcccaatcattgcaatgtgtcccataaatgcttaaaatgacctgatgccacagcgctgaactcttcctaggatacctccacaaccatttccctaagagcacgagattccttggagaaatcttcccaaatcccaatcccccttttaccttcggattacacactacatcccaactaacaagatgatctcttttaccttccccaatccttgaccataggaaatccctttgcaatttctcaacttttgcaaccactgaagtgggaatcttaaacaaggatagaatgtaactaggaatgtgggaaagtcatgaatggataagagttatcctacctccaaaagataagtaagccttttgtcacccatctaatctccgcgagattctctcaatcactggatccgaaaatccacaagcccttggattccctcccaaaggaagacccaggtagagtataggccaatcagaagctttacaatcaagcaactcggccaacctagaaaagtgattctgatcaaggttgatgccaaaaagattactcttgtcaagattgaccttaagcccaaaaatatgcccaaacactaacaataaactcttgagagtttacatatcttcctcataagtgttagaaaagaaaatggtatcatctgcgaattgcagatgggacacccttgttctattcctacctaccttgaaaccctccaacaaacctctttcctctactctcaacaacatcttactcaatacatctgcgatgatagtaaacaaaaaatgggatagaggatcaccttgtcttaatcctctagttgccttgacccaccctttagcgtttccattcactagaattgcataagagaccatagacaaacaacctctcatccaggtcctctatctagttttaaaccacttcttctccaacatgtgataaaaaaaatcccaactcatatggtcgtaagccttttcaaagtctattttgaagacaactccttcccccctgatcatcttttctcatccactatctcattggttataagaactgcgtccaaaatttgtctcccttgaacaaaagcaccttgtgtagaatggatagtttcatgtagtacccctcttaaacgcctagatagaactttgactattatcttatagagacaagtgatcaagctaataggtctaaagtctgagattttctttgttaggctttttttaggcaaaagaacaataaatgaggcattagtgctttgattgataatcccatttctgtgaaactctgcgagcaccctcactaaatcttccttgatcacatcccatcaatcttgaaatactgcattggtaaatccatcaggccccggtgccttatccctatctaactgaaaaatggctttagaaatctcttcttcagtaaaagggtaatccaaccttgaagcattcttttctgagataggagaccaatctaagccttgtactctccaagactctccaggaggactcaagtagagcttttcaaaataaagtaaaatctcctctgtgatgctttcagaattattcaacactaaacctctttcattctctaaaaacttgacgaaattcctatttcgtctgccattagccactttgtgaaaaactttgaattgcaatccccttctttaacccatttcaccctagctttttgtctccaataaatttcttccctcaaaattaattcctctagctcccttcttcttaaagctctttaagctgaaagttcaaaagtgagaactccttcttgctcaacggcatcaatgttagttatttcattcaggatgctttttttcctttcatttagctctccaaaagaatccttattccaacctttcaatttggccttaacaaattgtaacttcctcatgaacttgtgacgttctccaccaactactgaagcactctttgaaactaagatgttgcagccacatattctcaaacctaaaaggtgttaggccccacttgaaaggattggtatgcaaaactatcaaccaatgatccaatgtctatctaggaagaacttcttgaaggcttcgagggaagaaattctcccactcatttgagtaaagaaaccgatccaatctcttacataaaggtgactcttgcatatttgaccaagtgaatgggaagttccgtaaaagggggtcaagtaattcactgtctcttataaaaccatcaaagtccctcatgctagaagttaaactagagcctcccaatttttctgaacttctccttatatcattaaaatcaccgcccacacaccataaaggaacggaagggccaaaaatgtctaaaagctccacccaaaaatccttcctaagtaaatgactgtttgggccataaattgtggacagccatagcagtctgcaaccatccaacacaaacttgactaagacagaaaatgagcctattaccacctcctcattgcacggttttttagagtcccaaataatcaaaatcccacttgaagccccactcgccggaagagcaacccactccttatttctaaccgtccagacactaccaacaaaccttctgtcacacacctccctttttgtttcttgaatcatcacaacatccggattctctagcctaaaaaattcttaaaaccacccttcgttttttcctagatcctaaacccctggtattccagctaatgattttcatggataaacctcgctaaccctaaacctccataccaattccaacaagtctcaaatacttgtggagaatctgttctttcgcctagaatacaccttaatatctagagaacttaagacctaacggactttagccattttcctaggggaaaggccttctatttggaactcgcccaatcgggagaactcagcttcaccctggctaactataaccaggttggaggcctcattaggtgtgctgggcaaagtcttaagggggttaataccctcggccatttggttcaaataagctatttgggactccacaacatctaggttaggattgcgaatagacacttgacaaaaagcaccatcgttgttttttggaaaaaaaatttggaaataactcgagttttcataggatagtgagaataaatgactgaactgggaagaacgggaacagaaggactcagagatggaagaggcaagccaaagggagggggaaaagtagacaaagatgactgagaatgtgaagacgaagatacctccaagttttctgctaccaacattccataagtccccacaaagttgagccctttttctctgattactggaatagaaggaaaaattgtgactgatgagccacgatgatcaaaacccacgtggcccttatagcttgctctgtcttcaacgttgggggatttgctcaaaactgcgtctcctcttaacgacgaagcccttttccccaaacacctctttcggaaccctgatgatcgacaacaagtgagtggacacacactgaaccctcgttccatatgtgttcccgctccaaaagcaactacctttggaggattttcacaatccaacgaaggcttctaatgcgttagaggctcgcttcggcttcgaaacccttgttggcagccagaacttggaggaaaaagagtagtctacaactcctttgaaccaaaattcaccgcagagcccctcagctgagcatcagggacctctgagactaacatcccatttccctttgcagaggagtcttctcttcgtaaagagcccttctaaaaaatgggcttttttcctctcgtttcttggcccaacttcgaaagcgggccatttaatttaacgcccctctcccagcccaagttttcttctaccagtggactgggattaagaggaggttgggcccttctctcttgctttgaattagaggcccaatgtccttcctcatcaattgagtaggccttgttcccttcagccctaacttcgtcatcctgctttgacccagtaggccctaaactttgattgtttgaattcaaaatgaacgacgaggagggttggaaccagctgttccccacttccgatcttctcttgccatgtgtccccataggaattgcttcagtctttttcctttctcctcccttcatcattctgctagttgccctaacaaaagaaattcctttagccgttgatctagctcccttaacccgtcttccaccacctgtccacgagtgaggcttaaaatcctcccgagtcaactcactcatttctctacctcgcctaacatcttcaactccgaccactgcaattgaaattgtgaacacccatccccatctaacacctcgatcaaagttgggagaactgttcgttccttcattaaaattctcaccctcgccttgcaaagatcaaacaatttcaacgttcaccaatcgatttttgtcaccgtcccccactactccacaattttcttcaaatgttccttagactataaatgaaagggcaatccccgtaattcaatccatcctcctctgaacttccccacgacttctgaatttttccttggcaaccactttctcaactggactgtatactcccccccttaatcttgagaaaccttaaatcctggagagagagagcttcctctatcatttctacaaaaaataaacattttctacctgagaaggggccgatagtcaccacacctttttgccttaatctttttgccagagcatggccaacctcaacccagttgacaaaatctattggacattcgcacaccacagctctcgcgccacctcctaactggaacaaggcctcctctcctcagtccttcttctctgactacattcgcgaaggaccggtacaaaggacccatatgtttgtggataaaactttcctccttgcactgccttcccttttcatctatattcgaggaggggaccactagcatggaagacaacgcgctttttagttgctcccaacctctgcccttctcgccctcaggaattaccaagaaagttgactttctgttggaggcgaactttgaaagccttataaaccttccatggttgttgaagcagacctccattaaatggacactggattttcccctgtatttcctgtagaaacccatgcaactcttcagttcgatggccttcgtcaaatgttcgatcaaccacccaacctctttcttctcaaaacctaaggtgaaaacatagcctctattgtgctctgtaagcgagcaccattttccatcggactcgctttcaagcctaaccaagaagatcttcctctccacagagaccttcaacgtccttaccattctcttagatgaaaaaatgcaaggtgatgaaataaaaagggtgtatcaagttgaaagtagtataggagagaataaagaaatctagttgtggcattgtagactagggcgccctagttccctttatctaaaactgttgtttcctaatctattcaagaataaagatatttctcaatttacatgtgagaattgtcagtatgccaaacaccatagggcttcttttcccattaaaatttatgaaaaatcttgccttttcatgttaattcagagtgatatttagggatcctctcatgttaaaactaatattgaagttcgttggtttataacattcattgatgatcacactatggtgtaatgggtgtatttgttgaaagaaaattctaaagttgctagtgtgtttaaacaatttcacaagatgatcttaaatcaatttgaaaccaacattaaaatccttcgcacagataatgggagagagtatactcaaatattctaggagagtatctacaaaaagaaagaatcattcatcattcatcatgtattgacactccacaataaaatggagtgtcagagaaaaaaaaaatcatcaccttcttgaagttgctcatgccatgatgttctaaatgaatttccaaaggtgttttgacagcatcttatttgctcaatagaatgctaacccctgtcctaaaatataaaactctcataaatagcctaaaacaatgtttccctacctctcataatttgttttcatccctaactcttaaggtttttggttcaacaacttttgtctatatccatggccacaataatagcaagtttgatcctaggacacaaaaatgcattttccttggatattacccaactcaaaacgactatatcacccacaatcatgaaagtattttacgtctatggatgtatctttctttgagaactagccttacaacacccaaaattctctttaaggggagattagaagagaagagaatttttgggaagtaccctaaggaaaggagtcagggagagagataggagaaattggaggaattcttgaaaacatttcaattgaagaaaaaacggaaggacgagagccaaaaattgaaaaaaaacaaggaagagagccaaaacaaaaaattgagaagaaatggattacatattccaagagaaggggaataaatccatcacctcctgtagagagtcaatcttcaactctgtaaaagagccaaacactcaggtaaatccaactcctaaacccttgtttaatgatcttgatttacctattgctcttagaaaatctagtcgatcctatacacaacatcctttgctcaatttgcttcctatggtgctctaaatgactcatttagatcatttatcactaatttatctcgtgttagtattcctcgtgatgttcatgaagcattgtaggttctagaatggcaagaaacagttaatgaagagatgaaagttgtctttaaaaatcatacttgggaagttattgaccatttaacaggaaagaaaccagtggggtgcaagtgggtgttcacagtcaagttcaaagcagatgaaagcatagaaagacataaagaaagactaatggctaaaggttatacccggacatttggtattgattaccaggagacctttgccccagtagcaaagatgaatatagtgagagtcttacaatatattgtagcgaagttgaactcgactctacaacaacttgatgtaaaaaatgccttcttacatggtgatttggaagaagaggtgttcatggagttgccaccaggttttgaagatcaattgggtagatgaaaaatgtgtaggttgaagaaatctttgtatggcttaaagcagtcaccaagggcttggttcaaaaaattcattcaattggtgaagagcgtgggatataccaggggcagaccgaccacatgatgttttacaaacattcttgtaatggtaaaataactattttgatagtttatgttgatgacattatcctcacaggaagtgatgagggagagatgttgagattgaagaaagctttggcacaatcatttgaaatcaaagacctgggaaacttgcgatatttcttggatattgaggtagcttgatcaagaaagggaattgtcttgtctcaaaggaagtatgttctagatcttcttgaagagacaagcatgttaggatgtaaacctattgacaccctaatagatgtaaacatcaagatgagtactcatacatgtcgtaagaaggttgataaataaggttattaaagactcgtggggaagttaatttacctcttggacacttgtccagacattgcctttgctatcagtttagtaagccaatttatgcacaatcccaaataagattatctacaagtagtatttagaatcctaaggtatctcaaaggctctcctagaagaggactgttattctctaaacaagacaagaggttagatgtggaagcttttactgatgctgattgggtaagttgtgtagatgataaaaggtctaccttaggttattgtacattcctaggagggaatctaataacgtagagaagtaagaagcaaacagttgttgcaaggtctagcatagaagctaaatttagagcattggctcttggaatttgtgagcttatctagataaagttattgatgagtgaattgagaatacccctaatgataccaatgaagctctactgtgacaataaggctgccattagtattgcatataaccaagttcaacatgatggaaccaagtacatggagattgatcgacacttcatcaaagagaagatagaagttgggcttataaacttgtctcatgtttcttcaagtaattaggtggcagatatattaacaaaagggcttactggacatcaattcaaggagtttacaagcaagttgggactggaagatatctaccatcctgcttgagggggagtgtagagaattagtcaagaatcatttttcctaaattagagttttggctataattgtatattagctggctaatctaatttctataatttattagtcaagatattataagaaattagttgtaatagttgtagagatacgttaatcttcatagcctagctggtggtagtattcatttccttttttattcttagcaacatcatgtatatattcagccctatataccaattttataatcaatgaaaaatctagaaatcttttccttagaaaaccacagttacattatatcattgcttttaaaggctctgtcttaaaaatcaaaacattgcttgaactcttagatggggaagtccttggaactttatgaaacatctaacactagtttagattggaattggaaacctaaatgtacaacataaatgagttatgtttccctttagtttcatcatgtgcaagtgttctatttggtttcatatttttgttttaccatttgggcaaaacatatttacatttgatattcttaatttgtcactttttaagctcattctggctttgaaatgatcttgtattatgtcctaagcttccctaaattcaaaattcatatcctctctaagttagtaatttctttatttgtttccttgaaaattttccgcacttttgcttattgaaacttaagtgaaaaacaaaacttacagccatgatcacatttgaagttcttgatgtgttgcaaacacttcttgtattcatttcacactagcagtttttttttcttttaatgcatttggttattgatgttgttattatataatgttgaatccatataaaacgtaagcaatcactttgtctgcaacatggttctttatcatgtcccctaatatagagcaatgttggttttcttaaacccacaattgatttatgttatgaataaacataaatttctgtttcttaaggatattttcaaacttgtcctttgaaaaggtattcttgattcatagaactacctagagggggagtgcataggtaatccacaagttcatcccaagtttaaaatcctttcttatatcacaattttactcaatttgatttagttagtttatccctttgataagccttatacatattcattgataatccaaataaattaataataatcaattaatcacacaacaacacttaatatatgtggaaaatcatgtacaaagattatccctttaacccttacaaatgtaaaaactatggatcacacaacaatttttttttttttgcttgatcgctttcggtttctttcaagtgtccattatttgccttttacgattaattgcaactaaaatttataaaaattgataaatttttcttaattttaaaagactttttggatttagaagtatggggtgcttaagtgtgagctatcaaatgttggagtgtccaacctagttttcatctttatgcgtgggtctacatgctctattgcttccggtttctttcaagcgtccattattttcctttgacactcaattacgactaaaatatgaattttataggtcattatcttgtcctaaattcaaacttaaaattacttaccagagcttcaattgttgagtattcaacttgaatatgtcacatttcaatggtagggaagcagtttccaatcagtgatccttgcagcaaaattgccaatgtaaactaatacattaacatccttgattcttgaactttttctattgtaactttagaaaactcattttgaatttttgtattcaaattgtatgcttcttccatgttttttcatatctcatgtttgtttgaaacccttttccccctttcag

SEQ ID NO: 11894 - DNA, 3001 bp, Vitis vinifera
  Intron number 2 from transcript GSVIVT01026467001 (locus G SVIVG01026467001) derived from phytozome v7.0 (chr-ID chr4 ; pos 23104350 to 23107350 reverse strand)
ggccataaccaggtatatggctgagttgttgactttcacaagtagttgttactacagtggtcttgaaatgctagttaatatatttttcagtaatttctcttctttaattttgtgtgtgtatgaaacttattgactcaaattattatgttttctgcatttttttactgttacaattgcttatatgcttcagttttggtatcatataaaataatcatgctagtagctcgataaggtgtgaaaaaccaacagtggagagttattacatggtgggttagtcaatatgctttgaccaaaggctcaatcctacaatactaacatcactaggaagcaaaaactgacagaagtcccctttgcatccacttgtttaggttaccaagtttggcctgtgtaaggtcaagtctagctaattggtggtttgtattgaacctctaacaaatagtctatttactaggcaagttgatattaccttgacttgaaattttagtcatatgaactcaacatcatggggttaactctttgttgatatcttacatcaaataggggaagaagttcttagtactatatatgtaatcagttcttcttaatcgtgtacacgcattttaaaaccttgagggcccaatgggtttaaagcggataatatttacataggagggagcgaaccattacaaaatggtatcagagtaaatcctcgatccaagtgtgtgacttgtctatttgaccccattaggggtgtttgtgggctaatgtgatatcctacttcaaataagggaagaagttcctaacaatatatacatagtggttttctcataaccatgacatatagatacgttttaaagccgtgaggatcatgatacctaaagcataaaatgtttacatgggaggaagaaatttgctatagaatgggattagacttgatccctaactctagtgtgagacctatttgtttggttctacaaggggtgtttgtttgtttgagcaatcttgcaatcccgtgggacataatgagatgttgtgtttgcataagaggtgaatgtggtatcttaaatgggaaaaggaaagaaattcttgacactcaatatttagtgggctccttttaattatgtagattgttgggatagagtcattcaaagcatgacatgacgtaacaataaaatggaattcattaatatttatattatgattttgactctgactcttctttttactatcctatatttattcattatgttgaacattcaagcttgacatctcttgcattgtacataatttgggtgcattaggcgtcatgtagaagatcaaagtcataggttccttacaatattgatgatttgttcatagctagttcatggaattaagtaatccatttgaggttgtagtgcactacctctaattggagagatgattagttttggtcattgggatgggttttccatggcgagtgcactagtgtgtatgattataaattggacaggacatatggtgagtcatgacattggctattgggtaatcatacactcaccaagttactatattgtatagacttttaaccttgagaggatactgagcttatgctaaaatgttcatgctgaattagtgtaccatgcccatccaaacacaagttattttagggcttcaaagttcataaataatgaatccatggagggatccaaaatatgagttacttagtgtgcatgataaacacatttatggtgacaaacttgacaaatgagagaatgctgattttttttcttcttgcttgtctgaaaggtaaagatctcagtcaatggtactgctattcttggttttatttatatttcaggattctttagtaccaggccttgcagtagtttgctatgtctacatttagtaggttagggataccagttagttctctctctctctctctctctctctctctctctcactctctctctcactctctctctctttctctttctctctcttcttttctttttctttttattttttggctgagtggatattaagtattactatactacataatttggatgaatgatggaattaatattttggaaattcaagttatctcttaggtttgttgtttctaaagtgttttctttttatgatagcactgacaaggttccctttgttttaaatgggttttttttttttttttttttttctggaatttttaatgaaagcttgtaaaagttttgtacatttcacactaaagaatacatgtgactgtgatttgatttctcatctttgaattcactcaccagttgtttttctgcagcatttttctcttctcctgcacaatgtaaggaaatattaaaggcatgattttgtaattttgaagtagaaaacactatcatatgcaatttattttatttttatatatatattttttaaatatgaaattaggcaaaatatcacccttctaaatgatatgcgaccatggacatctacatcacagttttgtaaaattgaaagatctggcctgttctttgccagatttagagtattgttacatccactatcatgtggtgaatgctatgtctcaacagtctacagtttttgcttatttaagcgtaggagagactcaaacttgagatctctacttaaccatagttttgatatcatgttaagttaccaacttttctaaaagcttaagctgttaagatatgggctgaaaatgtatattgaactaacaaaagacatgaaataacttgaaaagaaatatttgaaaatatatcatcagattcaattgttaatttttatggttctcttgaaagccatgaaattaaccatttcattgttccaaaacctgggttcgtgactttggttctttatttggttattctttgacattgtttcatgggaaatgtctttttctttttcttgcggcatttctattatattttaaattcataatacttagacatatgcttttcattgatgtttggcatttttatggctaacaggagtcacatccggaatctaattttagggttcctgc

SEQ ID NO: 11895 - DNA, 2269 bp, Vitis vinifera
  Intron number 8 from transcript GSVIVT01027664001 (locus G SVIVG01027664001) derived from phytozome v7.0 (chr-ID chr1 5; pos 14522795 to 14525063 reverse strand)
actcaagtgaggctggcaatcgaatccagaaatatgtatgtataatatttcaaatagatagtttcaactctggaagtagattcttctgtttatctgtgtggtcggatgtattcctatcctgtgcctttttttccccctcttgaatattataacttgttctatatttgattatttagaatagggaaaggaaatttagttatttggagatggtcgtttccaaggcataaatggaaattaggatggtaaaaagaaataaaaaggaagtaaattgcatagatttttgcaattggtaagtgataagaccataatagtcattttacagcatgaggattgatgggatgagaagctttttttgggaatcactgccttattcttctaacttggccattcttttttcactataggtagaagatacttgtttttgggaagcttgttttcattacatgaggattgatggaaagagaaacttgtttttcgaaaaccattgctttattcttctttggggggttgtagtgaggggatggcaagagagaagcttgtaattcataacatgagaattaatgggatgagaagcttagggcctgtttggttgctgtttttgaaaactgttctggaaaatagtttttgagaacagtttttggtgtttttaaaaaaaaaattatgtttgggaatcgaattttaaaaaacagtttttgttctcaaaaacaaaaaaacatgtttggttgagttaataaaaaaaaaatttagaacaaataaaacaaaagacacgtttgaaagatgttttttttttcttttccaattaataaaatatttactttaagtaattttatattataaatttataaataatttttagatatatagttcatttaaattaaaaaaattatttattttattaatttaaaaataaaaatattttttatattttttttaaaataaatcaaatataataaaattatttttattaatatttttttatttaatctttaactttattaaaaattatagcatattctattaaattgagataaaattgttctcgtgatttgttaatttttttttttatctctactaaaaccaaaaattaaaaatgccacccacttctccctctctcgggcatcaagaagcccttttttgaagttgccctccatcgggcatcaagaagcccttttctgaagttgccctccagccgagagaatccctaaaaggcccaattttcctttgccactctcaatcctcgcaggtactaatctaatcatgttattattattattattttttttgcaacccccgtttgattcccaagaaaatccatcccccattcgatttccgggaaaattcatcctcgtttgatttccgagaaaatccaagcaaaaaccccaaggaaaaccaaaaaaaatggattttcttttgctccctgtgttttctagatccgttttaggggtctctttgctattgtgccattggatttaaatttcacgaaccttgaatcaagactgagactgtgctggagaagagatgagaacgggaagaaaaaaaaaaacacggagaacagatggtttttttttgtttaatattgttctgtaaacagtaaaaaaacggggaaaacaacattttgttgttctctaaacagtgccatttttagaacacgggaaacaacaaaaacaaaaacgaccctctcaaccaaacgagttttttgtgttttttgttttcaagaacagaaaacagttcttgaaaacactaaacaaacaggcccttagtttcgggaattgttgctttagtcctctttacatggtcattccttttttcatcacacacacagaactgcagttgcaaaataacaacaacacagataaaacagaataaaatatttgaattcatatattttttattcttaacttcaggatatattaaaatcttcaccttttgtgttgcttccaatctctgtctcaagtttagtctgttcccggtgtaaattttatattggaattttaggttgtgaatcctttatactaaaattataaatcaacaactttttcttgtgaaatatatccagttcctaagttttgcatcaattcctgagctggcttcagtaattggtttggtaattataaaagctgtattagtgactagaataacgcagtgcctactacaattacgatggatgtatgaagtaatggggaaaaatgagttagtgagttattttatgggtttctgtcctccattttgccttcccacttattgatgtgtgtacaggctacgtgcagca

SEQ ID NO: 11896 - DNA, 10449 bp, Vitis vinifera
  Intron number 10 from transcript GSVIVT01034359001 (locus GSVIVG01034359001) derived from phytozome v7.0 (chr-ID chr 10; pos 17440271 to 17450719 reverse strand)
gaacttggtgctggacacttctcaaagtcaggaaggtagtttctaataacttgctattcaattttaatttataaatttaatttctgaaagtgggttcaaagagttttgataagaatgcattggttacagagataaaaagtaagatcttgcatggcttcaaaaatctagaaatatagacaggaatagcatgaaggcagctcataaaagggttaagctgtatgaaaaggaaagacaaaatgttcaaatagttcactttaagagtaataattccaaattatttatcaaatgaagattggaaaaaatcagacatgatatttgaagaatttctgaactcctttattgatcatgaatcggtacacaccatacacatatatatacacaaatgactgaataagaaacaatcaatctagcttaattctctcctaaaattaggaaactaaatcataaggaaatatcctaaatgatctctccttttttattcctaaattaaagtcctaactttggcattatttcaacactccccctcaagctggagaatatatatcatataatcccagcttgcaagttaagtcttcgaagttaggcctaggtaaagctttggtgaggatgtctgcggtttggtgcttggtaggaacatagtttaatttgaccgtctcactagtcaccttctctgtgataaagtgtctgtcaatctcaacatgcttggtcctgtcatgatgcacggggttctttgctatgcttatagctgcctgattatcacacatcatcagaattggagatgaactcgtttgtcccagttcactaagaaccctttttacccaaatcccttcacagattccctgtgcaagagctctgtactcagcttctgcactacttctggctacaactgattgcttcttactcctccaggtaacaagatttccccagacaaaagaacaatatccggaagtggaccgcctgtcaatgatgtttcctgcccaatccgcatctgagtatacttcagtgtcacggttctctgtctttctgaagaataggcctttccctggtgtcatttttaaatatctaagaatcctgtagactgcttccatgtgttcctcagtggggctgtgcatgaattgacttacagcactcactgcaaagccaatatctggccgagtgtgtgagagataaatcaagcgtccgacaagccgttgatatctccccctgtctaccggtgtactttctttctcgataccaagtttcttctgactatccataggagtatcaattggtttgcatccaagcataccggtctccttaagaagatcgagtatgtattttctttgagagactacgattcctttccttgatctagccacttccataccaaggaaatatttcaaatttccaaggtctttaacttcaaactcttctgacaaatacttcttcaaattctgtaactcccccatatcatttccagatagaataatatcatcgacatagactatcaatatggccaatttcccggcatgagatttcttgacaaatagagtatgatcagcctgaccttgtttgtagcccagcttcaggactgcttttgtgaatctatcaaaccaggctcgaggagattgtttaaggccgtacaatgatttttggagtttgcaaacctgattctttgccatactttcttcgaaaccaggtggtatttccatgtagacttcctcttctaggtccccatttagaaacgcattttttatgtccagttgttgcaagcaccaatcttgattgacagccaatgagagaaggatcctgatagtgttcagttttgcaacaggagcaaaagtctcctgatagtctatcccataggattgtgtaaaccctctagctaccaaacgagccttgaatctttcgactgatccatctgctttgtattttatggtgaaaatccacttgcaccccacaggcctcttcccaaccggcaaatctgtgatagtccacgtcccattcttctcaagtgcatcaatctcatcttgtactgccttcttccattctgaaatttttaatgcctcttgtattgtgttgggaacctgagtatcatcaagagaagtagcaaatgctctgtaagatggtgataacccttcatacgtaacataattcccaattggatgatctgtacatctcctaacacccttcctcaatgcaattggcaaagtagaatcatcaatgctgggaattaacacctctccagccctatcctcacctatgttctcttcaggaagacttgaattggagtcaatatattggccacatgttgactgtgatccgtgctctaattcctgtcttttcctcctcctgatgtaaacttgtaagttctcattagcaagttgtggggctataggttgaataggcatgggagactggatggtcacgggagaaggaacatttgtgtgctgggctggctgaactgatggcggcatgggtgtggacaactcagtgggcgcgaattgggaaggatttggtgactctgagtgaaaagaaggtacaccatcaagaaaagactcccactcccaaacttgatgttcattcatgctctccccctgaacatgagatttgggatagaagaagacatgttcaaagaaagagacgtccatggtggtgtaaaatcttttgttggttggagaatagcatttgtatcctttttgggttggagaataccctagaaaaatgcacttatttgctcgaggagcaaatttgctacgattttgaggatacacatgaacgaatgccgtacaaccaaatactttgagtggtaaatcagaagaggcggcatgggtgtgaggaaactgttttaagaaaagttgacgtggggattgaaaggtaagcactctggatggcatacggttaatcaaataggtagctgtgagaatagcttccccccagaaatagtttggaacattagaggaaaacataaggcaccgggcaacctccaagagatgtctattcttgcgttcggccaccccattttgttgtggggtgtcaacgcaagaacttatgtggataatgccatgattttgaagataagtactgagactactagtaaagtattcctttgcattatctgacttgaggacttgtattttggaattgaattgattttgaaccatacgattgaaggtttgaaaaatgtgcccgacctctgacttttctttcataaggaaaacccatgttacccgagtatgatcatcaacgaatgtcacaaaccatcgagtgccagaaatattttttatccgggagggaccccacacatcactatgtactagagagaaaacagtcgaaggtttgtatgggatttgaggatatactgttcgagtatgctttgcaaactgacaaatttcacagtgataagatgctggatttttattgataaataatctgggaaacaattttgcaaggtaaacaaagctaggatgaccaaggcgatagtgtaacattataatctcactatctttattgaccttagaatttgacacagaattgaaagactctgacatactctgagactgtacgcaacttgcttgagagacttggttggagaattggccacatgaaaggaggtagagcccggaacacagttcagcactgccaatcatcttccccgatttcaagtcctgaaaaacacacaagtttggatagaatttagtaacacattggagatcatgagccaatttgctaatggacaaaagattgcaatccaagtttggaacatggaggacagagtcaagatataagtctttagtaagttttatagaacctgtcccggcaatttttgactttgaaccatcagcaatatggacggatgaatgaccattacttggcttgtaattttgaagaatggcagcatctcctgtcatgtgatcagaagcacctgtgtctactatccacggcctcattcctcctcgattagcagtgaaggctacaccggtagtactgccactgccaacttggcttaataatttctgtagcatctccatctgctctttgttgaatggactcggctcgggaacagaggtgctctcagagttggcagccacgtgtgctctgccatctctgtcaaaccgtggctttggtttccaatcagcaggtttgccatgaagcttccagcaagtctccttataatggcctggtttcttacaataatcacaccaaggcctatcccgtttctgacgatctccaccactactattaaatgaccgagccgcaagggcagaggcatccaatgttggggcaggttgctcttttgatcccatcatcactttctttctactttcttcacgtctaacctctgaaaaagcctccctgagacttggcaggggtttaatgcccatgattcggcctctaacatcatccaattccctgtttagtcctaggaagaacttgaacagtctcttttgttccacaatttgcctgtatgttgctgcatcatccgaacatttccatgagtgagtctcaaataagtcaagttgctgccaataccttgtgagtgtgttgtaatactgagtaactgactgctctccttggcggaagtcatgtagagctgattcaacctgaaacagttctgaagtattttcagaacttgagtaagtttctttggctgcatcccatatgtcctttgcagtcccaaacagcaagaaattttcgcctatgtcattgttcatggaattgataagccatgacatgatcatgctgttttcaatcttccacttcctgaaacccggttctgtagtttctggcatgactgcttctccagtgaggtattcatcctttcctttaccgcaaatgaacagcaacacagattgtgaccactgtaaatagttatggccatttaatttgtgtcctgtgatgagaataggagaggaatcattgccaccaaggtttggaatttcagatctgccccctgattctggtgacgtgacgctggatacttgtgatgatgccattccgtattttgtcatggaccggaaaggtagaagaacacttttcaaggcacgtgcagggactggagttgagaaaaaatagccgaaggacgccggaaaatctgatcagagggcccgcggaagcaaaagaaccccaaaagaggcacgtgcagggctcggattgcacaaacaggtaggaagggtggctggtcggcgtcaggcgagcctagaggaggaagcgcgtcgccggaaagtggctcacgcgccctcactcgccggcgcgtgagatgcagtcgccggccggaaaaacgcgcgtgggcggcgcgtggatgggtttatggttccggtgctttgggacaaattggagatctcctccaggcgctccttgcggtgtagaaaaaaccgtcgccggaaagttcgccggaaaaattcgccggaaaagttgccggcggtgagtgttttctgacgacgattcgactgactggaaagtgttttctcccttggctctgagaacagggactgatggccggaatgagagagagagagagagagagatgatcggattgagatatggccagaaagatttggccggaatgagtgatggcctgaataagaggtggccagaagggattagggtttcagaaaactggctctgataccatgaagaatttctgaactcctttattgatcatgaatcggtacacaccatacacatatatatacacaaatgactgaataagaaacaatcaatctagcttaattctctcctaaaattaggaaactaaatcataaggaaatatcctaaatgatctctccttttttattcctaaattaaagtcctaactttggcattatttcaacaatattattttatattttatgtggaggcacacacttgccatcatggtaggaactgtactttacgtaagtttttatttcaatgcaattctcctctattcaaattctagaattataaaatgacataaaaatgaagtcaataaactaagcatctatttttggtctaataccaattcttagttagctagtttgtctctctttcccaaaaatcagcttatatatttagtgattaacatcgtctctagggcaattcttgaatcataattttaaatgttagttaactattatttaagagggtggttggtgatggtcctctaccttttgaactccctaataatttccaaggcgatcaaaactcatatatacaccttttttcttatcttttaaattgtctagattagctaaaatcttgattggtcaaggattatcaaatcagtttgatatctccccatgaaggattctaaatatggccaattggatggtccatgttccacaacttgatggatagactaccaattagacatcaaaatccatgatttttggatgaatatatgcataattaaataagcttatccaatctctcaaatgtttgagtttgcagtttttttatttgttttagatatttatgtagatataaaaaatatttaatggattaaattacactatattgttcttcaagattgtaactccttagctcaacaaaatttgggcttagcaagtgatgaatcatgcatattgaacacatgacatgcaatttcaaaggttgacacatgacaaaatttggaaggctacaaaattaagtcttgtaaacagaaataaatcaaacaagaaaattagaattaaatattctcttgttaacaaatttcctaaacaatttgctctagctaaacttagattgatattagtttgatgtttccaactcaaatccaacctaacctatgaaacaggtagtccaagcaaaggtgatgagggcagtggtgaagaaggaaggtgatggaagaagcaaaggtgaagaaggtttcgcttctcttggtggaagatgttggtttagagtagattcgaaatcttttgagattttgttggagtttgtaaatggtaagacgatgggaaagattgtagagagggggtgggattgtcctcttggattagatttagggaaaagagtcttgctaggcttttggagggcatggaagactgttctatagggaaggtgaagaagcctttcagaagggtgtggaatgagggtggaaggggctgcatacagttgcgcagcaacaaagctggaagattctgattctgttcaactgtgtatagaggagaaaaggttctctcttgttttcccagagggtaatcttttccaagggggttggaagatccttgcctctaaactcaggagcattggggttatccctgagtctaggcctgtggaggaatttaaagagcagtttaagctccaggaggaaaagggtggtggcaatctgctaaagcctgtgtcctttgcagaggtgctgaacagaggcaagaggcctttgggcgatgcattctggatagagagtgagacaggaggttttttatgtaacctggagtcccttaagaagtgtccggtggggaggtgggactgtcattcaagctgcgtgatagttttggactcgttgaaattttgggctcgatattcttggagtttggaaggagacttgtagttgtgttcgttgggaggtactctcatcttatttaagtttgaagatgtttcggaggctaaaaaggttttgcttttggggtttggtttgagggcaagaggctgcagttggactggtagaggccaaatgttggttgcctcagagaagatgtttacgacggtgaagggtgagggtgctaggtttactagcttgtctgtagggaaaataactttttaaattttaagaggttgggtgatgcttatgggagttttgtgatggtaagcgtggagactgaggagagacagcacctgaaatgggctagatgacttgttcgctccagtgagagagaagctaagacagttgatggttgtgggaagagaaattgtttttgctatacaactgttgtgggaagcttcaccatggttgtcaagggtggcttccaagcagtttcttagaaaatctgaggttagggaagactaggagggaagctcacacgctgcagggagagtggaaggggctaaaaggaagcatgcaagtgaaggctagcagttctgttgatgtgagggagagacatctcccacaagataagtcaagtaggactttttcaaacctggtcaactgcttagagaataagctcctgggtcttctgtgttgatagggcttagggcttcagaaaacttagctgggggtgtagggagccttgtctccctggtctagtcctctaagatgtctgaagggaatcaaacgaggcctcctaagtttgggccttgtcttatggacttagagtgcaggcccattagtgggcggcctatggttaagtttccctacagggcatttaagcccccttgtctttggagtgattgataaatccttggagtctcctttcgaccccctcacttaggcatggtcatgatgctgggtcagcatcatggtgcaaatggagtgggtttcgggagtcgaggaagtcctcatgatagaagcggcaaggttagaaggtaggttttcctgctaccttcctccttcttcgaacgggtctccctctcatggtgtcgggtaagtgtgttagggtagggtggggccccccttagggtttccaggtcatggcctttagtcgttaagttcgttgctccaagatgggcggttggtggatctcacaagaagcgtagagaaggattcctcgtgtatggatgtgatgactagggctgaggagtgagaggccagtaaagcaatggaggcttgtcgtgttttgaagattggctagttagccttcctgattaacttagtcatgctcaatagctttttgggtttgccagtggcgggggttgaaaagaaaatcaactcccttatgaggagaatggagtcatgaaaaggtcgtgggattaaggttgtaggggggaagaggaagtcgtttttggctgctcatttggagagggagatgcgaaaactggaatggccaatcaattacaactgttctcctctcttagtcagaggaaaaggaaggggggcagcaggatcttagtttttattattatagtttgtttgcaggtttttggtttcagaaggtctcaggcatgttttttgttttgtgctaggctttacaagtctttttgcggtgttgatggtgtttttgtcctagtccttcccaccagagaatgttcaattgttcttagggggccatggtttggtggttttcagggtggttggtattttctcttccctcttcatctagctagcctttgcgcgtatgttgtatacttcgtgtgtactttgatgcgcctttttgctagcactttttaatatattctctcacttatctattaaaaaaaatcataaataaaggaaataaatctttcgattgaaatcaaaagagaattaaaaataaatattctcttattgacaaattttctaaatgaagtagacaagttactacaatgatgaaggagccaaattccgtgaattaagtaatcaaatcttaaggattctaaatttaactttctaatttcatctataaataatggtgacttccttcaatggagaggattgggaaaaacaacttcacatggaaaaagagacttcacaaaatatccttacaagtgcgagaaatcatagaagcacaatacatgtgttattcgtcattcaacgaattcattcggtaacaaaccattttacaccctcaattgtgatcgtcctttggattgtgatcaaagtgaatgaatcagaggaaaaatattcgtttgtaaagaatattatcacaaagattgtacctcacaattattttaatacaaaatttctgttcgcatatttttcctatagtattacttcttttgctagactctcaaaatttgtgagtacaatttctatctacattattcccaatcttcttaattggcattcaatctagtggtattctccatttatgtaagctacttattatcctacctcgctaccatgaaccttttgactgcccatttctttttgaaacactgggtttgaactgttgtccccgtgttgatgctgtcaatgatcttcattgtagatgaagaaagctctcctctaatgaaattaaatttatctcctgttggggttgcatttagatctgaatgctcctctttttaatgcacttacctactacctgctgatcaaccttcctagaatcctgtccataatattctcatattgtctcctgcttgtaattctgctgatttacccctttcctgaagttcttggatcttcttccatattgtgttattaagtagtggaattatgccaggctccttgacccccaccttagctgctttctagtgttggtctgttgattgttgcctttgacaagaaagaggcctagggttgatttttcttatgttgagcttcgtagtacaagtatttcctgcatattttctttttgttaagcaattttgttgggtgcagatttgagaagctcaaagaagaagccttcgtagata

SEQ ID NO: 11897 - DNA, 4055 bp, Vitis vinifera
  Intron number 1 from transcript GSVIVT01009371001 (locus G SVIVG01009371001) derived from phytozome v7.0 (chr-ID chr1 8; pos 7846328 to 7850382)
ttacggaggagaaattgatacatctattgggttgattgatatatctattggatttcaaaacatttcatttctctcattctttgtatcttcgtcctgagctgataaaccatcttgcttcattggctatctctcttgctcttccttacatttttatacacaccacttctagtccttacaaactcgtatctctttcataacttttttctctcatgatttagaatagatatttgatatatttattagctttccttattatagaaggtatctatttccaatcacatataacttaggaaatgttccatataatattccttttacaaaaagaaatatatttcaatttgaaatttaagacacctctcaactatctttaccttaatcaaatttcattaaataaatcttttatctctctataattcgcagttcctttacgcacatcattctcctcatatgttattgttccttttgtgcattattaaaaaatattctcttgcttcttgtatcactaataagagaaaatttgagttcgccctaaattaaaattcattttataatcctcttttatgctctttcaaaaattttccaaacatcttcaactagactctaataaaggtatatgggaatttagcatgattggatcaatcatgcatacgaaaaagaatataaattttggatttcaaaataatcaatttttattcattcatatttatcttaggtgatccctcttatatcattgggtgtcttacattgttcattacatctcatagcaccacaaataattttcgtcaatttatttttcttgttattttttcatttgttaattatgatttagaatatttgtaaaaatatttttgtcaatatttcttattaaaagaatctaatttcactcacgtgtcaacttaaaaaatataaaaatattttatatgatattctttataaatatatatatatatatatatactccaataataaatttgagacatctcccaacaaaatgggcacagctaaggcccgagctctggaaaatgtccaggaaagaagtaataaagaaattagaaaaatgtctaaaatcatcaccacattgaatcttcgtccttcgttcccattttgaggatggcattgttatgttatttcggaaacaatttccactgaatgtaatgattattgtttcctgttgcttacgtgatggaaacagtaaaagccgcggcagatacagatccttgagctatttggccccgtgacgtgatggaaattttcagaacttgcgcacattatatggcttaaagattccctattgagtttgatttttgtgaacaattttatcttttcctttttttttccccggtcccaccaatattccagcaatgcaaacataccctaaatttgtgtgaactgtgttagggttggttacaatgtggacggggccaccaaagacgatgcacatggggtatgcttattcttatatattggccacaaaatcagataaggaataacaaagcaagagacgtaaatgcctcaataatggctaggagcccaaatttggtggctgtcgattccaataatacttggaagacgcacatttgcagaatctaagtaatccaacgagcagcgacttttgcgactttactcaaattattttcataacaaagttggattggaaaatgaccttccaaccactctattcactactttattaaaattttgtttgaggagtcattgtagtcgacactcaaattacatgggtaataagattaagccaaaggtggggaaaaaatcattttcaaactagcaacttttcaatacattttttatgaaaagatgtattggatgtgaattggattcaaaatctatgatgttattcaaattcttcttatggtaagaagattcatctcctttgaccctatttaaataacgtgaaactacatcattttgtttatgaattaattttcatttatgataaagacacaagaaattgcatctaaatacctccatcacaacatcttgtgatgaagttagttcaaaaataaaagaatttattgattgataatatagctaaataaaaagaacgtaaacgtcaatggagacgatggagatgtggacgaaacagacatttacgatcaaatcacctaaagtgcccaccaccctttattctcaattgaattgtctccctaatcgccatgaattcttaaaccataaccagccatttttatcattattttaaatttttttgcaaacttgaattgataatattgttgaattgatgaaaaaccaacatgataatgaaatattgccaagagtatgtagtccgcacgtcactttgtttcatttattaatcgaattattagggttggggaccttaggccagctcttttataatttattattatttttatcattgtatctcactcgtacagtcgctttctctgcaccaacaatcattaccatattttcatacatcttagcttggggcaaactcatctatggattctttagattgattcatgaatacatacaataagagtagtacaatcattgttttttatgaagagtttttacctcagactaggttcttgggctcttgaatcaacagggaaccaataggtctatcaatagcctagaaaacatagacgttgagtccaaactcacaattaatagtggtagggccattccagctaattgtgacaggacacctaatcagagtgggagaaatgaacatatcagtctctctactgattaagcctttcaaacaatttaataattctgtaatcaatcaacatgtctcgtccttataaagttctaatcacttttattctctgaaaattaccatagaaggcatgagtaggtccagggtcacttccattagtggtccttcaaaaaacctgtctgtgggtgattagaatggtacaatattgaggcattttggattaatacaacatttaagtacttacatttgtcaagctggtttgaaaagattgataataattcaaagaaaaaagaatctaataatgattggatgaatgcaaaattattttaactactgattaattaagtaaacagaaatgagacccatgcaaaagcaaagcactttttttttcttttttcttttttgtcatgttaatattggatagtgggatgaatttttctgagaggatgtttaacccaagggtaaagggtgaagtatattgacagaggtagatctgggtggttcttgccaacagctcaccagttgagagtttcatctactctattcctatctgcttattagtgggcctttttaggaataaacaagctcagagacattttcttttctgtttttaaaattaaaatatatatatatataagaaaattttctcaaagatttttaaaaatggaatataaattctactttttattatataatatgttctatttttataaagaagatttctaattttaatggggtagcttacctttctatgcaactaccattaagcattacattggtatgaaaaaggaaaagaagaaaatctatacatattaaaataaagaataagatgatgtttatttttttacttaattctaaataacaccttaatgtttaatattattaaatattaggttatttgtttttatagtattttatttctattaagtattaaaaaataaaaataaaaattaatatgttatttttactatttaaaaaaagttatatattttgattttttctttttgataaaaagtttataataagttatgaaaaaataaaaaaaacaaacaacttaaattctgaaaacaaatcacttttaacaaaaagccaaaaaaacaaacaccacctaaatcttaactctttcaatagaaaaatcatatgcacaattttcatccttttgttattagttattacatttttacaacaatcgaatgaaaatcaatgtttctttgtgtgagggcaaaatgaaccttaaaatccataaatcacaattcctaagtcctatctgtatctataatgttatatatatgcaaccgtgggggaatgacctacctcagcaatcagcagtgaagatagaaaacaaaccagctta

SEQ ID NO: 11898 - DNA, 5143 bp, Vitis vinifera
  Intron number 3 from transcript GSVIVT01025288001 (locus G SVIVG01025288001) derived from phytozome v7.0 (chr-ID chr6 ; pos 2415541 to 2420683)
gtggtgatttgtagcggtaaggcggatactcatgctggtaataaggtggtggaggcggagatgcataaatgtaaggcttgtcgtccgcagctacattactggctatcaagcaaaacgccaaggcaaaaactagatgaggccaaaaattggccatttccagcaacccttaagtctgatccccaatatgcaggacttctacctcaaaacgtctgtagaaggaacttattaatgactggaaacgaggggctctgcagagcttttatagtgatcttctgagcaagtgcagcatttgtttaatagttgttgaaagcttccaacttgtaaaatacctaacattttgaaaaagtatcccacgttattaaattatttgacaacatgttaaggattccactatagactaaatatacatgtctaagaagaggtcaaaataactaatgtgagaaaatatcagggtctcagaaaatcttccatgtagccatgtcaaatggatgccagcagctagcctgccggccatcagttgacaacgatagctagggccagccggtggattattaataatgataattgtaggtcttggatctcacatagacatttgtcttcctaccaaatatcaagagcttgtatacatatttacagaatatttggcataaagttgaaaaaacattcccagagtgaagttggttgatgttaataaagtctagaaatttaatatactgaaattgtatataactagatataaatcaataacaatatagataaatgtatgctttttatgtggattttttttttgagagccaaaaaatcataaattaatcaatggattaatttctttgtgccctttgttcttctcttctatatattaatttgtcttccatttcagccatgaattattgaaattttcttctatatgttttccttttctacatttaaatttctagtcattggtataactgcattctagctgcttttgtctggttcggtccatgtatatgtacctgtgattatcaagtttgtcaatataagttggtttaggttgttcttttatgttcattaaaaggaccggatccaaacctctagccaataaaatagttgcagtgacaatcaaaaagtcatttgtgaagaagaaaatagggtgatgaggtatgaaatgttcaaagacatactacttaatatatttttatcgatctgccatcaagttggttgaaatggttataatagttaactggatggctccatgtatattcggacaatggttgccaccactatctgaaatggaactataaaataagaaatttgttgaggccatctagctacaacttatatacaatgtcaaatgtgaattaggttagttgttctacaccatttttgccatcactatcagtccacattcataccatccattcaggtgccagctaggaattagaagctactcggaaaattcatcatgatgtgcttgagatcgagacatgaatcgataggtttttagatatttaaggattatttaatgtttttttttgttaataattaaaccgaataattataaatggggagtactcatttgctaaacagcattctgaataagctaagttctagttagtttgttactctcttcttccggatgctagtcgatagatgaaaatagggcctttgattcagcaagtaagaagttatgctaacaagccagattgatttaaatgataaagtaataacagtgtacagtaacagcaaaaagaaagtagggaacttggtttagaattttgctttcaataagatccaaataggaagttttttcgcttctaaagttgcattcaagaacatggagtttctagtacttatcagagtcatccttgaagaccatactatagcctgatgggcaagatatcattactttcattagttaatttctaaactagtatggaagatatcagtaggcagtttgctctccatattataatactatgtatgaaacgcacctccaaattgaggtttgttttgtttttaataggaaaaactttaattaacaaggaaaattacttgtagcgatgagtatatgaagtcaggatacatttttcccatcaagcccaggtaaagatcaaaggtctagagcacccaatccagcagaaaaattccaaaataaaaataaaaataattagatgaaaaaatatatcattaatttcttaatgctcattccaagcttgatatgactagctagtactgagattatttaagcaattttttagtgcctactttgaatttgggaggaggagacagtgcaaggagatatatattctagagatccttgaagtttgaaatcttctttcacttattgcaaaatggttaggatatgttgggatagtgagtcttgtatagtttgtttattggcaattttgttccttttcattctaacttaggaatctttttagatattgatttactctccattgaagattcaaggttaaagacactactattcgtatgactctttccttggcattgagtcaatattggtctataagggaacttgatgttcatgccacctttcttaatggtgacttgtttgagcaagttttcatgacacatggttgattctatatgtatatatattgcatgtaatgagggtaaaaatcacatcttagcttatattttagcactaaactcattccccaagtagtcaattgtatggtaccttatatatgcccaattttctcacatttccttttatttgttgatgtttacaactgctttcatgaataatgatagtcttgagatcctcttaggacattttgtaggcaagaacaatgtatgagtagagaagggttacagtcacatgaagatcaatggtgtagtcctattttgactagtccaaagtttgaggatggttaagggggttagaaatgtttaaatgaactcaaataaaaattttcacattctaggctctttaatgatcaatctcaccaattttgaaaatatttggacatcacttgcctatgtagaaaaattgaaaaaaaattggtaaaagattggagaagcgttgaaggagttaaagagctttttggaaaaaatggctctaggatggtgccaccacaagttcagacgtcatttcctttctaccctagctccattttgagaaaaagaagcctacctactagaaacaatggcatcaagatgacactaccttattaccttgcaccattttctccaaaactactatcatttgttttagaactctgagaacatccaggacccacatttttattggactttttccaagccaccattggaccttccaccttgtattttatgccttcatatgttatgccacttagggcaatgtgggagtacttatttaaagagattttacaattggagaaggggattttgggggaaggccctttggtgaggagctcttcttcaacttccaaccttgggacttgttgctacttgaatcttcataatgttttttagcctttaagagttttttaacatattaaactcctttatcttgattgtgtttgcatttagttatatttattctccaattttgtataactttgaagtttaatcttggatttcaatggttcttatttcatgttttgttttttaatatttattttaattcaattttcattttgagtaatggattaagctgaggagaagggggtccttaggacttcccttatgcccatgatatgatcctttaatcttaggtaattaattatttattcaacttgtaagtcaaacctctccatttttaattagaataccacgtcttgatgattgaaaattagagtttaggggtcctctttaaggatatctctcaagtacttaatggtgagattcattttaacttgaggcaaccattattgagctcttaatactacaatttggaaaacaaatgagttgtggggtctttaagaatttcacatagtggttcaactctcaagtttgaagcattaggtttaattaaatgtgcttgtgttgaaaattctccaactgagaatgcctatagataatcttggttgtggtagcttaattagggtcttttcatggaagggagcttaagagaccctcctatccttagcacttttttttttttttcaaatcttataaagtcaaatttcaattcaaattcacttggtttttcctctattttccataaaattcatcattttttttctttttttcttttttcaagcaattgagtgaaagagtttgcctaaaaaaaaaatttacttatcctttgatcttttcaattcccttatacacctaagacacctcgtgatcaacattcaattcattgggattttaaaactacaatcaactccctatatttggggaaccccactttggtatgcatatttggaagcagtcaacacaaccccttagttttgcaggtccttcccaacccaattttgtttgcaaacttaccaaggcgttccatggtttaaagtaggctctatgggcttagtttaccaagcttagttctgccttagttgaatgaggtttttctcaacttgagagccacttatttctatatgtttgatttcttattgttttctatgtgggctttgctcacgaatgattattatagataaccctcggtgaagttttgcttttgatccatccggtcatagccatatattcgtgtgttcaaatcaatgtaaaaattcctttttatttcaatatcactaacatgctaagcaaacagtgaatgaataaatatcatccagcataaaaaaatcaagagaaatattacttagaatcatgactcatgagtacatataatatcaaagccacgagcatgaaaaaaaggcaaagaatcttgcatccatgggtcaaaacccttattcttaacgccattgtcatctttaaggttaagtggtcagcaatgtgcctccaaagaacatttggctccttgtatcaattactctttctatcaaccaatgagctgtaacaaagattataagaatataaattccataaaaatgataaaaaccatgagtgaataagttgaaatctaagtgttatacttgcataaaacaagtagaaatagattattttttttagtaatagtagggaggtggtggtgatggagaaggtgaagatgaagacttgtagtaataggatggagggggccagggag

SEQ ID NO: 11899 - DNA, 2385 bp, Vitis vinifera
  Intron number 1 from transcript GSVIVT01038711001 (locus G SVIVG01038711001) derived from phytozome v7.0 (chr-ID chr1 6; pos 20709570 to 20711954)
tgatcgacaccatcaccattacgacagagaaactcgtaattttctctcattttctcgaaccttcgttctctcgagaaagtataaaaaaattgttgcaacctttgagttttatgtgaataaaggtccagttgttgaactaggtgtttttttatctctcgaaatttattgatttattgatttttttcttggttgatttgaggtacttagcttgcgttggatgattgatgcttgttttttaattcctggaatacttagcaaaacagaggagatgaaaagaaaatgcaagaaaagttttggaatcctgtgtcttatgtgatttgaggtccggcagtcattctaggttatgttttctcccagaatttgttgatttttagtccaccagtagtactagatgttttgttctctcgaaatgtatttttgttaatattgatttttttttttttttggttgatttgaggtacttagcttgcgttggatgattgatgcttgtttttaatttcctggaatacttagcaaaactgaggagatgaaaagggaatgaaagaaaagattggaatcttgtgatttatgtgatttgaggttcggcagttgtactaggctatgtttactcccaaaatttgttgatatatatataaatgtgttgaagaactttaatttcctgtcattttctctaaccttcatctgcgcagataactaactcagaaactgcaaagaaaatggaggaaactttttgcaactacatgtttaatgtgattttcggtccagtagttttaccggtgtttttttgttctttcacaagttattgatttttttattcttttttaaaatcttttctgtttagctcaaacatgctcagcatccatgtggtcgctgagaaatctattgattttctcatttcttttagttgatgctatttagccgaaggagatgattaatgtgtgttctggattttcttggacatttaccatctatttgattgctaagcaaactggggaagagcaatgaaaaaagaaactggccaatctgactatgtgtgatctttaggtctagtatttttagtagatgtttttgttctctcaaaatttattgatttttttttttgttaagttgtggaatttaggttgccattgatgattgatgcatgtttttggatttccttgtactaaaattgaggagatgaagagaaatgaaacaaaaattttgcaaccttgtgttttatgttatttgaggtccagtggtgttactaggttatttttatccatatttattgatttttctttttcctttttttgtaaaacttttagatggaggaaaaaaccgaaactaacttgtagttcctgttattttctctaattttcctctatagagagaactaaggaactgaaaagaaaacgaaagaaactttttgcaactacatgtttaggtccagtgattttactaggtgttttgttatctcagtagttattgattttcctttttctttctggaaaaaaaaagtgttgtttagttcatggttactgaattgaacattaatttagatttcattgaacattttcagcatctgtttggttgcagttgttaattttttttttttagtttctactatttagctcaaggagattattaatgtttgttctggactttcttgaacatataccatctgtttggttgccaagaaaaatgcgaatgagagagagagagatagtcttaccaggtcttatttttaggtccagtagttttacttggtgtttttgttcttagaaaatttattgattttcatcttctcttagattttttctctttacctcatggtaaattactaatgtttatttttcattcccttgaacatttttagcataagtttggtttccaagaaaactgaggaaatgaaaataaagaatagaggttttactaggttctcaagatttaattattttttatttttttagtttgtgctattttggacatggttctgattaatgctgttctggattttcttggatatttaccatacatatgttttctgagaaaacttaggaacaggaaaaaaaaataataataattgccaattcaaaaaaagaaaaaagaaaatagagatgcttgtgttttgggtatcttttgtgggaaaaaatgaaaaaataatttcaaactgtacagaatgttgtttcaggcatgagttgactggagttttccttattcagttttgaaataatgaaaattgtaagatgcagaatctttgaattcttttatatatgttcgttttcagtatgctaatggaactcaaatcttcagctaactaatatcatgttatgtaacaatgcccagaaaatagattaatataatgcaatttacttattatcttgtgtttgttccagattgatattt

SEQ ID NO: 11900 - DNA, 14471 bp, Vitis vinifera
  Intron number 2 from transcript GSVIVT01001197001 (locus G SVIVG01001197001) derived from phytozome v7.0 (chr-ID chr7 ; pos 891420 to 905890)
aagattttttatacagtcagtgattgtaattttaatgattgacaacattctgtatgttgttagcaaacatcatgagttggaaatgttgaagtttacttaatttaaatcaccaaattatgtagaaattgggtgtacaagttcacaaattcagaaaattgggcaaattttggaaaatcttggttaaaataccagataagtcagccgttaaatgtatgctatttagctgggatgagaatttgaatgaataatctagatatgtggttaaaaagtacgtgaaatttagcttaataattcaaatttttgaaaggttttggctgtaaagagctggttgagaatttggtttactctagcccaggaatcaaaaccttttatttaaatcttgtttatataatcactgacttgcaggttcagccatacccaccgacgaggcagaaggattcaaattcttcttcagggtgtcaaagaagacatttgactacatctgttcacttgtaagacaggatcttgtgtcaaggccgccatcgggtctcatcaacattgagggaaggcttcttagtgtggagaaacaagttgcaattgccctgagaaggttggcatccggtgagtcccaagtctctgttggagctgcctttggcgttggccagtccactgtttctcaggtgacttggaggttcattgaagcagtggaagaacgagctaagcaccatctcaggtggcctgatttcaatagaatggaggaaatcaagtccaagtttgaaacatcatatggattgtccaattgttgtggagccattgatgcaactcacatcattatgacccttcccgccgttcaaacttcagatgattggtgcgaccaagagaataattacagcatgttcttgcagggagttgttgacgatgagatgagatttctagatattgtgacgggttggcctggaggcatgactgtgtctagactcttgaagtgtacaggattttatagaaactgcgaggctggtgagcgcttgaatgggaacgtcagaattttatctgaaggggcggagatcagagaatatgttgtaggtggggttggctatcctctccttccatggctcataactccttgtgagtataatgacatcccatcctccatgtcgggtttcaagacaaaccatgaggctgcacggtcgcttgcagtgagggcattctcacagttgaagggcacttggaggatccttagtaaagttatgtggagacctgataaacggaaactcccaagtattatcttggtctgttgtctgcttcacaatattatcattgacagtaaagataaattgcaaccagatgttgctttgtctagccatcatgacccaggttatggacaacaatgctgtaagcaagttgatccattgggaaaagccatgagagaaaacatagccaaacacttgcagcatggcaaagagaaggctccatcaaattgatcaatctccctcgtcacttccaaagcttaattcttttgactgtgttggctcaacctatgtttgagctcgagcctacttaacaagatgtccgggcgaagttccgatgtgagtttctagactcagttgatgagaggaagtacctttaaaatgttaaggttgttatgatagtgccatgggttctggtaaacttcatgagtgttatatctgctattggttaacatttcctttctgatggaacactcagggacaatctcaatggctgttctgtacaagtcccatgcatgggaggggggatgaactacccaactaggatgtacccacgctgaatgaggattcattgtaatcactattgaacatccatgaaaatcattctgcctagccttgatatgtttcctttgctattgcaccttggtttcttctttaggatttcaaaaaatgatttttttttctagtgctgttggaattcaaatgttcaaacccaacataaaaccctcaatccactttttgttcagttggaaagtcatttcatatgataattaaccatgataactgtcacaagcacagaattcatcccaaatttttggtgttgtgtggcccttacgaatcccttaagccagttcaagagttgtattgtttgcttctactcatgccaccttatcatgctcagcagtccactctctcggtcatctcacctttagcgttcttgtgcctccaaccgtcatcctcttaggatctcatagcccttacttggtcacttgataacaccaagtgctagatcatgtagagcccatgcaggccacacaatccactaatgtatgtatagatggccccatatgtgccaagtcctcttagcccatatgttttgttacaatgtttgcttctgtgtgttgagcctcaatccatagtctatgtccattacatcgttggcttatgtatattaaccttgctaattcattttacttgaggcaagcatagttcatgttgtgtgccacaacaggactccatgacattacacttatggacagcaccacattaatgacattgtgtcaatgtgtgcatgctagtaaggcttaccacaaccattatcacccatgttctaatgatatataatgttatacttatatttaatttgtaaaatgaataaaaaaaaatagaatatacattattttccaatgtttaaagtaaaattatattgcatttcagtcttttccatttaaaaaaaatatggaattatgtttaataatattcatgattaaaatatttaaatttaataaataaaacaaatttatattatatcattcaatatataaaaataatttatatatatattaattttattttaccatatattttataaatattttttagttccttttttaaccaaaaatttaattttataataaaaattttattttataaaataagtaatataaaaattgataaaaaataaataaatttatgatatatgaaatatgtatatcctacgtcttaacttatgattagcgtatcatatgtaaaaggaatataaaaataataataaataatatatcacaccacttatcctatatttaattaaatatgagatagaataaaaaaataataatttattctatctcattaccaaccaaacatagatatgatatattattccccttcttaccctatcccatattatatctaatcaaactgacataacctaagtaattagaggtattctttttaccttccaatttgttaactcttttctttcagcagctcaatctccctacttctagaattacttatattttcaaggctcttacatgcttcaataagctcatgcaccttctccttgaacaatgcttcatgaacagtggagatctgaagttcaccaaagaatgttgctgcttgagtttcccatagcttaatctccatatttttcagattacttctgttttcaaggccctcacatgctttgataagctcatgcaccttctcttcaaaaaatgcttcacgaaaagtggagatttgaagttcactaaagaatgctgtttcccacagttcaacttcatctcttcccctttgcaaatcatgattcaaggtttcctctcttaactttagcttcttcaatttcttcacacaacttcaacaatttggcctccaaacccctatttacttcacgaaggcatccattctccttttgatgatcattctcttcatatagttttaggatctgcttctcccgatcttctcttatcaccttaacctcatcacattcactctttacaacttccactgttttatgcaactccaccttctcatcctgcaaagcactgagcttctggcatgcttcaagaagttccgtttccttcccagacgatatatcccttccattttcaatttcatgattcaactgatcagcgaaagaattgacagtgttcagctcattctctgacttctccagtgagtccttgagatgaaaattctccatttctaccattcccaacttcccctccattgtcctcaccttctcctcaagggcatagttcacattatgaagttcctcaagattttgaccaagctcttttagttgaacagattctcagtgataaagtctttgaaaatcaaagaaaggttacttagagatattgtttcaccaaagacaacccaattttcttcttctaggatgcgtttctcctcctccaaggataagaacttctttgacaaagatcttttttcttcaagcatcaaagaattctctttctgcaaatttccatgaactagccccttgcaattccaacagctttccttgcagaatctctatttcagctgtcagaactttctctttgtgatcaccctcccttactttcaacctcaatttttcattcaccttcagaagttggtgggtctcactctgcaatgatgagatctgctcactcctgatcctgaacccttcatcaagggtgtttctttctgttgcaagctctgttgcttccaggcccagttgctccagcactataacaagaactaacttctgacatagggtgtcactacaatatagtatcaccttatccactaacaccatagatggcaccaattggtgatgtatttgaaagcgacaccaaagtagataaatggtgacatattcagaaacgacatcatatatttttagtgatgcttaatttgatataaagctgtgtgagatacataaagtgtcatattaaatgcatcatctttgagttatgatgtcacgttaaatgcatcacttttgagttatagtatcacatcattgtaaatgattatagaagatatggttgtttttttgttgattaacctatagaattttgtaatgcttattaataaataagattaacgtgtgtaaattttgttcataaatataataattatattacatttaacatatattttcgtaatgtttatgaattaacttataatacattacatcatccactaatatttgtatatcaaatgtttacaaaacgatagtacatcaaacactacaaacccaccaaaactaaaaaaagaaaagtgaatacacattaaaacatgatttagaaatgttaagtctcccaacattcatcgatacctgcatttcatatgcataaaaaaggctaaccataaaatgacacaagagttgcatccaaaaacccaaaattctaaattccaaataaagtaacatttatgtcgtataatatatgacataagagtcacatctaaaaactcaaatcttgttgtctctttctcatttctttttattcttcatactgtctcccaagagtgtatacctgcattttatagtttaatgagttttagagttcttattgaaaataaaaatgtgatattataaaaaataaacaaatctaagtactaatgttttcttttttctttttcctattttgatataaaaatacctcataaagaataagtaatgttatacaatatcaatggaaaatttatgtaacaactaaggtactcaccatgcatgattacaatacatcaacatgattcatgattagttataatacaaaagtaattcattctcctctaatttcatcaaattttacttgagaatatgttttttgtcatcaaattaaaatcaaatgagaataacattaatatcacaataatcggaagtatggaactatgtacaattcattaaatgagtaaaatctttaatgcaataaccgtagaatcaacaattatctctttaatgaatctcataacaaagtagttgcatttaaactcaaataaaaacaattcaagaaaataaaaaataaatcaaaactataaatcaaaatataaatttaaaattttagaaaatactaatcttccacttaaaatctaccctttttaaatttattttttataattcattacacttttaaaaatcatttttaacatctaattcttcttatatttttttatttcttggaaggattttcttaatttcaatatttttttaatgttcattttgtaaaataacaatgtccattaaatttcatctcaattatataaaataaaattttagtaacaaaatataaaaatgttttcaactactagtatgacaggacatgatattataacaagcatgaaaattgtgtatataagataaacaaaaacctaattcattattaagaaatgttaagagaaaaattagtatgagaaagaattaaagaatctttcataaaaattattgatttttaagtcataactccaattgatttttttttctaagtaaaataattaataaaaaaaattggataagaaaaatatgttcaaataaaaataataataaaataaaagcatcaaaggaaaaaatattcaatattttaaattttttacttttaatattctttagatcaataaattatcaaacatctttttcagaaaaaaaaaaaaaatgaagagttttatggaagaaattggaaaaaaattataataaaatgattttatagaaatttcctaaccatgaaaggaaaatttcatcatcattctcaaattacttcaaagtttggtcaatgtatataaaaacaataagaaaaaaaaggcaaaattaaaacatatttttagaatccttttgcgggagatgacaatattaagaataattttctcaaaaattattttccaaatatcatcaaccaatatcctcatcacaacatactataatattcttataaaataaacaaacagtccaataaaaggaaatttcatagaaaatcaaaagaaaattatcaaacatcttcttaaaaaaaaaaaaaaaggataaaggaagagttttatagaaggaattgaaaaaattatgaaataaaaggattttatagaaattttctaaccttgaaaggaaaatttcatcatcaatctcaaattactctaaattttggtcaatgagtataaaaacaataagaaaagaaggtaaaagcaaaaaacaaaaaaaaaaaattgttaattccaacattccaaaccgactccaacatgatatggaaagtatttcttttttccttttgtgggagatgataatgttgagaataattttctaaaaaattaattttcaaatatcaccaatcaatattctcatcacaatagactataatattccttgaaaacaaacaaaaagtctcatcaaatgaaatttcttgcaagatcaaaagaaaattttatattgtaaaatgtttatctctcattttgagtatgaaaaatattaaaaaatcattcatttttcttattttcatttattttggggtttatgggtttaacaatgaaacagaagatatggtgaaatgttaaacctagtttttactttcctacaactcaataaaaaaacactatttacacaattcatattacagatatatcaaatcaatgaatataaatcaattgtactaataaagattttgatattaataaaaaaaatgaaaataatagatagaagagattttgggttacctgagagtcagttgtgtgttaactatgggtgtgagaagaggtaaaagaaaattttggttagagttatggaatgagatttttttttggattgtgggtatgggaaaacaatgacttttttatatactatcattattctcaaagtgaccccattaagttataatattttttaaaaaaattattttatatggtgtcacttttcgaaaattgacactataaacctaaaattaatatcatcaatcctaattgaaaatttttatatgatgtgtcattgattggagccaaaatatgtgctctaatgagctcttcttggattccattatatacatactatatatcgtttcgaagctcgggaagtcaggagtccaacgcttgaaacaatttgcaaattagaactgaaatgaagaagttatggtcatttgaagacaactgcactatgaaaccaaggtttggttaatcttgattttgatgataacaaaacaaggtttagaactaatgactacattttaagtgtgattaggcaagagttttttaagaccaaagcttcttaagatctctttgtaaggttgttagtgcactaggactttcatgcatttcattctttatttatgcaccaaaatcatccaagagtaatattgttttaaatatcttaagaattggatgatttcatgttttcaactaaaaccttgtgttaaatgattttcaaacttgtgttaaaaggttttaagttgaaaaaggttgagtgttgagccaaaagaatggctcaaccggttcaaccagtcgaccggttgtgctcgtccagtcgaggaccgattgagggagaccaaaaagtttctctctcccagtggccttctcttcccggttaaggttgaacctcaactggttgaggtccggtcgaggaccggtcgaggattggttgaggatcggttgaggtccgattgaggcccaatggtcacttttcctaacggttagtcaaccggttgacccctaactcgactggtcgaacccccaacggctagtatgacttttttcttctataaaaaggctccaaacttcattgtttcataagctaaaccttcccaaatctttcttgattatatttgagccttggaagagtatttttttagtgcaccattattccaaaacttgcatatatttaatgcaccattcaatcctagtttctcttgtatcatttgagcttaaagttcttgtgctaggatttttgagagatcattttatttgtaaatctttgagaggaattttctcaagtgaagggtatcacttgagaggttgttcaagagtgggataactcttgagaagtgtaaagggtgcttggagccaaaagtccaagagggtgaattggaaccataatccaattgtaaagagattggaagcttggttgaagcttcaagatagtggaaccctcactcgattaagaggttgaggagagtagacgtaggcaaggaagtgtcgaaccactataaactctcgtgtttgcactctctcttccctaactcttttaaattatatgcaattgtctttattttgtttattatatacttgtatataattgtcccttatttttgcttagtttaaatttgtgaaaaagagaccatcaccctatttaccccccctctagggtgattaccatagtttggagtagtctcaaattcctaacatgcaccaagctagagggtcatttcgaaattcaacttatgatttcgaaatccacttcgaaatgacaccaatttcaaattcacccactgcaactttgatgttccgcctcctctacctcgggaattgcatctattcaacttatgaattcgaaatccacttcaaaatgacaccaatttcgaattcacccactgccactttgatgtttcgcctcctctaccttgggaattgcatctagggcactccatccgccctaagtggatcccacacgactagaaatcaccattttattatttttaaatcatttttaggaaattattttgtaataagtggccaatgagagtgtgtcacatgttagataattgatgatattatataaactctctcaattctaggttttagaaatcttggatttgtttctggaaagtttgacattgaaggtggaagaagacgagaactttggtttgttttctttttcttctttattaaatatattgtttttagttttttttattcaaattatggatttttaccctattatggattgtgaatgtgacatcatccccatgagaagctaagagccaacttggggcttaaagcatgaaaacctaagggttaggaaacctatagggacaatgagtaaattattgtaacaatgagattaattattgtttgggcaacaatttatcatttttttatccaatccctgtgagttcatttagggaatgatacagtaggttattacttgatactagtgattcttggtaattcttgatcattagttatcctcgtcttctctaccgttatttgcccctaaacaaagctataaggagtaggaatggttaaaaagtcaaatcttaaattgataatcaatctcattcatttgatggttttaggaatctgttttaaaaaggaaaaattaggtttcggatgcaattttgagttatagaactcaacttgattgtgagtggccaaggatcccaaaaccctaagatcatattacttaaaagacccttgttttctctaatttctataccctaggttggattgtggaaaaccccaaacttgaatcaattgaatttaaaatcaatattcatttttttattaatttaatttcttttacttagtttcacattattcacatattgtttttcattttaggatttaaacaaaagcaattcatttattctagtattgacaatttccataagtcagtcattgaggacgatacccggaatactataaaagtcatagtgactctttctctaattttttttcttgaccagagttgctacgtaaaaaggctaagtattttggtacaatagagaagttcggtcagtcacctttatggattttaagctatatggtgtcattattttaaaagtgacaccataaattatttttgttgtagtgttcattttgtgttttacagagaactttttgtattttctagttgacatatgatatcattcaggattgtttgatcttaatcaatcttattttcagccctatgctctacatcagtatcaagtgccctcaatacatgacacatccccattctcatcatttttacttcatcaaacaaggacttaacttgcacctattgctcaagattttcatgttctaattcaaaaattattttctctgacaatttggacacctttgagagtttatggcacttagttgacaaagagattatttgctgccagctcatgtacacatttttgacaatatatttttagtgcattacatttaacaaggggcaaacttgccctagtggtaagatgagttgaaccccaaagttcaagtcccctcaacggcaaaaagaggcatttttgagggggcaccttcttccatggtcatagttgaggtggcgggacgagtggtcttggaaataggtagaatggggtggtatgggagcaaaagggaggtggttgcactgatgttgaccattggatatacatcgcttccatggtcgtagccttaaaaaaaaattgaggaaatggggagacaagtggttttggaaataggtggaatggggtggtacgggagcaaaagacagggtggggggaccagtggtcctgggaatgaggtgatacaaaaggagagagaaaaatggtgagtgacacttggagtttaatcgagtttaaaatctaagaataaaataaaatttaaaattaaaattaaaataaaataaaattaggataaattttggtatcgtcaaacatactcctatttgaatccctaccaacttgatcttattgcccctagcaacaaacatgcataaaccatttcacgaagtatgtgtccagataacccaaaatatcaatagttagctcccggtcttccggtcaaaaaacaacgtcaatgaagacatgtaggtgcactattatgcggtgaggattgtaactttccatgaatttcccatttgtcactcaacaacgaaactttgcttatttctttttttgaggatcgacgaataaaatggtatagaaagtttgcgatgtttttatgaggatcgacgaaactttgcttatgactttttttgaggattgacgagtcaaatggtacagaaagtttgtgatgttttatgaggattgacgaaactttgcttatttcttttttcgaggatcgacgagtcaaatggtataggaagtttccgatgttttatgggtaagagaccttcatgggggccactagttttatctttaaacatgtgtctcgattatgtgacaattggagattaattacatttcattatcttatctttattttgaagatttggctcacttaatgaagcattttcacaaccatatcctgcaacttgtaggattaatttgaaagcaccatttcaatcaaagtttgacacatcagtcttgacttgttactatttttattttaataattgattttgagacatataaaatttatttgaagtattggagacatttaaactttcaaaaaaaaaaaaaaaaacaacaacaacaacaaaataagaaagaaacttatgcaactccttatttggaaaaaatatgtctacaaaaatcgagttcaggtatggtggtaagtcatagcacccctttaaacctatatacatatgatttctactaaatgaattaaaggaattgtaacgattaattaattaatcatgaataccaagattaaatgaacaaatcaatatatacaaaaatgatgataaaatctaattacaagaatgtacaaaataaatgacaagagaattatataaaattatttactaaactaattaaaaaaatttcaaaaaattaattttcaagaaatttcaaaggactttattaaaaacaattttgaattaatgagtccaatttatttatttacaaaaaaagtttcaaatttattttcaacaaatgatttgatttaaatttatttgtatccaattttcaaaaaggttatttacactcatggtcattaaaagaatttataaaaaaattcaaattgactttgtttacaataaaaagatttttttatttattttgttagaaagaaaataagaatttttataactttatttataaaattatttcaatttgattttatttacaaagggaattattttctttacaaactttatttatgaaaatattttcaatccaattttattaaaaaaaaaaatttttacaacttcaatttgcaaaacatgaccctcatcctattcttattaaaaaaattattgaaatcctttatttctaaaaattactttgaatctcattttaattaagaaaataaaaattatttttaaaaaaaatattttttgggacaattttattaaaaaataatttttgggacaattttatttacaaatcaattttctagacaacttgtactaaacaaataaatttttggacagttatcattaaaaacaacttctcaaattttgtcacaaacaattttttttttttcctaaaaacatttttacggactttcctaaaaacatttttatgaatttttattaagaagaatattttagaattattattttattaaaacatatttaatgaattgttcttcttatttaaacaaaatttctgatttgttcaatattcaattttatacacaatgaataaacatatacaagtaaatatttttaaaaatcgataaaaataaaatcaaataatagtgagaaataaaatatgtacccaaataaacctataataaggttaatgttttcctatagctttccaagtttcattttcttctacgaaatttaatactccacgtatcataaattcgtacttaactaacaaaatctcaaagcgaatagtggaataggtccatgcaaaaataaaaataagacaaatgtaaatattcagaaatgtacaaagttcaaaacaaatattgaaatccaaattcaaacttcaaattagtccaacaaatttcattaattaaaaatgggtccaaattagcaaatattacccaatagaaatatcttacatgtcatacaccctactcgaaaattttaaattaataatcaaaatataaatacaatcaaccaaatctaaaatttgatacattaaaataaattcaattatgtctaaatttaatatcttataattcaagtctaatttaatatacaaattcaaaataatatccaaaatatatcacaattatctcatgcccaaattaaatattttttttaaaaaaaactcatataaattataaactaatctaacaaatttcaccaaaaaaaaaaactcaaattccatattaattcatccatccaaatctcacaaagaataattattattacaatcaaagcaagaaaaaaaaataaagataaaacaaaatgaatttacaccttgttggagactacgaaggaaatttggggcaagcagtggttggaagggcaaataatggtctgacaaatgaagaaaagacaaaaatacaaaagggagaaatgggggaagaaaagacaaaaaaaaaaaggagagtggggagggcggtagaagtagcgtgtgtggaaggaagactacgaagcgaaaaattccatcaccatcactggaagactacgaagcgaaaaattccatcaccatcactggaagactacgaagctccatcaccatcactggaaggaagactacgaagtgaaaaaaccccttccaccaccaccattgccagtgccagccgagaccccccactgaatttagtataaaaacctaaacactctcattttcatcaattcaaaatggattcaaattaacaaatattacccaatagaaatatcttacgcatcatacaccctacttcaaaatttctaaattaataatcagaacataagcacaataaaccaaacctaaatttaataaattaaaataaatttaattagatctaaatttaatatcttataattcaaatctaatt

SEQ ID NO: 11901 - DNA, 5986 bp, Vitis vinifera
  Intron number 7 from transcript GSVIVT01035079001 (locus G SVIVG01035079001) derived from phytozome v7.0 (chr-ID chr5 ; pos 1326885 to 1332870 reverse strand)
gaggtaaggcttgatcaaaatttttactattgactctgttttaattagttgaacactacagtatggatcctaatgtcttagaaacctgtacaaaagttttggaaattcatattttatttacaatgaagtttttctttcatagaataaactaggttttatacaaaaatgatttgcttctgatcaaacttgatacacctggatggtagtggtctcttgctgcccatttctttgaccattttccttatcttttatggttccataaaaatatcaaagatgggtgaaaaagggcaatcttaatctttggcatggagattctttaggtgggagccatcaactcctgtgaaatcttcttatttttagtatttgtttgatttttttttttttgataagtaagcagatattagattaaaaaggcaaaaagccacacagcatacaggacgtatacaaagcagccaaacccaaaaaccagaagaagcccacaaccacacctaccctcaagtggacgctagccactctagaaaacctaagagtgaagaggactcctctccaatatacaccctagcccaactccacagattacatacaaaagaatttttgagtttctgtatagataagaatccccccctaaaagctaatctattcttttccttccaaaccgtccaaaaaatacacaacgggatggaaatccaagtctttttcctttttttccccacaaaagaacccctccaactgaaaagcatatctttaatcgtttatggaaacacccactgaatgccaaacaagactaggacaatctcccaaagaacccggatcactgtacaatgtagaagaatgtgatttacagtttcttcttcacacccacacaaaaaacatcggttagggagctgccacccccttattttgaagcctatccagggttagaaccttcccccacgtgacctcccaagcaaaaaacacaactttagttgggaccttgtccacccaaatgcactttttcggaaatacaatatcatttgaatcaacaagcagattgtaagcctccttaaccctaaaaatgccacttcccccacctttccagaaaaccgaatcctcctctgaagaaattttgtagtcccttagcatagacagcaaattacctaccaaatccacctcccaatcattaaagtctctagagaaactgatgttccaacttccttggccaaaattagggtcccaaacttcattaaccgttgcattcctatgagctgccaattcgaataaaagggggaaaatttgagacagcgctgcattgccgcaccaatggtcagtccagaacctaactttggtccctttacccaccttgaactctatgttatcccaacaccaatcagcctccttcagaatctccttccaaactcccactccaaacgtcccacgagcctcattagtcctccaaccaaggccctcttgaccaaacttctccataatcaccttcttccaaagcttatccttttcaaaggcaaacctccataaccattttcccagcaaaaccttattcaaaagggcaatcctcctaatgccaagaccccccttctccttttgagcacacaccacctcccaattaattaagtgaactttcctttccaagcttccccctccccaaaggaagtctctttgtagcttttcgagccttcttgccaccatcttgggcattcgaaagagggacaattggtaaattggcatgctggccagtgtgctcttaatgagggtaaccctcccgtctttggaaatatattgccttttccacaaggctaatcttctcctcattttctcctccaccccatcccacatcgaggaagccttgtgggaagcccttaacggcagccccaaatacacattgggcaaataccccaccctacaacctagctccacggccatctcctcaatctcttccacctcgccaactggaattaactcacttttggctaaatttatccttaacccagacgcagcctcgaaccaagccagaatccagcttagaaaagtcatgttttctttccttgcttcacaaaaaataattgtgtcatccgcaaaaagcaaatgagagacatttaactccatcctgctcctcccccaaaatctgcagcctgaaaagaaacccccgacagcagcccttcttaaaagtgcactaagcacttccatacccaagacaaaaaggtaaggagaaagggggtctccctgacgcaaccccttggtgcttgaaaagaagcctgttggcactccattaacaagaacagagaatttggcagttgaaatgcaccaccagatccactccatccacctagacccaaagcccaatttacacagaatcttcataagaaaatcccaatttatgctgtcataggctttttcaatgtccagtttacaaatcaaccctttctccttgcgtttttgccaagtatcaatcacctcgttagctataagcgaagcgtccaatatttgtctccccttcacaaacgcattttggtccaaggaaaccacccttcctaggaccttcttcagcctatttgccaacaccttagccaaaagcttgtacaatccccctaataggctgatcggcctaaagtcacccaaatcctcggcgcctcctttctttggaataagaaccagaaacgttgtattcaagctctttgcaaaagatctttggtcataaaattccttgaataactccaggatctcctccttcacaaagtcccagcattcttgccaaaaagctactgtaaacccatccgggcctggggctttgtccccatccatatccatcaaggcagaatgtatttcatcttcagagaaaggtaactccaaatttccagcttcttgactacttaaatgacttagatgcaacccctctatgtcagctttccagcctgactcttctgagagaagctgctgaaaggcattgacaatcccctccttcacctcctgctcctccgacagccataccccattaatcttgattctgtccaatgtattatttctttggtgtgcgtttgccattcgatggaagtagcctgtgttcttatccccttcctttaaccaaagttccctggacagttgcctccaatggagttcttccagcaacacccacttctgataggtttccttggcttctttctttagctctgtctccctctctgaaaggatcctctcattttccaccccatcccagtgctctacttgatggagagctaagtttttgttaacttccaaccgaccaaatacatccctattccacactttgatcttcttcttcaactccttcaactttgaggccagtctgaagctggcattccctctcaccacagtctcctgccaccacccccgaagcaagttcttaaacccaacaactttaagccacatattttcgaacctaaacggggagggacccctcctaagacctccgcactccagcaaaatgggaaagtggtctgaagtgggtcttggcagcctgctctgaatcaccccactgaaatgatcaagccaattctgggtcaccaagaatctgtcgagcctagcccacgactgactctccctacccccattccaagtacacctccccccttgcaaaggaaggtcaatcagctcaagctcgtccaccatctgggcgaatcttctcatcgccccagtaatccttccttgcctgcttctttccccttgaaagagggtaatattgaagtccccccctaagcaccaaggaacatcccaaagacctctaatcgctcctagctcctcccacaaacaatccctttcctctctagagaaaggtccatacactcctgtgaacatccaaattagaccatcttctacattcctgactctacaggaaattgagaattggcccacctccacatcgagcacatccaacgtccttttatcccaacataccaaaatccctcctgcagagcctgaaacttctaaggccccccaacctaggaacctacccatacccaagcttctcatcacaccctccgacatagcttgaatttttgtttcttggaggcagaacacatccacccgctggcttctaatcagggccttaatcaccttccttttggaactatcattagctccacggacattccaactcaatagtcttaacttcataggacttctaagatttgacaccctcttccttgcctaccaccaatctgtcttttccctccttcgtagttgatagaacactctagtcttcttaactccctctcaaatttagatttttccaacaaagatttactatggattctttcccttctctttctaattttaaccagaaagtccatgatatccttctccagtccctctgtggagaaccccaagaaattgctgaacctagccaaatcactctcctcccaactggcctcctcccaatctctaccttcttgaggcttagattgatctggtctcaattccgctctgcttacttcactgcaaccgttgtttgcctccaccagctcccactgagtaacggttttaccctccgtgaagcccgaagcattgagcatacataacggcgtttccccctggacggtctcacacacggtcccagaatagtcgtaatactccctttcaggagtccgaccatgaaaaaaagagaaaggggaagagaatccagagactaatgctcctttaagattaaaagcattcccatacctcgaagcttcctcaattagggcaagatcagtctttgatttctccacaacttggatttctatttcaaattgctttcttaagccatccttctcccagaaaatggaagactctgattttggccatcccaagcagtttggatctagtctctttgaagaagtggcctctcccacttgggctttgcccactggcactgaatggggctgaacccttaccagcccaggctcctcatttaatccattatccttggtctgcccagaatccttccttgtgcacagcccattaagacacggcccaaaagaaccaaaagctaaatccacttctagactagggagagggacctcaactgggcccttcttgggggagccacccagcaatggcctgcctccacgggtccggcccaacaccccatcatggctccgaatagagcccataggacgccctgacccatacgtctgactctgcatcccatctgcagactgaatcatgacctcgagcctcgtgtcgttaccctcctccaccacgcgcttccccgcgcgtgtatctgcctcacccccaatgtcgacatctaccacagctctcttcccgcttttttcagtcggaaaaatcctcagaagcggtctgacttcccaccacagggttagcacatagcacctctcatcaacccaaatttccaccgcattaggaagctcgtcaccgtttaccttcaccagtatccgggcccactgcaactcctccagcttctccgtttgcgtgtcgactgccaagaatcccccacattcctcccctactcttctcagaatgtcccagtcccataacgagaccggtaaccccactatcctcacccaagcctcgcttctagcttccccttccatcacacaccccgtttcggggctccatttttccacgcgtaagaaagtccccccaaccgacattttcccagagttgattttgatgcatacaattagatcatttgattgtttaatttttattttattttattttttgtcttttataatgtttcatccatgtgtcctcaggaatggtttttctcagtgttctccaagtcttctctttacaattttggcttgatttgatgtttatggtttgttagtctgaaagttttcgtatttttttttgaaatatcaaatagttgttgtatggatggtaaaaagaaatggaaatttttacatttatccctatagtcccatgtgaaaatttttaatttttgttctacattttatatggatcactaaatacttgtttaattatttgacagttactgctttagaccgtgcaa

SEQ ID NO: 11902 - DNA, 3417 bp, Vitis vinifera
  Intron number 4 from transcript GSVIVT01001830001 (locus G SVIVG01001830001) derived from phytozome v7.0 (chr-ID chr1 4; pos 26161264 to 26164680)
taactggttaccgtgatccacctgctggcatttcggtaaattcttcttcactgatgatattagttttcatggttaattttgtgacacagacttcataattttcttataaactttaacatcacgactttgtatttttactaaatcaatgcactttgtagctttaggtaagataaattctaaagatgatgtcttaaatagggataccgaatcattctgctatgattttaattcaaagcttcaatcctagttgcttggtttcaggcaaatgaatcactccttttcaatttagctatatttttaatccaaggtcacatcatttgttgaagaataagtgtcttctttcacttcctcaagccactttgtgtttatctgttgatgaggtgtgattaaaggtctcaacatcgctgccatctgtaaccaccctttctccaagcttgggactgtttcattatctatgacacactaacacacaattcaagggatcaagaagtaaagaattttgcattttgcactagccattctaactttggcatctaggaagttgtctcacttacaactggcttaattggttacttgattggcctttgttcttgtcatatagagggttcatacagccaatttagatcgtcaagtggttgggtgcctggtacagtcgcttctgactgtcctacttgaatccagccatacatgccattttctctcattgatgatggtcattgaatctggacttttctaatagagaaagacaccagtgcatggacttggagcttcacctgagtctttttatgacaattgggtgtggataaagggagggggggaaaagcaaaggaaaaaggggaaaaggttttttacatttttaatttcaggagagggttgctagtgtttggttaagtgaacaaagagggtttcttgaccaaaaacccttattgtatagtataagacattcacaacttgtgccctttacattttacattaaatatttgttatgttttctaaaaacccctaatgttagtcttacttatagtccagtgatattaattttctatactaaaatcccttattgtatcatatagggcatttgccaatagtcccctttaactttttatcttttacctagagcaatatatttgtcatgttactagaaacccaatttagttacctacaatccagctatgcaaaatttgtgtaaaccagtcctttattaaagtacctttttaattaagtatccagacataattgttggacaccaacatattagctatactgcagcaccctaatttttgcttgctgaatttttttatacaatctttgtaatttttttatttatttagcaaacagagaatctattaaaatagcgccaatgaaaggagacacaacctaagtatatgggaagtatacacaaagaacaaaacaaagaataccaacaggtatctaaaaaaaaagcctcaaaaccaaattatctgcaactaagactatctatgaaggtcatcattgagaaatttcccatttctagggatactttagaccaaattaggagggattttaatgaagctcttgttaacctctgatctgcaagctcttctccattaaagattctgaggttttgctctttccaaatacaccaaaacaagcaaaggggtgtcattcgccaaacatggtggcttttcttatccaaccccttaaacttccacttgaaaagcagattcctcattgtagctggaaatatccaattctaaccaaaagttgataagagaaacgtttataacacctttgtcctcgcacaacaaatcaaaatgtgatcaatagactctccgctctcttagtaatttgaaatttattgaaggttgaaggtcaattttatgttgtattagttgtttccaatatatatatatatattgtagttcatagaagagtgatacataattcttgataatttgtggtttctgttttttaaatatatctaggactaggtacttagatggtattgtacatgaattggattatttttagtgatacatgataagtcatagcatgtcaacctaacaaattccttctaaccgaggaatgcataacccactacacaccaaaaaggagtaaatcaagttccacaatgaagtggacgaacttcaacaagagaacggatttcaccactaaacgagaattgaatttgaggcaaacataaaccatccatgttcgctagaaaacgaacttccgtgttagtaagaaaatgagcttccatgttcgaaagaaaatgaacttccctgttcgcaagaaaacaaacttccgtgttctcacgaacacaaaagtttctgtttcgaagaatattttctgttgagccgcattcaataagattgagacacgtgtcaaacaacttctctataaaagaggaaagttctggaagagaaagggaattttttgaaccaaaacacacaacattctagccttgtcacaaaacaggagtaggtgatctgtagtttcctcctcttttttgcacaagtaacacctatttgggatattccaacccctctttttcagctggtcaaaagtttgctgcaagacatttcccaggcaaaaaaccgaccctcaccggagcccttgacctccaaataatactaaatggaaaacgatctctagaagccctagtgtaggagcaataaatagatctaattgaaaattttccgttcttgctttctatccagctcaaaatgtccacttcccttctaaaatatttggatcatggcataaaatgtctgcgagtttttcaattaggccatggactaatatctggttggcactttgatgcttccattgtttttctttctcatggaatgtcagttttagatgctgtgtttgtatgccttaaatggatagttggtgcatccaagacaatggttgagcaaaagctttcatcttaagcatgatatattgtatcttaatccttttcaccaacgttgctgctccaccatggatggaggtgtgggttccagaccttgaatattgccaacagaagatattttgtggatccttcttactttcattaaaaaaaaaaaatctggctatcattttaatgaatgggaaaatgtgagtctttttacccttgagggctttcatctgcttgtattttttgtttcttttctactgcagttgtagggtgttttgaggtgttggtttatttgccttggcttttaaagccagcatgtgtttacatatgcatagaaacacacgacagtctttagttgtgcccataggaaagcagatattatccagtgtacccatcaatgctgctgatttttttttattttttatgtttatggacatattctgttcatgatgacctattcctctacctaatcaatcaagttgttcacaaatatttttgtagatccgagaagggttgcactacaatccttacttccc

SEQ ID NO: 11903 - DNA, 6856 bp, Vitis vinifera
  Intron number 8 from transcript GSVIVT01013460001 (locus G SVIVG01013460001) derived from phytozome v7.0 (chr-ID chr1 8; pos 287837 to 294692 reverse strand)
cttggttcctttagaaaggtaagattcatttggcatacttgtctgtcctagttctgttgtgatctttcttacgtgtgatactttttttggatgataaattaatattggtagcacattagctgtttagatgggttgaaatattaatattctcattttctttttactactgcttgcattttgtttttcttggcaggcatgcaggaatttttttccttatgagacaaaatcatgatttgcaattgaataacatccagctgcttacctgtcaaaaaaaaatccatctatataaatctcatgctataacagtctttctgttattttcaacaatcaaaaacttgaaaatcaaatcccaaatcaaaattttaagcaattacataattacggcccttccaccaaatgtatggatgattcaattccagttgaggcaaaataatgcatctgaagattgttggagcctcccacttgtgcaaggaaattggttgacagtctcttagattcatccatgctcagttttccttcatctcatgaagagcactgaatatctcaacttcttttcaagatgcctgagaaagttattaaattaaatcagggtttaatgccatattatgatgttctcaagctataacgttattaactactggctgaccaatgttccctttgctctcctttctacttatttgggcctccctttgggagcctccttcaaatccattcaagcttgggatgtagtggaggaaggattttagagaagacttgccttatggaagatgcagtacttgtcaaaaggagggagattgactttattaaagaacactttatctagtttgcctatatatttcatgtctttattcgtgatcccttataaggtgaatcttagattggagaagatccaaaggggctttctttaagagggaaaaagaagggggtctagtagttagaaagttttttttttttttttcttaatttctttctttcttctaaataaggattttattgggaagtggtgttcgagatttgcttttgagaatgattccttttggaactaggtggttataaggaaatatggagaggaaaagggggattggtgttctagaactttgacggaaggccacagggtgggtctttgaaaggcgaattggtgtgggtggaagagattctatgataggattggctttagggtgggaaatggcaagatggtgaggttttggaaagataggtggtgtggggaggaacctttaatgacttttcaagagttgttttcaatcgccactgataaaaaagcctgggtggatcagatgtgggagcaagttggggaagcaggttgttggaatctaatattcacaagatagataaataattgggaattaggtgaggtggaagggttgcctagaaggctacaagggcatgcgattggaggaggagtagaggctgttatggcttggcggttgtcaaagggagatactttttcaatcaaatttttttactcctccttagtaggttgttactcgaaaggtttacccacaagcatggtgtggaatccttgggtgtcgatgagagtcagcttctttgcttgggaagtaggttgggaaaaattctaactttggatctgctaaaaaaggaagggttggagtcttccaaacagatgttatttgtgtaaggatgaaaaagagtcagttgaccatattctcctttactatcctaatgcaataatgttgtggcaccttatttttgttatttttgatgtacagtaggtgatgtcattctcaatcaaggagaccttcattagttggttcgaaccttttggaaggagagaaaccgaagagcctttgaagactttgaactaacatgccatgctattttttgcttctttatgtatatgttttttgagtgggttagggtacatatagagtttgtttctttgtctctttttgatttcattgattggttgggctgtaagtgaagtgagggtattttttttgtttatccctcatttttttggccttgtatacatcatgtatattttaggcaccttttttttgtgcttttaatacaattgctttacatataaataaataataaaaaaaatcttccaaaaaaaaaaaaaaaaaaaagaagtgttcatttagttatgtttagtataagtttcttgtggaaaattttctgttaaaggcctgtactaagttttggaaccaggaggtttttccaatttcccagttgcaatcatttggaattcttgggtgccacctaagattgacttctttgcatgagaggctacttgggataaagtcttaactttggatcttttaaagaggagagggtggtcagtggcaaataaatgttttctttgtcatgaataggaagaatcaattgatcacattctcatctattgtgacaaaactcgggttgtttgacatattttgttttctccgtttggtgtgtcttgggtgctgccctctttagtaagagtgttactcttaagttggcacaggccctttgtgggtaggaaaaggaaggtttggtgggccactcctttgtgtttgttttagacagtctggaaagaaaggaatggtaaagcatttgataacaaagagttgtctagcgaagggattaaacttgtttttctttgtaacctttgggcgtagtccaatttgtgtatggttttaggcatctcctctattgtagattttgtggattggttaggggcttgttgaggggtgttgttttttgttagtccctctttttttggttggtgttgttggctccctttgtatactctctttgtgcactttgggagctttttggtgacggttattgtttacctatcaaaaaaaaaaaaagaagttttcttgaaataaaatgctatccatcctagagaaaaaaactagaatcatattggttagagataatattttggtatgttaaggtactgactcaaacataaatctacgatgctatttctgtattttttggaactagcttaagtcaatctagaaactattctcatttttttcattagacaccttagatttcatgttgaaaatctgttgttaaaattttgatacttatgtaatgcaaaaattcattagacctcttttttattattttttgttacttccataagccttagggtgtcctaatcttcttttcatgtctatttatatgaaggagatggcaaacaatctcatcatcaatgttttaaaaacttgaattgactgaacagttggaccatcaactggtcattttgcaggatagtttacaccctgtgattgccatatgctaaaaaaccattgtttttaagagcatcagttacaccattggttcaattgttgacctgcttgaatggacacagtttccaatacctggctagttttttaatgtacaaaatccttctttggcagcaggggtagctcgtacttttccagccatttaaacttcaattacccctttccaaaactggtgattatcagcaccaggtttctctatctccctctctccctctctctgtctcctacatgtttgctggatagattcctgattaatgatttcttatgtatatttaattgcaatgttatactactttagggattctttatactttctaaaaacatgttagaatttttagaaaattcttttgattttatgttttatgtgattatattcaatcattttatttttcttcaattaataaataattgtgacatcatattcaattccagttgactcatggctgagtcagcgaccttaaatctattccccttttcaggtttgttgaatggccctattttaaagcattgctcatcattcaatacttcaacttcaatgggtctgatctagattaattcaataatctaatttaaatttctactatttaatgagaaacacagtgtggactttagtcacaggggtgccatcccttctctgatatccttggtgttaaatatcacagtgttttaaatgtttgaaggtaaaatttaaatttgaagtggtggatgctgtgttgatagctaatgaagtggtggatgagaaaagaaggtcaggggaggaaggggtagtcttcaaaatcgattttgagaaggcctatgatcatgtggattggggctttttagatcatgtgctacaaaggaaggggttcagccagaaatggagatcttggataaggggctgtttgtcttcatcaagttttgtaatcctagttaatgggagtgcaaagggttgggttaaggcctttagaggtttgagacaaggagaccccctttctccttttctttttactctagtggcagatgttctaagtaggttgatgatcagagcagaggaaactgggataattgagggtttctttgtggggagggataggactagagtgtctttgttacagtttgctgatgacaccattttttctctaaaacctctatggaacatcttcaaaatctcaagattatccttttggtttttgggcaagtatctggtttaaaaatcaacttagaaaaaaacactatttcaggtattaacactaggcatgagttgttgtctagcttggcctcggttttggattgcagagtgttagagtgacctttgtcttatttaggccttccattgggaaggaacccaaagacaataagcttttgggatccggtggttgagagaatttcgaggaggcttggatggttggaaaaagacctttttgtctttggggaagggaggattactttaattcagtcttgtctgtctcacatccctatctacttcctctccctctttaaaatcctagcatcaatagcttcaaagattgagaagatgcaaaaggattttctttggtctggggcgggggaagagaagaaagatcatcttatcagatgggagattgttagtagaccaaaggagttgggaggtttgggttttgggaagatttctatgagaaaattgctcttttagggaaatgactttggaggttccctagagaaaggagtggtctttggcataaggtaattgcgagtatatatgggacacatcctaatggatgggatgccaacatggtggttagatggtcacacagatgtccttggaagactattgctcaagttttccaggttttttccccttttgtccgcctagtggtgggcaatggggagagaattcttttttgggaagatctttggtggggtaactaaactttgtgttctcaatttgctgatctttacagagttatttctgtgaaaaacctcactgtctcaaatgtccttggtaattcctttccactgtcttggaattttaactttcgtcgcaatcttacagattcagaaattgatctccttcagagattaatgtcttcccttagttatgtgcttttctctccttctttagtagatttaagagcgtggtctttgtcttcgtcaggattgtttttagtgaaattttttttcttggccttgtcaaaagtctcaaatcctatcttgttccttctggccaagttcttgtggagtttaaaagccccttcaaaggttaaggccctcgcttggttagtagcacatgggaaggtaaacaccaacgataagttgcaattgagaagaccctacaaatccctctatcctcaatagtgcattctttgcaaaggaaatggagagtcgattgaccacctttttcttcattgtcttgttaccattggactctggcacaagttgttcaatctagcaaggttggtttgggtccctccaaggagttttgaggacatgttggttattacttttaaaggcatggggaactcattaagaggcaagacactttggcaaatcgcttgccttaccttgatttggatggtgtggcaagagagaaacaataggatctttgaggataaagggagaacggaagagatgttatgggatttgattcggttctattcttctctatgggcttcttgtactgaagcttttagaggagttcctctaagtgttttacaactcaactagattgcggtttgcgcttcaaaagtttgaagattgttgggggtttctctttgtttttagagttctattgttaggagttttctcctttgttcagtttgtgtaggaaggacctctcatccttcccttggtttcttctctttcttttgtaacttttctttctcctgtatcttttcttctattaatatattcttcttcatttctgttaaaaaaaaaaattttaatttgacctcacacattaatcatcccgcatttaatgtccctgctcttgattggctaggcgctagatgagggacggttttgtatcttctcttcttttgtttgggccttaaggtgccttttgtataccccctgtatgcttttgggttttcctcaaggtgcccttttctaatatatttctgcttttgcctatcaaaaaaaaatgtccctgctcttgagaaagagatccttttgaactcaagtttgagtgcattgaaacgttgttgatccaatgattttgaattattctggcttgtatttgaacttattgcattgttaacttgaaaaatgtgtatacaatcatcaaacttgttatgaagttcacaattggttctgcttgctcctttgaacatgaaattccttgactcaatttcacatttgattactcaagtcttcctaaaatcgtaagtaatagtttaacaaactaggatccataggatatttcagtattaaaattataattccttaaaatgattctattcactgttaatgttttgatccttgtatagtagcaattgtattgtatttttctcatagtgtttcagtccttatttcaatattcacaatgtacaaaatgacataaattggtttatctgtatgaagggtatcgagcaatttcggcaagctttggagatctc

SEQ ID NO: 11904 - DNA, 2808 bp, Vitis vinifera
  Intron number 6 from transcript GSVIVT01012233001 (locus G SVIVG01012233001) derived from phytozome v7.0 (chr-ID chr1 ; pos 368805 to 371612 reverse strand)
tatcctgctgactgagcaaggagaggtcaagttgggtgagtgcagttcaccatttatttctatagcaaattaaagaagcattgctttttatggaaagcatgaggtgaaatcctagttgatgggtgaatccaactgttcttttgagctgatgatgttgacaagataatgtcttaccatattttcggttataatggtctgattcattgaaacttcttttagtgtatttgtagtcgactgatcactttgaaatacttttgcaccttagtctctttgtaatatttatacactatgttttgactgaaagtaaaaggaaaaacacaaatctacagccttacttgtgatttgtgcttaagtctctttagttgaaatgaaagaaataaatgaataagataaaagaaaagaaagaagaccactgatagccttgaagatttcaatttcaatttattgttttaacttcattgctgtttgaattctagatcaatacatagattttcttccacttcttggatgaaatattaagagtgagaccaaggagacatgaaagttttaccagtatttcatcatggaaaagctttctaataaagtggacatcatcattattgagactggaaaagattaaacaagcacatgcattttttttgataagcacatggtatatatataagctatagaaagagcaacaacgaagaatattatgtacacagggagtatgcaaagagcgccaagagggagttgaggtgaagtgtaaaatctactcaataattgttgttgccattatggagaggaaccaagtcgcttagatatgcattatgatccaaattcaccctgtggaccaaaacaattcataatttggttacttagaggattgatttctacccctagagcttacaggtacatttgcccatagctccatgcatgacacactgttatagaggagatatgttaagactaacaagtacaacttgtaacattactattcggaaatcgagttgatgccttctgaattaatttatgtgattcatgctatacatcctgagtagggatgcttgtcgggtttaatatattcatatttttgcttgcttataacaagagaaaagaataatggtgaacttccctacttgaggctcagtggaggggatttttttttttcacaggattaagtggacatatggtaaggctgtacaggttgctaagaagcaattgaagaaacttgtgaagatgctgatggaaggaactgtttttttctctttctaaatggatgttggaaaataactgttcatataaaatctcaatgtatttatttgttattgcaaacatcaatttatacatcaaaatcaaaacatattaacataaaaggagttcaagaaaaaggccctaccaaaagtgtgccaatactgaatgatagtaatataaaaaggtagatacttgaggagggaatgacttccttgtttttttttttttttttttttttgtagataaaaggctgtatattaaacgaaaagaggaagtacaaaaaacagtgccctcaaagtatacagggagtatacaaaagcagcccaaagactcaaaccaaaggggaagggatagaaacacatcacctccccttactgagagcctaaccaatcaaaaaaacttacaagagaaaaatggctcaaaactatagacaccctaacccaagaccaaagattacatataaaagaatatttcagtctttcccttctttattttccatctctttgtctaaggatgcttgggtgtcagatgtttggaaccccgaaggtgatgggattggttggacctctcttttctctagggcgtttaatgattggaagattgagttggtggagcgttttatgcttaagatccaagcctttagggtgcaaagggaggaggaagatagagtgttttggacaacttcaaagtgtggtgctttctcagtaaagtctctttatgctatgttggagctcggagattttcctttgttccctagtggtagtatttggagggcgagtgtgcctcctaagttgactttctttgcttgggaggcttcttggggtaaagtcttaactttggagcaacttcaaaggagggggtattcattggcaaacaagtgttttctatgtctctctgaagtagagacggtggatcaccttttacttcattgtgtaaagacgtgggttctatgaaatcttcttttctccctatttggtgtggcgtggattctctcgtgttcagtgaaggaaactcttcttgggtgacatgggacgtttgtggggaaagctcatagaaaggcttggcaaatggccccctaaggcaatgactttcttatcatgttcaaattagtgtaaactcatggatacttctgatgtgcccatatatgatgtgttgtggacactgatatttattggatgtggcttgatatttgttggatagaagccacatgcatcttgaattcaaaagtattttttcagaaattggatgtgttttagaactcttaggttagaacctggtacacttaggatttggcagggtttatacagcatatttgatgaaaagagaagtacagaaaataggttatattccacaaaatgctataaattatgaacacgatacacagattttttatttaattgtctgcatccatgctgtatagtagctttagctgtctgattctcaatacaatgatattacttttttggtttttttatttattttacaatatgaagttggcgtttatccatagttgatgttatgtttttgataacatgagcaggtgattttggggttgcagcgcagcttacaaggacc

SEQ ID NO: 11905 - DNA, 2402 bp, Vitis vinifera
  Intron number 11 from transcript GSVIVT01023837001 (locus GSVIVG01023837001) derived from phytozome v7.0 (chr-ID chr 3; pos 3074595 to 3076996)
atttgctttagagggcattgaggagggcattgaaggtaaaaactatccttttaaatgattttgttatcattttaaggtctttttttgagctttgtttaggaaaaatgacctaattcctgaaataggcttagttttgttaaacacaatggatactaattggatggcttcctgatggatatatggtaagctgataaagaatcttcatatggcctggttggtgattgcctagtttaaatctttcatgagtttcccagtgataattcacttttatatttaattctggggacaactcaatgctttattagagagtgtattctagtaaaattttaagaataatcacttttaatggcaattatagtttggttgaggtcttaggccagttaccttacaaagaagctaaggagtttgtgcttaggttgaagagaaatatttataagaaattattatatcgatgcaattgattttccatctgataaaataagtaaataaattacattcagagcattataatataactttgactttggtcaattatcctattggagactcttctattttcattgtaaccattgcaattagaaaagaattgtgtatgtgtttttatttttattttttctgttttttttttttctcataagacaacccttgaatttcattttatagacgaagtcctgaggcaaatatcacatgctgtgattgttagtttcaagaattataaataaagtaattctagggaatttatgcttccagtgagtcatggccattgaagtcctgctcccttagatgcttttgaaacataccccaagctacaaccaatattagaatgttcaccaaaagctttaagacaaaggctgaaagaggggacactcccatatgacctctctcttcatttgatacatctatatagctattttatcaagctaagcatctaccgaatctataacacaatttatctccaaatttaatgtaatttcgggctgtgtcctggtcaaagttcaacccctctaacaaataatattggctgcatatggaggccacatttggggcctcacaaatatgtcaggcatgttttgattagcaaagtgtagatgtatgtagaatatgtcaggttcatggtttgcaaacaatagtggcctcttaatagccttgctctaacctatggccttagaggagatttataaacaattgtttgatatgttacttttcctagtttcaggatcttagttggggaccttctatttggggttctacttccactctggagccttattccatcctttctgtactgtttattgactgaggaaaacttatatataagagagacaagtgctaatttctaggacaatctggttaataaattatgaaaggaaactatacaaaatcgggaaaggtaaaataccaagtaggaaaaaaaactaaaacataatcaaagtcaaaatatgctcccttaattaggcatgcaatctggtagaatcagactctaaatcaggcagtttacatcaacttcttcagactgatcatgcttttttaccatggtgtgttaaattcaggagcagttccatgatttcatcactctactaatggaaattccattgcatttcagtagttaatcctagaatttggctttgcctcttaaagaggagaaagtattcatttaccttctttgtactacatcaacatgctgatatggtacaacaaaggtatagcatgctttctccttaaagagtaagtcttaagtacaatgttgtaaggattgtttcatgcttttttacatggtttattagaaggcaatttttcttgtgcatattgtaaacaaataaaatatcgattaaaataagaaaatatcttatataattctaaaggcacatcttaacctatagaattcctttcaatgatggagctggagccatttcttcaatcaaatggtaggccattatgttgtttcttactgactcaactgatgaactttttactatcccctgatctttcttttgtcatgtagttccttcaacttaatcaaataactccttttagttgtgcaatgactggtgtagttatatttgacctgaccaccttagctacccgtatgtagaaacatgtatgcacttcaaacctgatatttttttttagatttgctactccagaactcactccatgcttaccactgctatcagcatcgtagcattattttactcaggaaattttttggtcttgagtatttatttaactgtggagaatgccaattcgaccatcctgttttagtagcatgaattttcaaaaaaaccatgattacttcaatttgttgttatcacatattcctttttgcataatacattctatttgcctcacttctaattttattatttaactgtcatatagggattgagagtgagaagtcaact

SEQ ID NO: 11906 - DNA, 206 bp, Vitis vinifera
  Intron number 4 from transcript GSVIVT01027181001 (locus G SVIVG01027181001) derived from phytozome v7.0 (chr-ID chr1 5; pos 17219593 to 17219798)
agattgaagagcttaagcattgcccattttccgaggtaattaatctccgagcctgaggtataggtccaaatctttgtcaagcaaatttattttatcttgttaatatttcgaatgatgaatcatattcagttaaactgaagcttcttttgtagttttgttattttgttccataggtttgcttaaaactcaagtctaatgttttagat

SEQ ID NO: 11907 - DNA, 8891 bp, Vitis vinifera
  Intron number 1 from transcript GSVIVT01032436001 (locus G SVIVG01032436001) derived from phytozome v7.0 (chr-ID chr1 4; pos 27388502 to 27397392 reverse strand)
aaggcgacgcagctcgtgatttcttgccactcaccgtatgtaatattacaattcatggaaatttaatagacacgttcattccttaacctgattttttttttttttttaagctgtggtgtttgatgttttgtttatttattttttgattttaatgcctatccttaccattttctgggtgctctgcttgtttgcagagaaaaaaaaaaatcctagagaaatttagctgaggtggaaataaaatgcaaattttctcaagcttaattgtaaaattgtaggaacttctgggagttctgataccgcttgttggcgctgccaaagtggctgatttgggtttttctggtggcaaaaagtgagcgcatggactaaggtcgtgtttggaatgccggaatagagatgaattccatttccattccttaatgcttttggatttttttatttttagaatggaataggaataaaaagttcattagtacgggaatcaaattccactctcactaagattttgattcctctcttctacatggtattgtgattcaccttcatgtccatcctatttccattcctattcccacataccaaattcatcatccaatagtgctgagtctgctgcaagaaggtaaataaacttactagcggagagccccaaagcttaaaaccaaaagtaacttcattagatacaagttgtctatcacaaggctacaaaaacaagcactggaaataaaacccaaaaagggaaatgcagtgaaccaatggtcgcattagccaccatgatctaacttaacccgctccataagatgggcaacacccctgtacttcgagtgcaaccaaaaccacacagtgaatctctttttatagattcttaaacccatggcccttttgtaggctcctttagtaaatccaatttatatgcctatcaaaaatccggtataccttggtgtgctgctttattagaggctgtctataatatttggcgtgcatattaaaaaaaattataagcctatcaagaaatttttttaaagtaacttatgataaaaaaaaaaaaaaaaaagaatgtaagtaacttctgtttcaaccagaaaaggttttcttaaaagaattctagaagacaaatcttctctagtaagaattcaagacaacttccaaccaaatgcccataaagctaaattgaatttttagtctctgtttgatttttggaggaatgaagaaagtgggaagaaaatgcttaaacatgcatttcagtttgatcattccagctggaactgatttccatgatatatttattcacacataagttgcagttcctgcacaagaagacacaacatttgttatgaagctgtcatagatgattacttcaggatggagcgagagagtgagggcgatgagggagattttcgagaggaaaagcgaagaaggagaagaaggaaagaggggagctttggggtggagtcaaagattttcgagatcggggtggaggagaaacagggcaaaacccaaatcgttattgtggagagcaagggaggggtttcatcttgggtccgtatggggccgttgagtgtagaagttctcctggatagcttgaaccagtgtatcaaggcagaggatatgggaaaatgggaaaggggttggagggaaaatgggagaacctattctttggtgtgggatgagaacaaagcagggtattttattagattaggggtggtcgaccaggagaagaggaggtttagtatttttataccgaaagggagaggcgagagggggggatggaactccatggcggagatgttacaaaagttggctggaagcactggcaaaaaggagaataagcaggaggaaagggtcatggtgaaaccaagaatggataggtcgttcgcggaaatggtgaaggggtcgaatggcaggggggggtgaagtggtaagagtggaagtgagaggagaggaaatcagtggtgacctgcgcaaattggagcattgccttgtaggtagctggaactctagctcagcaaatggagtggatatggagagattaggatggttaatggcgaggtcctgggggttgcagggtaagctagggttggcaaggttggaaaagggcaggatccttttggagtttgagtatgtgggtgaagccaatcgtgttctttcctctggaaacaggcaggtgggaggtgtccagctggggctggaacgatggagccctaggtgtggttgtgaggaagaaggtgggagtaggaaggaagtatgggtaaagattctagggcttccagtttcattgtgggttccttccatcttgcggaaagtgggggacgagtgtggaggttttgcagccatggatccccagacggagaagatggtggacctggaatgggctcacatcctagtcaagacaaagaatggagtgttgccgagcaggctagacatagtggtggaggaggtatgttattctctatctctctggtgggaagtgaggccggagatgaggaaggtgtcaactggcagccgttcgaagggagaatacagggaggaggtcaggggtgacgctgtggcacgcgctaccccgcccgttggagagttggaaagcgcgaggcccgaggcgctgctgctgcctactgacggggattgatgggcaggtcagaggggcgggtggagatgggactggtaagcgggccaaagcagggtttgaggcccgggtttctctggatctggatcaagaggatgggcttttccagtcaggcccgtctgcaggtaggccggacttgaagtgtaaatccccagggttcagcccatctgcagaccgacatggggtggcgatcgttggggccgggcctggagatgattcgctatcttctaaggcccaatggggggataaaattataacgagcccattaacagggttaaaattaaaaggggcggtgattgatgaggctgggcctgggattgggccgtcctattctaagccaatttggtgggctgacgttggtgcgagcccagaattttctgggagtaatggactggcggggaaatgtctaggcccgtcccagcttgagagcagaaaaggtaacttagagagggcttctctctgggctcgagctgattacagttatgaaagaaatagtgaagatgaattcttcaaaataagggagaaggaagacgaatggaaacagcaaatggcaccgtctcattcagtgactgatcgggctttaatcgaagaggaatcgaggtatgggtctgttctgattcaaaggggggttagggcctcggggtactcttcttctttttctcttccttttgatcggactccggagggggagtattacgatcattctggggttgcatgtgaggagatccaaaaggacaccctgctgatcatgattaaatctgtcgagaatggtggtgggtgctgggatttggttgaagttaatattgttaataataacgataaggagtgggagagaggctcaaatttggcagtgcctcaagaagctagagaggaaagggagaatggatgggaggattgcaatctgaccaaattcagtcagtttttgggcttctcgacagcagggttggagaaggaaatattgaatttcctggcaaaaatcagaaaaagaagagaaaagatatacaatagaggtgcgttagagaagacaaaatttgaaagggaactaaaaaggcttgaatgctcaatcaactatgagggaggaagcaagcagagaagtcctctacaggacagagggtgccaactcgtagaagtcaatgaagcttaaaatattgtgctagaatgtgaggggagcaaatgatagctctaaaaggaaattaattaaagcctttgtgagaagtcagaaagtagatttactctgtattcaggaaacgaaaattcagttgatgtctgagggggtggtaagaagcataggagtgggaagatacttagattggagggctttggatgcctctggatcggcaggagacattctgatctgttgggataaaaggttgctggagttgttggaatgggaggagggtcaattctctatttcatgtcggtttaggaaggtggaagatggaactgtttgggtgttcacgagggtgtatggcccgttcaccaaaaatgagagggattgtatgtgggatgagattggggcaatcagaggattatgggaagaaccctggtgtgtagggggggattttaacgttatcctttctcaaagtgaaaggaataggcaagggagaatttctgcagcaatgaggagatttgctcaggttagagatgagttaggcttggttgatctcccgttgcaaggaggaggatatacgtggagtggggggccaaataatcagtattgggccaggttggatagatttttggttacttctagttggctagatcaattcagtagtgtgattcaaaaaaggttgtctaggcctgtctcggaccattttcctgtgttgctagagggtggtgctgtgagaagaggtccttccccgtttagatttgaaaacatgtggcttaaagttgaagggtttcaagagttaatccatagctggtggcagggaatagaggtgagaggcagtgctagctataggttggctacaaaaatgaaagaagtgaaacaaaagcttaaagtgtggaatagggaagtgtttgggagattggaagacaataaagctgctgccattcaactagtggaccactgggacatggtggaaagtgagagaagattatcagaagaggaaacaatttcaaaaaaggaagcaaaggaaagttatgctaagtgggcttctttggaggaaactcactggaggcagcattccagggaattatggttaagggaaggggacaaaaatacaggctacttccatcgcatggcagctgcccatcgtagaatcaatcatatggacagaattaagataaatggggtgtggctgactgaggagaaggatgtgagagaaggggttgttaatgcttttcaacacttacagaaaattcagattggaaggcggatatagaaatgctgcagttagagcaattaaatcagcaagaggcagagaacttggagcaccctttctctgaggaggaaatccatagtgccctgatggagatgaatggggacaaagccccaggaccgaatgactttactatggcattttggcaaagatgctgggttctagttaaagaggaggttttggatttgtttaaagagttctatgagcaaagtgccttcatcaagaacattaacaatacatttctggtattgttacccaagaaggggaggggtgggggggggggggcgtagaggatcttggggaatttagaccaatcagtcttttgggggggctgtacaaactattggccaaggtattagccaatagactcaagaaaggatagggagagtggtctccactgatcagaatgcatttgtaatgggcagacagatccttgatgcctctttaattgcaaatgaagtaattgatgcatgacaaaaaagggaagagaaaggtctcatctgtaagctggatatagagaaagcctacgacagtttaaattggcagtttttgatgaaagtcatgagaaagatggggttcggatcaaagtggttgggttggatgtggagttgcatttccacagccaaattttcggtgttggtgaatggagtgccggtaggtttcttcccaagttctaaggggttgaggcaaggagatcccctttccccttacctctttgtgatgggaatggaagtgttgagcaatcttattaggagggctgttgaagggggatttttgtcagggtgtaggatccgaggaggaggaaggcagccggtgcatgtatcccatctgttatttgctgatgatactatggttttttgtgaggctaggaaggagtatctaacttatttgagttggattctgttttggtttgaagccgctttagggttaaagatcaatttggataaaagtgaaataattccagttagcgaggtggaagagatggaggagatggcagcggaattgggctgcaaggtgggttctatgccttctgtgtatttggggctgccttgggggctcctaacaagagtactgccgtgtgggatggggtggaagagaagatgaggagaagacttgcgcattggaaacgtcaatatatttccaaaggtgggagacttattctcataaagagcacgatggctagtatgtcattgtatcaaatgtctctcttccgtatgcccaagtcggttgcgcgaaggctagaaaaattgcaaagggattttctttggggaggaggaaacttggaaaggaaagtgcaccttgttaattgggaggttgtttgtacggagaaggaaaatggggggcttggcttaaggaagctagttccgttaaacaaagccttgttgggaaaatggatttggaggtttgcttgtgaaaaggaaaatctatggaagcaagtgctttgggcgaaatatgggcaagagggatttggttggatgaccaaaaaggctaatgggacatttggagtaggggtttggaaggaaattatgaaggaaaaagattggtgttgggaaaatatggcttttactatggggaatggtaccaaaatcagattttggaatgatctttggtgcggttgtacagtgctatctcaaaggtttcctcacctttatgggatggctgctcataggaatagcacagtagaagaaatgtgggatcagaatgttggccaaggagattgagatttaaggtttgtgaggggtttcaatgattgggagttggatatggtaggtaatttgcttcatattttgagggggtacaaacctactttagaagaggatgcagttttttggaaaggggaaagaaacgggcagtttaaagtaaaagaagcctacaacttggtggtaaataccgtggctaacaaatttctgaaaaacagcatttgggtggataaagttccaacaaaaattttgttttttgcatgggaagctacttggggcaaggtgcttacgctagataggcttcagaaaagagggtggcaactccctaatcgttgtttcttgtgtggctacgaagaggaaactgtaaatcacatcctcatacattgtatagtggcaaaagtcctgtgggatatgatatgtgctttggttggtgttcaatgggtctttccagaaactgtaaaggaggtcttcttaagctggaggggcccttttgtagggaaaaaaaggaaaaagatatggaagtctataccgttgtacatcttttggactctttggaaggaaagaaataggcttgcttttagggggggggggggggggggtgatagatattcggaaattaaaaaattcttttgtctgtaatttatggtgttgggcgagaatgtatagtggagagaggtcgctgtctcttataggcttcttggagtggatagcctccagataagggctggtggggttttttttgctttctttttggttgtgaggattagctagattgtatactccctgtatacgttgtggctttttggcctcttatcaatatattctgtgcttatttatcaaaaaaatagatgattactttagcaatattttacatatttactttaattatatgttctgattcatgggtctttgtattttgtggagcttttccaacttttgcatgcatcagaaggttgatatttcccatttatttctgagtgttttctgagaaccatgaacacattgttgttgttgattgtgaagtatgggaaggttttgatattgtttagattaggttaataatctaagaaaagttttaaacttgacattcagtcatatcatgcgtaatctggataagagattgatttgtaaaattatacttctgttgtaaaagaaaatcatatcaagggaagagcaattgaggttggaaactagaccaagaagtctctacagtcggactttttgtcctggtcaggaaatacttaatgtcatgtatccttgttaaagattaaacttctttcttaacttcatgagaattgccccttgaaacacatacttgcaactcttgtcaaaactatttcttttttatcaaataagacgaaataggttggtgtccctttttcatccatttgacagtatggtacttgcaaataggggggttgtcaagattataacctgcacatggatattaggaaatcagattgtattttgatatcgttaatttgtcaagattatagtttttatttgtgaaatgatactgaagcgtacaggtggaggggaacatttacattatatatatcagcttaagaaaagcttggacttaactcctctggcagctctcagtggatgtcatcatggaggacatatgatgttgggagatttagtggtcagaagtcatgcgatcttcaagttcttggctttctagaaatcctagaagaattgggaggaggggcatctcctatccttactagttagtggtcaaaataaaatcaaatagatcaagaaagagattcttatcctaaaaagaaaggaaagaaagttgacaaaaaggaaatccaaagcaggaaaaggtagaaatgacaaaaggatatcaaatgagtaccaagttgtctttgctgaaaaacttaccatttaatctccacttttggtgaatgcctcataatttttgatagaagagtgcagaagaagaaaaatctgctgctcatactaagtcagccttttcctttgatgatattaccattttacttaggtttatggttttggaaaagttagctaattagataacattcctctcttgtttgcctttattgtgttttaaaaaggcagtgtgccttttattgaatagtatatatgctcatgggttgctctgttgttctaaagagcttttgcttcttataaggttgactatcaagagaagcactttgcacaaggtgt

SEQ ID NO: 11908 - DNA, 7465 bp, Vitis vinifera
  Intron number 3 from transcript GSVIVT01016165001 (locus G SVIVG01016165001) derived from phytozome v7.0 (chr-ID chr1 3; pos 7237293 to 7244757 reverse strand)
caagcgatcctcgcctcccagatcccccacttcaggtgatcaatctcagctccttatcccttttactcactcttttttcagtttccatctcttggacgtctttggtgtctgatctgttttctctagcttgaatttttgggctggtctgtttggttgggggaaaatgtaggcgaggatgcgaaaacgttgaatcttgttgttgcttgtggttgattttgctcttgtgaggtttgtagttgtgttttttgttttgttcttttccgcttctttcccgggaaccaagcggaggggaatgagtaatgaataatggctcatctattcctttgtcgtgctcatttttggaagattgtattgcgatatggagggctgcaatgtcaattgtttttcctcggtttgaagccctaaccctagcctaggcctctctttggttgctgaaaaaaaataaagggaagcaaattcgttaccctgttgctccacctaaaaaaagaggaggaggaagaagaagagtattttaattcaagcaagccaagtagtggtgtgaggctggattcgagggaggtatcgtgttcaaatttaggttttatgatggttatatacatctctatatgtcgagatgttatcagtaactgaaggcatccctagagtttgacctccttttttttttcacctgtaaatggtgctagttttgagcgtacgcttgctagttgttgaatgttgctattaacttgatcatgtcagtttgtgcgatttgtcgtggactaaatgacattgaattttgtgagcgtcaatttatattcactggttggcacatcaagcagcaatctctatttaatgttttccagaaaccattatctggattctcttgtacatcctttttatcaatatattccgtttcctatcaaaaaaaagaaaaaaaaaagaaaagaaaccaatatctggatttaggaggagggaataagcatttttaaggtatattcattttcttaatctttctgtggttccatttggatcctgaaaagggaaggaaaaaactttgaaaagtgcttaagattggattcatggaagctgtgagaactaaacaaagggtactgcaaaatttggggaaatgaaaggattctgcgagactttgtctatatttctgattaaatcttcttgttcccaggtgttacataggaatgaattactgttcttttcctcaagagttccaagtgaaagctgagagctgttttcattatctttctttaattcctgaacaagatcggttttatgtatatgattttgatatatatgagatcatggtttcatatattaaatatttcccaagtaaatattgatacatctgttattttgttccaacgatgtgatgaagattggatatgagaaagataccattagttgtagtctcctactatttaatattgtattaaatttaaggaaaagaaaaagggaatgcttcatttttttgactgagaaaagtaaatagaaaatattcagtctctttcttattcttaaataatttctctccttctaaggccttttgttttatttaggtattctttttggaagaaaattgacattgccttgaaaatttttattgcattgggagttgaagctgagaatatttttgtgcttaagcaatttaggctgccatttgttttggaactcagagcatgttatgtccagcacattatgatggtttgtgtattagaaccatatagtgcctctggttagttatgttcaattaaagtgtgtaaagatattttaatagtttttttgtatgaatagaagccagatgcaaagttgaagtcttagcatactgttggagatatgtgatgcatgagttgttgagagttctataacaaaaaatcattcatttatggtctggtctgtttggaacggtctttcctattattttaataacaaggaaacatcatagagatgacaatttggagagaatattggaatgcctttcatcttgatatatggtaaatattggttttaggtttttagatggaactaagcggaggagttgaaacctttggtcaacccaagatttacaggtgagcatatatgttttgggaaattgtcaatctggtccttatccagtaacactctaaaaatagaggggtaaaaaataagaagcaaagaccaagcagagtcgccaatcagataaaccactcgatttagggaatgggagaacaccttgaacaccgaaaagtctgaggtaaaaaaagaccttgatcttttgggccttactctattccttgcagaatagtggcctttggggactccaattttgttgagtgtagtgaaattctctgagctattatttttatatttcattaataggttgggctgatcaaaggcttttgttggaaggctaaccttgataaaaagtactttgtttagcttgccaatttactttttttcttttttgtgatcttgaagaaggtgagtgctagacttgaaaaggtctaaagagatttcctttgggggcgagaggccttagagggaaagccttatctagtgaactggtcaattgttttcatggataagagaagtgagggtctgggtattagaaatctgtttgctttaaacaaggctcttctcggtaagtggggttagagatttgagattgatagggaatctctttgcaaacgagtcattgttgggaagtatggggaggaaaagaggggttggtgctctagaggagtgggggaaggttgttgagtgagtgtgtggaatgctattaggagtgggtgggaagttttcaaggcgggtagtgtgtatagggtgaaattttggaagaataaatgatgtgatgacacttctttgaaggagttattcccaaagctcttttttatagcctcttttaaggatgtatgggttgtttaggtgtgggaggggaagggggggtgtggagttggaatcctaggtttttgagatggtttcatgattgggagttagaggaggtggaagtcttcgtttggaggttgtatgagctgtccatttggagggacatagaagataaattggtatggttgaactcgaagaggggcatttttttagttaagtctttctactcccctttttcaaaaggaagggtagagggtttccttttggcttcatttggaattcttaggttccatcaaggattagttttttagcataggaagcaatgtggggcaggattcttactttggactagctcaagaagacgggttgggggattttaaatagatgctttatgtcaaaaagagaagaagaaacaggttgaccacatcctcctccattgctcgaaagcagttgttttatggcagctgatctaatgccctttgcggtgtctagtgggtgatgcactctttgttaggagggtgcccttttgagctgatatgggtcttttgtcagaaaaaagaggaaaaaaaaaggcttggaaaactactattttatgcttattctggactttttgtaggggggtaaataggatagcattccagaatattgagggaggcgactgagctagtaaatagtctttcatgtactctttgttagattgggtaagggtgtcaataggagactactcattgttcatgttggagctggtggagtggtaggctctaagtaagggatggttgctgtttttgtgcccctcgccttgttttttggcctctctgggtctctgtctacatcatttatacttttttgagcctcctaaagtgctatcaatacaattgtcttttttacctatcaaaaaataaaaaataaaaagtcaaaggcttttgtttgggctatcactggtctttgtttggttgaatacttcctttggaccaagatcatatccattttaaagtgtttttgtatttatagtctttgcctataaaaaaaaatatggtatacttgccattatatggttcaaggggcctattgttgtgaaatgatcaaccaagggaagaaaatttcctaactacagaattctggaaatgtgactcagtgactgtttgatcatgctgtaaatgatgaaattgctggcagaaatgatatataagctattgtgtgatgcgtaaagtgagattaatctattgaaatgctatctttttgatttgttgaaagccttttgtcatcttgactgttctctttgcttttcctccccttaatttcctattcttgtttcactaaaggatttaattctaatccctgacttggcattattggatctaatatgtttctttgaagagagagagagagagtgtatgtattcctaataggcaaaaagaatatatgaatatatgtcagagtatataatatattttttctgataggcgaatagaatgtatgaatatacgttgggagtgggtccttggaaagatagggaactgcactagcttgcttgtgttattaattatgatggtcaaggtgtttgggttgtgttggtcagggcactggcagtgttaatggttgctttattgccattaattaatgaagctcaagattgtgttgtggaatgttagggtttgatgatccaggcaatgaaaagttgttaactctcttgcgatctccttgcagatttgatcatcattcaaggatcaaaaattgattatatgcttttttttgacaggcagtaaaagctcctaaccaatttaataagcatataatctgtaaaaaatagattatatacttattaaattggttagaagctttggtgtctaccaagtttcagagttgggtgctgttaatccatagtgttgaacttggggttggtggtgttttgggataatagggtgctgaagttttttggtacggaagagggttcctttttcttttcttactgttttaagttgtgaagatggttttcttggtgtttttctaggagtgtagggacagtgttgagtgggaagaggtgggctttctagaaggagttaggtgccagtggaggctcatggtatggttcatgttgcataggtgaggacttcgctgatggtttgttcacttggtgcaatgttgaagatgggtagtctgtgccttggttggaacattttctgctttgtggattaggagaagcatttctcaaatgtgttgcagggtatttttttcagggcctgtctgatcattccatattatccttgatgtggcattttgaggtggggtaattccccctttaggtttgatgatatgtgacaaggacattggtttgaggatttgataagaaacaggtggaagagccacgagtttacaggtacttcaagttttatttcacctagaagggggaagatcccagaggaagatctgaaaagatggaatcaataaagcgactaggaattttgtagttcataatgcttgtgttttcgagtgaattatatattgggataacaaggtgagggacaaggctttgtctgaagatgaagtagcattacaggttttgctttggtggtagttgtcttgtagtggtggaagaggtgtgtcttggaagtaaaaactgagagctttgaatgggaatgcatactttgttttttatttttttgcacatcattcaactcaaaaggtgggattgttttgtaagcatccaaacctgttttgaacatgtgtaaattttcgttttgagtcaatactgtccttgctgccaatcatttgcagaaaatggagtcttacaacactgtttgccagtgctatctatgctaaattacatttctcaaaagctgcaaaacatgtaattaaattttaatttaattcctttgtacatcagagatttcatttagattgcaagtatgcaaaggaatggaattgagaccttgtatggtccttattctgttattctctttttttcttggattcctttgaaagatgtatttccttctttatttagtcttactttgcctgggggcaggatggagaggttgtttgtcattggaattcttgttttctgaggttgtttcatgatatggagatggtgggtcattgcttgagtgaacctatttggtgagcttgcagggggttgcatgaagttaggcttgtgtgtgggggagtgaagaatggttgcttctcacttttatcattctatgcttccttatcccaagtgctcttctctgggtgtgtgtttttttttcctaaatttgggaaactatatgggaaaaattcttaaccacagagcaattcatcagaaggggggacctttggttacaaatgttgtctaagcaaggaatttgcaaaccatattctcatccattgtgaaataacctggttgctatgttatctcttgtgctctttgcttgggacttagtgtgcttcctctcaagttggtgttagcaccccacctatgagaggacacaacatgagcatgtctggtggcaacttgtcctcacatggcctaaggcatgttatcgatggtatgcttaaacttaaacatggtgttgtggcttggaaaacatatttgtggtagaggttgcagcttccaaagatgtgcattggtggaaattggggtaaggcagccttgaaggatcaaagcaagctaagtggcatgggttgcatcaacggtgtgcgcggttagcagtggacggtgttgcaagcgtgcataagaatgccaacagacgttccatgactcatgggcacaatgtgtgacaatggtagcgtgtgatggcacattcatgttggcttgaaaggacaagtgataggtcttggcgcttggataggttccctaagtatctggaggcctaagaagaatttttcaactgatggggtactttttccagattttctataattaaataaaatcaattaaacctgtggaagcatccttgatgttttatcctaagagattgagaatggctcaaaatgctctttatggaggaggtgataatctcacttgaggtaacctaagggtgtgggccatggcatgagatgggcacatctgaagcacaccaaaattgtccatggacaagtgcaaagtaccattaggggttgcatgctgcgtgatggcttagataaggcattggactggggacaaagccatgaccaaagcatgacacatatcagatgtgggctgtgtggctgagacaaggtgggatattggcaacttcgttcatgggttcacccttcggcgctttatatacttcctctttgtttaggttgcccactttttaccagatacctttggatttattttaccatttgtctattaaaaaaaatcaaatttacccactttgtcaaacttaaattcttgtgctggtagtagtctagacagtgttgtacttatgatcttgtgggttcttcttctacttcttctttgtgtgtgtgtgtgtgtgtgtttaaattcttttattttggatgggctacttactttgatctcatggatgttatcacatggcctaaggcatgttatcaatggcatgcattaagatgaacatgtaggcttgcttacttcccttcactaatcaatttgtcttcttttttatgctttctactgtcagatttt

SEQ ID NO: 11909 - DNA, 4703 bp, Vitis vinifera
  Intron number 1 from transcript GSVIVT01000020001 (locus G SVIVG01000020001) derived from phytozome v7.0 (chr-ID chr1 4; pos 2857354 to 2862056)
ctctggtcgacggcaggtatatgggctttttatttttaattgcattttgctttttgattttgatgtactgttgatacattttctaggctgccaaactgactgttatctaagttttctgttggcctttatgctttgcttggtagtatatacgtgggcttttactttaatagctgtttggctgttgtttacccttgttgtctttctaattttgattttcttttgatacaatttctcaataaccaaacattctgttgtttaaactttcttttacttttgctgctatggttggtggtagccccacaagtttgtatttttggcttctatttatttactatttatgctttttctttcttgatattttggtctttattttgcattcgtagttgtatggattcatcaatcggtactgttaattcgtgtttcttagtgtcattttttaatttgaattgctaagtgacaacgaatcctaggctttagtttagggggttaaatatctagaatcaacaacaaagactcaatcagatgatcaatgaaaatatctcatttgaagggctacatattatctatttccattgtgattgatcattcctcttcatccccttcatggaaatttcatttttgttaaaagttaccctaccaggagattgatgatccaaaagtctcgcactttctctgaacaatccttagaaagagagagtcatgtcctgaaagtctcacactttctctgaactatctttagaaagagagagtcacttccctggttttctccaacttgttctcctcaagttctatttatttaattattttttctagcccttttccttttccctcatgctaattttatttaaaactttcaacaagtcaagtcatttgctgagatgctgcctaataaaaggggttaatactaatgacttgttacaaatcaagatatcttttaaaacactgtctcgagcactgcatccattgcccaggcagtggtggacaacatattacattgtttttcattgccttgctgtcatgctattataatacaggtcattttggttggtgtgtgtttttcttgggttccacctggagtagattatatgatgagtatggactttaaaggtcttggcaagagctccaggaggaaaatgacccagatgttgattgggaggcttgggtagttgggattggggtgtttctagagatcattttgggcaatgtagttaaagcttttccaagatagctagtcctgggttagccattgaggctaatacctttgctccattagaacggttgataggggagacatctttaggcagcactaatattcatgtcgaaagggattcaactattgttctctcatgagtttcttagggtatgggagggccttgaagctgaatcacataacatgggaagttttagttttcttgactatgtgctcccctcaaatttgagaaaatcttattcccatggcgaacttggttgttttttccccatccttaggaaatgaagataaaatgaaggtaaattaccaagattacaatttctataatagaaataaaattttaggggaatttgaaattctcaacttcaatcaaatgttagaaactatgattttcattaccaagtttagatgttgacgaaccaaaaacaccttaatatggtttatagatatcttaattaggagatggatatcttatttccgagtataaaattataatgtttgagtagacataacttggaaagttttaatttcccaggacattagatcccttcaaatttggaaaaatctcatactcgtgttgaaagtagtattttgttattaccatccgtaggaaatttttatttctttctttatttatagatccaatttttataaatcttacttaaaagagtagttatgtaaatttacattaatccttggatagtttccaaggttactaaattcaatagtagaaactaaatttggcaggaatttcaaatacctaattttaaccaaatgttacaagagaaatattatatttattacattccaggaatttattttggacaatatgatttccattcccaagtttagatgctggtgaaccaaacacatcctaacacattcttggttcttccagggtattgcttttgttttatttcctttttctcccatttttttaattattcaggttaatctgacttgaactataactcatccattcttgtatgcttttgtttatcaatggaacttttgattcttataaaaaccaccaattcagaaaactcatattacaacttttctctgattggagttggatttctaagttggtcagagttcttggtgttccacctagggatcatatcttctgttgaaaaattttgttcatgggtgcttacactttagaagtgataacaattgatcaaacatcctccaatcattctgctttccccaatgaggctttgaagaaatttcttgtgttgctgaattagactatatttattaagtagtagcagtgcggttagaatgatgcccagtgcacaattctaggtagaaataatatctgaagctttgccttccaatattattgatttcatgaagtttaaatgccttttaactcaactgctcatggaagttgttggaagttcttctgataccctaaaaaaatggaaatcctgttctagtagatatagaaaacttttgcactttggaaatgcaaatgatgttgttttgatttcatctttatgtctttagaaggaattaattgagagacagcaatagaatcgttgtttattgattcttcatttgtgtttctcacttcagcaatcgttgattgtcgaaggtaactctgctgatgttagttgttcagtgaaatggtcatagtaattcagtatctagcaaaccgaaatgattgtgtgatgtttccttaaagtaatgactagagtttcatcatctggtcagcagttgttgatggtagacagcgattctgtcaatgttatttgtagggtgaagcaagaaaagtaactcataatttactaaacctaaatgattgtgtgtgatgtttccttaaattaacgactaggtcctagtgaatcataatggattcattcagcaatattgccactggtaacaagtgaaggacaatgaaggaacagtaggccaaatcttactctccctataggcaacaaatctcttgaggctaatagctttataaagtttcttcagctgaagctaatagccactggaaaactatgactttagcaggagctttagacaactacttcaggaaaaaagattcaggctgtccttgaaaaggaaaaatgaaggatttttgaagaaaatgaatctgtcccatccaaggactaatatctcttgtttggggaacaagagggaagccaaatcaataattttactattactgaggtttcatgcaaaagagaatcactggaaaaaaaatactacaaaaaagtgtagaagttgctacttgctgctcctcaaatgagcataaagctaaaggtaggaagagtaaaaaagatctctttgtcaaaagtcctcccatattgtcatcttagatctttgctattactgaatctaacaataggaagaaagggttgaaaccactggtgttaaggagtgcaaagatggagatcttatcatgctgagattccttacttgaaggaagacgaaaatttattagagaaaagatataggagaagaaaatctattgaagaaaaggggagaaaataaatggagaggagtccaacaaaaaggtgtcagaatgagaagactctcttgggagggaaaagcatgggtatctccaagaactatatatccaaattcaaagcattcctctggactaaaatgttctccatgttctaaagaatttgagaactcaaggagacaagataaaattctagattttttttcctggaacatagatgttaatcaagaacggttcgataggtttggaactagagtttggtaagttttttaagggatctattgaattaagataggttagctttccagagtctttataatataccttcctgtagtgtgatgagaagcttattggttttctttgctttataatggctatgaattcaagaaatttttataatatttaaaactgattggttaagcaattgttggaatttagatttttccagtactctattgggtgctgctggtatgaatttttctccatttttttttttgggaaatttggtctgatatttttattctaaatttactgtgttgtctggctaaatataaatcttttgggtgggtgatatgttccattggctagttgatattttctttcatgctatgctattaattatcttatgaaggaattgtgaaaaatcacaattatgatagttattaattacttgtctgtgggatcattggatgttgactaaggtttagttctttatctcccaccttcttatggttgggtgagcaagctcttagtgcactttgagtactggattttaactagctcatttgtttatggtttgatcatgctagtgcacttgaatgcttgacttgctcatttgtttatatgttggtcatactgatttattttattttttgttgtgacctttttgtgaatagacaggagagtaattttggcatctcattagtactatattacttaacggtttccttttctttgttttcccttttccttgatacagcatcaccattttttactttgccaaggaaggaaata

SEQ ID NO: 11910 - DNA, 14443 bp, Vitis vinifera
  Intron number 8 from transcript GSVIVT01038795001 (locus G SVIVG01038795001) derived from phytozome v7.0 (chr-ID chr1 2_random; pos 1104396 to 1118838)
aggtcagtagatggaattaagactttagtttcctatgatgttctatgaaattggtttctcggatacttttgcctacaaatcataaattttgagtttgattaccccttgctggtagtaaaaaccttttgaggatttatatttaccactcttgggaagtcctcttgcactttatttgctttacttgggaaaaaaaattgtgcacaaggataaattttagtccatcacttaattttttgttaatataaaaattcttgaattaaaaaaaaattttccatattagttatatcctacaaagatgagacaaaactaagaattaaaagagctaaagataaaacttcaattttttactttgcatgtaggtggttgttttgatatagggaggagctttgcttgctatggcttggtggcatatacaaaacatatacattgctaccatttcctaacctcgagtataacttaaaaaaggttttatttggatttaaggtcttaaccgagttggttatttacttttatgtagggtgtgtagatgaaatcattcaacgcttgtgagtaatgtcatatgaaaaatatttgttgactcaatcttgtttgttaccaccgatgctttatagatccaagattatctttttcttcgaagatttcttctcaattcttgaggtaaatcaaattgcaattccaactcatgaagtatgtaatacccaaaattgtaatcctaaaaaaatagatactttgtttggacatgccaatgaactctatattgctttaggaaaataagataggctcaagggtttgtaggtttgtttagatcaaattatacattggcatttcttcttagttcccttggcattggataacaaaggaaagacctctcttgtttttggtaaaggagataaaaaaaactagtgcataatattattgaagagaattcttttatccagatgttgacattattattagttatatatctcattagcatgatgaccttgcacttttgatgatggagtaactagagacatcaaataatatacggtgtttgaaggcacccaacttgaagacctttgtgttgaggctcagtttagcctatgatgattaggctaagcttgaactatcgggtttgatttgggcttgctcatctaagcatgcccagggtaattcgctcttaatttggacacatgtgaaaaagggctcctatgcactttgactcatgagccttagtaggcatacttaaccttgacactccctaagaagaccatccttcggctaagttgctcctattcaggaaatgatcaaagcaaccctaactctaatctatattgatggcatatggataagaataatccctacctaccatcatgtgacttttctcaacatattgtaacatttttatcatttttttactaccgcatgacatagggtgatcaaccaattaaatcacaactcctagcctcccctttaacctgggttcccacctactgaatcatggttaaagtaaccatagtcaaccaataggatataaaagagacccttgacctactcagagagcggtagagtaaaaatacttgtttcattatctcttattgaagaagtattttgaaccctatgaagccattttcaagccaactcctacacccattcacttatccttttctctcatcatctttcttgccttacactaacttctcattggagccaactactaagcgagctctagttggttctctattgcgagttttactatttggaatgcgaaattaccatctacttggcaagtgttattaggcttgccatcctatctattcttcatgtctaaaattgcttgcactaacaatatgatcttaaaaataaagagattgtaggagagttcctaccttgaggaggagaaacaaagtaaccaaaaaggagtaaaccatacatgcatgaggaagacaatgacaatagcattgggttgtctttcaagccttaattaattattatcttatagaaacagcctagcttagataatattaatatgaattaaggatgatagctaatgttgctccaagaatggcaaaatgttataggtgatgataattggtagtgatagtgatagtgataattggtagtgatagtgatagtgataattggtaggacaaccatttcatgatgaacatgcattatcttgccaagtatttggaccttgttccacctttaaagtaagattagaagttctaagattcactcaagttgcgtggcaacaatgattctcaaaggttattcaaagagtttgagggctcatatcatgcaaagtccaatgtgtgaccatgacttctacaagtaaatattatagcatactactctaaaacaagtcaaacccacaatgctattaataaaaatagcataatttgaaagaaacaattgtctaggcatgaccaaagaaatgaatggattgaagaattgtacataaataccaaatggacgcttgccacttatacaagtaagaaacatataaatgaataaaaaataaaatgattgtaggtttgaatagtcaaaataaagaatcattaagtgtcttactgctaaaggacatcaacatacctaacctttatagatggagattcaacccctttgctagaaaaagaaagatataagttggtgaatataacatttaaaaagtaaaaccatgatgtgcaaatgttgtgatggttaaaccaaattaaatggttttgaaaagcatccaatgtgtatgctatagttgctataaccataataatcatgagtcaatgaccatggacaactagttagacatacttatcaatatagtttgccaaatcaacatgattatacattgtgtgcttttctcaccatcatgatctatggaaatcctactactagaaatcaacatatggcaccaagaaatcaagagatttgtactagcaacatgtcttaccacgtgaccagacattagaaatcataatctagagtgaacaacatgcttcacctctcatgggatgacaatcatgtcactaatcaaacaaccttaaaaaattatatggttatatatcatgcatcaacccctcactccacacattattgcacatgtgactttatgtctatgtggaaggtagagatagggatggcagttttgcaggctatttgggtaacccgacccgccttgtccttattgggacaagtatgcgtaggtgataaccgaggatgggacaagtttgggaaaattttcaaaacctgaatcaagttcaaggtggggatgggttttgtaccaacctgccccacatcacctcgtccagccaagttacaaacttacccttcaaattttataaaataccaaacaactccctataaatagttttttttttcattgccctagatcaaccgttgctctcttctcatcgctttcctttcatctttggatatttcccttttctacttcaaccttcataaatccatcttcaaggatgaatcaagaagagcaacaaaatcaagaaacgtttgtagagaaacccttttctcttcttcaaatagaagcggaatcatagcgatgattggctccatttcgatagtgagaacttcgacattcatcaagtgccaaattcttcaatctccatttcaagccctcttctcttctaaaggtgttttgatttggttttcaaccctatttatattttagggttttgtccggttggattgtgtaaaaatatttgattttttttgtgtggaaaatttgggtattttttcctttataatttgagttttggtttgataatcaacttgcatcccgtattgctccaagtgtgaatctagctgtctcaggccgattcatttgtttttttcccaatattttctttttgaaagccattgtgatctctagaaatttttgtggtgtttttttgttttttttcaaaaaagtgtataggcatgaaaattgtgaatttgttcattggagattttgtggattaatgtaatattgttggttttgagaaaatcatcctcctccccattcaaacaaaagtacatattcgggttgagacatgcgggtatgggtttatcattttttctataaacgaggatgggtactcatcaacatgccccgactcgggtttgggatagggatggggaaggattatatgattgggacatgaatgggataggggtgtcctgtcctaaaccttcttcattgccatccctaggtagagaccacattagcaatagaaaaaccccatttttctattgcaataattaaattgttaaattgatgaaaagaggacttgaacatttgagcacataatgtatatcatgctctctctctctctctctctctctctctctctctctctctctctagatatatatatatgggggttgaatattttaatgatgctcttagctcataccttattgaagatggaataatccaacaaacttcttatcttaatacaccacaataaaagggagtagtggagagaaaaaaacatgggaatcttctcgaggttgctagggctttgatttttacaaaaaatattcctaaacatttttggggtaaggttattattacactgcatatctcataaattatatgccttaaaaaatccttaactccactactcttattgatttatttcccttacaacaatttattcaactctctttctcttagagtgtttggttatgttgtttttgtttgtactcatagcaggaaagatttaaactaggtccaagttttttaagatcatgcttactttttcttaactaatcttctgggtgggggggagtggttatgaggaagatcagtattggatgatctcatttctgatttcacgtgatgataatgaagagtagcaatgtgccaataatgaagtgtagcaatgggtgaaagttgaaatgataaagaataggctagagaaggtgcaaaagatgataataaaccaaaataagaaaatgaatctagaattgaatcaccaaaggtagtcaaacccgaaaaaagatgattagggagcttattcaaagaggagaaaaggcgagtgtgacttggaagaccttatctctccctcacatgactaatcatctaaccttgagttaggtatgtttgattccattccttccccttttagctttgatttggatcttgatattcccatttctattaggaaaggtactagagcctactctacatttctaatttcttatcccctcattgatttgattatgaagataaggccttcatttcttaggtgggaaaaggctctaaagattattattgtaggtggagaaggctatacatgaataggagcattatataaaaataataatcgaaagattgttgagctacttaagggaaataaaccaatttcaacaactggattttcactataaaataccaagcaaacgagttcatttagaggtggctaaggaatacactcaaacttgtggagttgattgtataggagagatggaaagaatataaggtaaaaattcttttccttaatcttttacatgtatagagactcacatatataaaaaatcctagtacctaaatagaaaaattttctaacttaattacaaaaaatccctttgatcacaggattacctaattctctctacgaaatcaagactttcctaatttcatttttccacactccccctcaagttggtgaatagatgttttccattcttagcttggatacatttgcttgaaaatttgtactatttaaaccttttgtgagtatatctgcaagttggtagtaaggagtacaaatcaacccactatctagtttctccttaataaaatgtccgtctatctttgtgtgcttcgtttaatcatgttgtactggattatatgcaatattgatgcaaatttattatcgtagtaaagtctcattcgatcatctcatttaatcttcaaatcatccaaaataattttcaaccatagtagtttacaaaatcattgggtcagtgcatgaaattctgcttcggtattggaccttgtcaccaaactctgtttcttacttcttcatgttatcaaattcccaccaagtaaggtgcaatacctagtggttgatcttatatcaacctcagatctagcataatctccatctatgtatgcttcaagtactagtcttgagttttatttaaataggatgccctttcttggagaccctttaaggtactgtaacactcggttagcaacttgcaaatgaaccttttttggaccgtgcatgaactggctaatgacacttgtagcatatgctatatttggtcttgtatgagagagaaaaatgagtcttcctactagatgttgacacatctctctatctattgcaacatctttcttagcctccttaagcttataattaggatttattagtgtgcttgctggtttacacgccaacttctttgtttccttgagaaggttagttacatatttctattgagaaataaaaattccttgcttagaatgtacaactttggttcttaggaagtatttcaaccttcctaactctttaatctcaaactccttggtcaagcattgccttaaagtctgtttttccttttcatcatttcccgtcgcaatgatgttgtctagatatactagaggagctataactccccatgaatctaaatgcttgatgaacaacgtatgatctctttgactttgtctgtatcccatgtttttcatcactttacaaatcttctaaaccacaccctcaaagactgttttagcttatatggagctttattcaatttacacacttttttagtggctagtttacttccaaatcttggagggatttctatataaatctctccctaaagatctctattcagaaatgcatttttgacatcaaactattgtagatcccaattataatttgttgccaataaaatttttttgattgtgttcatattggcaactggagaaaatgtctctaaataatccacgttttatgttttagtatatcctttagccaccaatcttgccttgtacctctctaacatcccatctgctttatgcttaacagaatagacccacttacatcctattggtctttttcctatgggaaaatctactaacccccaagttttatttttctctagggcctttatttctacattcatggcttatcttcaattctcattagataaagccttggatagagtggttaaaatatgaatattgttcaaatttgtaacaaaactcttataggatggagacaacttttcgaatgacacaacatgggaaagtggatacaaaggatgtttagtgcattccctcgttcctttcctaatgacaataagggaggttttggtttatagtttttcaaactgaagtcttaagtcaacttgtaagggaggatgagaaactgttacctaatttccagaatttggttcaaaatcttgcacttgtataagttaaggaactagaactttcttccttgagtacactttgctagtcattcgattcttaggagtaggctcaatggatggctcaaatttagaggagggtatagatattggattagacactttaggagggtcaataagaaagggatcaatgaaaaataaatcccgatctttatcttcctcaatagatagaattctccccttaaacataagaagtgggaaaataagactcacttttgttaaaagtaacatcaattgagacaatttttttttttttttgtttataatggtggatggtaacacttatatcccttttgagttgaatattccaaaaaaatacattcaattgttctgggatccaattttcccttgtttggattgtgaatatgcacaaaagacacatacccaaatatcttaggaatgagatggtttgtggttctcatattaggataaaataatgagagtatttccataagacttttgaaacctaagactctggaaggtaaacggtttatgaaatgtgtggcgattaggacgacttacccccagtaagatttaggcatatgtgtttagaacaaaaaagcttgtgttgtatcaaagaggtgactatttttcctctcaacaactttattttgttgtagggtgtttacatgtgatgactcatgaattatacttttatgatgaaagtatggagttaggacttgatggaaataatctctggtattgtccaaccaaaacctcttgattgtgacaccaaattgatttttttttaatcatattgtggaaatttgggataacaaaactcacatcaaatttgtgtttaagtaaaaagatccaagagaccctaatacaatcatcgatgaatgacacaaactagtgtgccctggatatatttgggataggggaaggaccttaaatatcactatgaattagatggaaaggctttgaactttttttattactaactaaaaaggttgaacgcttgtgtttgactagttcacatacctcacaatgagagctctcaacatttaatttcccaaacaaaaaagggaacaagatcttaaaagttctaaatgacagatgttcaagcctacgatgatgtagccaaaatttttctttaaaaatatggtattcagaaagaagagatacagttgatttgcttggtgatatagcccattccattctttagtaagtccaatcatcttccctaattactagtcttaaaatacatagtgagtatggtaaaaaaatcacattgcaacctaaatgttgtgtaaggttttggatagaaacaagattagtggacaactttgaaacatgaagcacatttctaagattgagtgtaggactaatttggatatctcctacacctgcgatagtggttaatgaaccattaattgtgacaattttcttattgcttaggtaaaggttatagttgttaaattgatatgatgaatgactcatatattctatggcacataaatctaaaacccatgagttggcaaatgtttcattcgagaccttaatccaataggagtgctagtgagtaggtacttgaaggtttctcaagacttcccaaaaaaattcttaatttttcaatctccttttgattgaatccgccttttgatatacctttatttttatttattttctttctttttttttttttttttttgggaaaatataaaagagctctttgataaagaactctcccataaggctgagagaaccatgtagctcccactagtgtcgatgtgggatggtcctagccatagtggtgtcgttggaggttcagtacccttgattttttacaatatcggcagtacaacaagaacaaaggccgcttgttgctctcacgaatgagttcgcgatccacttttgcaacaacggagagatggagatgcaatgtgatgcaaagatgagagacgacacaagggagacgaagcataagggttgtcgatgttgacgacataagggagatgaaggtcgagaatggtctctccttgattcctaggtttatgaacttgactctgataccctgtagaagagagatggaaagagtacaaggtaaaaattcttttctttaatcttttgcctgtatagagactcatatatatacaaaaactcctagcacctaaatagaaaactttcctaacttaattacaacaaatccctttgattacgggattacctaattctctctacaaaatcacaactttcctaatttcattcttccacagattagtaaggaccttttgcattggttgcaaagatgaaaacaaatagagttctttcaaacctaggtgcaaattttgattagcttttatattagtaatccaaaagagcaagtacacatgaactcctcatggttttgaggacaactttggttttgggaaagtgtgtaaattcaagaaatctatatatggattaaaataataaacaaaatccgggtttgagtaattaaatttgaatattgtttaagttaaggagatcacactttctttattaagcattctactaacaagaaaacaattgatcttattatttatgtagatgataactgatcttattatttatgtaaatggtcacatgtgatgatttggaggagatgaagaatttgaataatcttttggcaaaggaatttgaaattaaagatttgggatccatattggtattgaagtttcaagattcaaaagtttcatgaaggaaatatgtcaatttctaaatgagacatgattattgagatgtaaattgacaacgactccaattgatccataatttggagcataaattcaattgacaaaggatgctatcaatggctggttggaagactatcttacactaggcttgatatcacttatgttgtgaatatagtaagttaatttatgcccttactattagagtgtcacatgaatgcagttgaaagaattttaagtatctaaaatcacctccttggcatagtttattattctcaaagaataatcacttgaaagttaaaacccatatagatgcgaactaggaatggtcaaaccctggatcatagattaactattggttattgcactttttgtgagaaaatttagtctcttcaataagaataaaaaaaaaaaaatgcattgcggcaaaatccaatgcaatggttgagttgtgagcaatgactcaatgaatatgtgaactactttggtttaagatcattccaatagaattaaacgcgacaatagaagaatctataaaataatattgtgagtataaagtgaccatccacattgcacataatcatgtacaatataacaagacaattttttgatattttcacaaagggtatttcaattatgactttcaagaatatcacatgcaagctggtaattaaaaatatctccgaactagcttaaggaggagtgttagaatgtgcaccgaatcattaatttccttatatttcttaattttctccaatatttttcttaataatgatttgaattattgatttataattccatactatattttctagttgactattatatttaggagagctcaaattaaggagaatcaagaacgtaggtcaattgtaaatatttattttccttttttctatttgtatactcaactttatatattcctttgtaattgccaacatcaataagaatgtttttcatacaatttcccttacatttcaccatggtagtatggtctcatttggtaggaggttatgtgttcaaacctcactgtatgtttatgtccctaatttattgaacctaggtgtaaactcaaaggaggatattggtttgcctatatgcctgcatatctctccatgtgctatgaagccccacttgaggaagggtaatggatagtatgatatacattgtgaacctaaatcctaatagcttaaacttctagaaaaattagtggtctaatattaaaatggttatggatacctctcacactaaggatgtcgtcctagagcagatgtcttcttataatttggttagggcaacacttgaataggtaagggtcatcctaaaagaactgaaaaactttacgaaataaaaaaagaaaaaacatgtataagaatgtgcaatatatgttttcttaactactaatgtagcaattacctagaacataatgagtgcataaaaggtctttcgactattggcacacctacaactgagaattgctcgctaatttacaaagtattacaccctaatgctaaagaaaactcctttgggtgttggatacttggagtaacacatgatatataggaggcaacctagcgagaaaggagactccattggctgttagagatttggagtaacgtgagataggaggttcacaattggcaacatatttataataggacaattcaatcatcaatgatattttatataatatgtaatgcactttgatgagaagttagagacttcattcgccaataattcaagagatgattatttgtctatcgctaaggcttaggcaaattattaataaggagcttggaaggtcttggcttaggagcctgacaaggagggttggtgtcacaccttaatgatcaagtgctcatgagaagtcgtactagccttttgaaaggttagtgaagttccattgactttcaaagcgagtctaatgacttagggaaaaatatctccatcaagaaataacctttaattcatctatgagaagatgacttttcatacattttatttacttcattgaattgatgactaaggaggattaaagagcacgttagaggagtgcaagaatagaacttaaactagtcagtctggagcaaatcattcacatcatggttaaaaccctgctccctcatgaacctggtgacatataatagcttcctggtttgtttggataattttggccttatggatttcccttctttcactttcttgcaaacacttggcacatacagttgcatgctcaataggatgttgtcaagtttggccacactatcacacttattacatgaaagtttgtaggtgtcatagcaaacatgtaaccgaataaggtgaaagtagatgaagtcatgcaaactggacatgagggattggtgtgaaatgttataggagttatggtcaacaggaaactaaaaaggtgaaagcacgtgaagtaatgcaaatatgggcatcaaggacaaaacaaaatggaaactaggaaaattatacaaacccaagtggtagagacaaaccttaacagggcaccctgataaggaaagccctggtgccctaggaagcaatttgatggagccttaaggtggccacaaaatgtgtgatcacttctttcaagaacaaagtgacacatgcatgacttcaactttgttatggttgcattgttttgctgtatatgagatgaacacatcttaagaggaagcacataggtggtacatcttgttgatattcataccatgctctgtctcacctagttgatgctatgtatgatgtgagtcactctttattaattagcatgatgctttacttttgggcaacaatatttggatccttcagttaaagtagaaaagaacgaagacgacaatgtattttatcttattgcttagaataatgacctctgcccatctggttagctaggggaaatattcagcgtagttcattatccaactgttggagataaggcttcataaagttgagtttaggtaaaccgtgtctttagacatgtatgaaaatgcttgtctctaaaaaaggtgtttgagatgatgctttgtaaagttgaagtggattaaaatttagacatgtgtggaaatccttgtaaaggcaacattgttggaaatagtgtacaaattcaactcttggtttgcctcttctcttgtcatgctctttgttgttgggcttgttgaaaccaggtgaaaccatttttccccatatcaggttggaactaaaatgttgatcataatgtttttacattaatgaagatccctcacaaagtaagtgaagtggttggatttaatgattgaggatccctcaaaaaggaatttttgacatgatagatgtcggtgtagggttccagctgcatgaggacgcttgtcgagttgatagaaactcttcattccaccaattttttgtaagtcacttcttacttgactaaggctagtttatagaccaaaacacaagttccaatcattgaattgtcatgacctctctatatactagtcattcttaaattttacaatatttggggattttttggaagtatgcaagaattcgagtcttgagttttctctttattttcccttctggttgaaatgtttttttttggaacaaaccattttatcccacattgagtagtgacgaagtgtcttaaaaagcaattgaggatcttttactagcactggtgattgctataaaatatgaggggagggtctaattggccaatatcttaagtggtttggaaacagaaaatgcatatgatgctaataccttcactcttgtgctacctaagcaacatgcacagagagagaactgatcatgaacaaatatataggaaacagattgatatcacatgcataagactaagttttgctacagtgacaagggggcatgcaaatcaatctcattccttgggtgtttttctgttagttttcccactttgggcctcacaggagaatgtgagctgggagtcctatgctgatactctagaaatacaatcctttcttataggaaatgtttatgagacctatagaatgggatgccaatcatgaaatatcaagttttgtttcctggaagtccttttagtaaatgtttgttatcctatagggattgtttgtgatatcctataagttgagtactcaaatattccctctacttggattcttcatagatattcataaggcatccttatttttcaacattgtttcatggtaggttcccacagtgaacttcaaattgtaactttgttttatacatatttcccatgtatttttgaggcaagattgatgttaatatactttacattgctcagaactcttgatttcttatttatattcatggcaggttggctttgtaacaggagtttgctgcacttgttt

SEQ ID NO: 11911 - DNA, 5135 bp, Vitis vinifera
  Intron number 6 from transcript GSVIVT01027547001 (locus G SVIVG01027547001) derived from phytozome v7.0 (chr-ID chr1 5; pos 15810649 to 15815783)
tatacacagctttattgggagcatcggtatgtgatactattgtttcttttatcacatttgttactgttgctttatttatcaatgacgttggtggaatatacacatattatattgcaaacattgttttcaaggattttggtgtggtaaaatatattttttctgttattggttttttttatttttttggtaaagataggtgaagaactaattcattaaaaagcaagagcacaacaaagtatatcggaagtatacaaaaagcgcctaagaaaacaataaaaaagagctaaggagcaaccaaggcgggattacaaaaaatacctccctcccttactaagtacccaaccactcaaaatccaatcgagatattgagtcatcacctacatacatacatctttacgcagaagagaagattactaagaaacatgtttttcaaaccttggataggcatttcttcattctgaatgacctttgatttctctctttccacaaagtccaaaatatgcaaaaaggagtgattgtgctaaccttcttctgttttttaccaataaaagaatcgtaccaccatagcaaagtctcactcaccatgggcacttgaacccaagaaatcttgaacaaggaaaatcacaattgccaaagaactcttgccttgtggcagtagagaaggatatgatctattgactcctcatctgatttacataagaaacatctattaaccagtgcttgcctcattttctatagttgatcaagagttaagacctttcttcaacaagcttctcatttgaagaaacttgccttatagagcccatggattccacatgacccttgttggaaaagaagttatgctcctcatctctaagagtgcataaagcgacttcgctgagaatgtttctttccttgaaactatgtacattaccctatcctcctctccactcactgacatgccttgcaatttagcaaaaaaatgatgcatgttttcaagcttctaaacattaagatttctagtaaagcaatgattccaacaacacctgtcccctatctgttgttacaaatctgtcacccaagcctcttgtaattaggctaaaacaaaaagagaagggaaggagacatacaaatactcctccccacaccacatgtcctttcaaaatgtcatcctcctctcatttcccatgattaaagatgctttgctattggaagtatcccaattcttcttgatatccttccgtaacctaacccatacctttttctctcttcaagacctccatcccccttcttcctctccattttttacttatcacttgtctccagaacacacctcttttggttgcataccgccaactccatctacacaacaatgctttattcagcaatgagagtcttcttactcccttttcttctccatataaaagaccacttcactaattggagctttctttccaaaggcctgacttcccccaagaaatccctttgaagcttcttaagccttaatttaactttccagggatagaaaacaaagacatgcagtagatgggcacactagcaaaggtatgtgagtcaaaacaatcctcctcctttagaaatttatcgccttttccataaagaaatcctctaacaaaaccactcttccactaagaaaaccttttaattctaatttttttaagatgatttcaaatgatggaacaaagaagtttttagtgataccaaagttttaaaaggcctaaggcacacttaaggtgcaaaagtctcctatagcttaggcataaggcgcaacacaaggcacttgcctgagtgaagcgaaatgtgacctaagatacatatcaattttatataatgtgatccaaaatctaatctaatcaataaaaaatttacaattccaaaaatgtaaaagaagcattcaacaaaaaagtaattaaattatataaatttcaatatatagttagaactttcaagaataaaattgtttaaaaagaaaaagtaaattagatgaggtgcacctctccaacaaggcacatgccttggcaagcaaagcgccataactagggagtggttgcaccttgggcccttttaaaactgagtggttgcactagggaatcttcttttctccgtttttggtgtggcttgggctctctcgtgtacagtgaaggaaactcttcttgggtggcatggagcgtttgtggggaaaactcgtaaaaaggcttgacaaatgacccccttatgtatattttggtttgtttggaaggaaagaaatttgttagcttttgggaatgaggagcttttgcttcaaatactgaaatattcttttgtatgtaatctttggtcttgggttagggtgtctatagttttgagcgcccttcttctcttgtaagttttttagatttgttaggctctaagtaagggaaggtggtgtgtttctctccttttccccttggagtgcgactttggccggtttttgtatactccttgtatactttgagggcactgtttttggtgcttcctcttctcatttaatatacatccttttatctatcaaaaaaaaaaaaaacttctgtgaaagcaaggaaataagatgatagagaattcaagtggttagctgagatggagagtaaattattgtaggcaaagatggagaatgatcaagctagagaatggggatagaaaattaaaaattttcatctgttggcaaatgttcatagaaaaagcagtcatatcaaaaagtttcagttttgatttcgggcctctatttatcatagaagcttataggcatatatgtcaattcatttgatatcaacaaattggaagttgggtgttttcttatttgatggggattagggaggactcccatctactatagatctcctcattttggttgtattaaacctaaccttgatgaagtctctcttagcaacctagttatttgagcatttgggtctctttaaatattgcaaggatcaatcgctacttttcaaaatcacaagggagcttcaatttagactttttctaagttggctaacaatggttgcccattgagattgagatgttagcaccatttgattggaagccttggtgtgggttttttcaaacatctttatagaagggtatttttctatctttattgcttgtacctctatataatttatttcttcattctctcatcttgtgttggatgattttctatgttctttgtatacttgggttttgcctctggtgtttttgagtggattttattttacttataagaaaagactgaggaatagcttggccctccattgaaagtggtggaccgtggacgtgtcctcattgcatttggcgaatctaaaaccggtcagagattttgttcttcacctacaaccaggaatctaattgggtgtatcatgaagccaataagttagccaattagggaacctcctctcaagtggagttatttgggacttattggcatcctggatagatggtggttggaggtttttgttatagatattgggaggcgtttcatttttctcctgtactttctcttctttatgaaggaaacctctgctgtccttgtacttttctcattgatgaaaaaacggcaatgttttacttattaacaaggtatgcaggagttgctcagaaattatgaggtaaaactcaacaagggggacctacactgggaggatgggttttcttaaaatgcaatggtttctgttgagaattgaggatctggatgaggagtggtaagagaggaggtttgggcaggagcagagggtggtggatgccttgagaatttagcagggatgatgctctgggtcctaatatggtgacaatggctttcctcttagatggatgtgagatggtaaggaaagttatttgttccctcagaatggagtttctgagaagagcttgaatgctgcttccatcaccctggttcctaagaaaagatggatacagaatatcaaggactctagtccattagtttagtgggtagtgtgcatgtggtgttggctgaaatcctgtttagggattgaagagtgtggtgggcaagcttgttttcagaaactcaaaaatgattttggggatggaaggcagctattatatgcagtgtatctagaaaaattcatgctggattctagattgaagaatggctttccaggggctgtatgtaagttatatttataaaaggcctatgaacacatgccatggggtctatgtgctatagaaaacggtggggtctgggaagagatggaggagttggacataagtacgcttttccttggtcaaatggcctctcagtcttgttctgcttgatagcaattaaataggtctctttattagtgagaggggggcttcatcagggggatccttttcgttgttttattaatcttattgatgaaagtgttttgcaggctgggtagggctgtagagggaggcatgagccctttcatggagagtctgggagtgagttgagatgtatccttcgtctgaggcctttccagatctgaaagaaaaccaagagtgtggttcttgttcttaggtgaggggtggaggtagagtagtcagatgcagaattcggtcaagacctgggttgtatcctccctcctacctttgatagttggattattattgggtgtgtcctccaaatccagaggggtttggcatgttgctatcatgattaggaagacaattatctacaaagtagacttttaggatgttttcatatcttggttccccatgatgaaaaccaatatgaaagtttattggttatggcatgtaaattaaagggaaaacatagtctgaagcctttcaagggtaacatgggaataaagtttaattgtaatattttacttcccttttaccaaacgagtagcatggtattaatttaaaaatgcatttgtttctttcatctataagcattttaaagtaatgcaagggtggtttcttcttaaaagtgagttctaaggctgaaatcccacttgggcgatccttgttatgcttgcctaaagtacctcatataatcgactgtatctttaaaagggacaaacatccttgaagattcacagttgagaggaatactgccaactctagctaagccctgctgcttcacattgaatgtgaattctgaattgttttcccatttctttttcctctcttattgcagataa

SEQ ID NO: 11912 - DNA, 1586 bp, Vitis vinifera
  Intron number 4 from transcript GSVIVT01030775001 (locus G SVIVG01030775001) derived from phytozome v7.0 (chr-ID chr1 4; pos 15759668 to 15761253 reverse strand)
cctgaaagatttgagaaggtatttatgattaattatctttttattcagcagcatatgactccttcaggtggatttgaacttcttctgtttcttctagttattatttggtgctgtaatcaactctgtactttcagcagcttctagctagtggaatggtgacctgcttagaattgcatgattgtaatacatggatgagtgtcacctgaatgctttccattccagtattttgggaggggaaaaaaagggaaaatccccaaaaaggaaaacaatattataagacaaaaatactgaaacaaattctgtttcatttttttttagaagtaaatggcaatagtattaatatgaaagcaccaaagtacatatggtgtatacattggccccaaagagcacaaaaaaggatagggaaaacaaaaacactccctccctcaattcgaccccaaccaatcaataaaatcgactaaaaacagagttgtattttctataaacaaattagaccaagataacaagttgaacaaaacaagaatttcagcctttgaacaaagagctccactttcttgaaatatcttctatttctctctttccatattgtccaaaaaagacataaaggtgctattctccaaacttttttctgctttcttccaacaaaaaagtcatgccaccctaaaagggtctctgtaactgtagaatggatcacccaatgcaccctgaaaatagagaacaaaagctcccacaacacccttgccttctcacaatgcaagagcatatgatcaatagactccttatgagcataacaaagggagcatataaattgtattggattagaatacaatttgtacatcctgtttttacacaattaccaatagtaaagttactcttacaacttgtcatcctacaatctttctcataaatcatggatcaagttcacctaccaagaaaaaagggggaaagaaacaaatacaattaatagaaaatcatttcattgactaggatcacaatcagattcctaagaattggccaacaaaatcctacaagcttaagcttttaggaaaattggtagttcaacaaatttttaccaacaaagtgtccaattccttgttggccaaatgcggatcctttgtcttcttttcataattgaattcttttaattttttatagaaatttttttgacatgtcttaatatatattttaaaagtaattatgtaattcaatgaagataaatgcataactgaaaagactcattggtgataaattattgaatataagcattattaatcatttctattttatcaatcattctttacttttactatcattgaagggtgtcgtctctgggttaaatttttggctctgcccctgctctatgacctcctttcttggtcattttaatctacaccatgcggatgctttttgaactcatgtaaagatacctttaaccatcaactccactaccttcatatgattggttatcaataaattagtctacccttagttgcttcttcagaatagtatcccactcatactgaacattgcatgggtttgcttcaattacagatttataatcactggctatcaaatattaaggattg

SEQ ID NO: 11913 - DNA, 10622 bp, Vitis vinifera
  Intron number 7 from transcript GSVIVT01020147001 (locus G SVIVG01020147001) derived from phytozome v7.0 (chr-ID chr1 ; pos 9835293 to 9845914 reverse strand)
atagagttaattgggcctgcaattccagaatctaggtcagttgtatacttcattataatcttcttgagcattttagtttgattcctgtctacatttagagaagttcaagtgggttgggacttgggggtcaattcaagcccacaactgactaagaaacaccttttccttccactcatcatctgccatggacctgaaaaagtaagaagaacaaatcaaagtgagagtgattcaattatttatttatttattttaaattaagcatcaattcagaatattacattgaaaagagaaattttgattgaagttgggtgattaaagataacgtgcctttgtttgggatatgaattaagaagtaacaagcttgtaaaatgatatttgcaaaactagtgatgttgagatggatgtttatcaccagattatgagagaatggttgatccctaaaaggaaacaaatgataataataatagtgagcactcgtacatattttacaaaaaccaaaggaagaacagtgaagactaaatgtttttactgtctctaatccatcatccatgtgtaggtgattgaaacagatgttgtttatataattaaaagaaattagaagtggaggtgtgcttatgattgttttaacaagctaggctttggctattcatagatcttgaactcataatttccttatgaaaggtagcaaggcatggtgagtggttgtcaaatggagagtgcaattgaacctgcgacggttaaaagtgttaactcgttatatgttgtttcctcaattgtggtgccttgatcctaagcttcactaaaacatcactagagatgtcaacaataccttcgttgcccaaatgaaaatgggtaaagtttgtgggatgacaaaatgatcttcttgtcaaatggtcaagtccacggaggttaacccctccataccagcatcatcatcaacaaattggtccttaggggtagtcttatcaccctcatcgactaattgattgtcactcctcacttgaggtgagatatcaattctattagtctcaatgcacaagtaagaataagagtgataataacttttaaaaaacaaaaaattacctctttcaccattgagcttcattggttgagttgggattgggacaccaacaaagaagtgtttcctttaagtgaatgagagttaacttcatcatagtacacagacttgggcctagtcttttggtgcttgtaatgacactcgctaatatcctccaagctatcattcggtgcattgaggacctctgcatttccatatttttgaagagcttggttcattcattttctaggggtatggtggaattagctcggtcatccattgtgcgaccagaagaaggtcttgagtcactatcaatagaagcatagtcattgtcaatagggcatcatggaagacccctcaatgtcatcccatgtgtttctctttatagagacaactaagccaatccactaactgtgtgtgtttttagtttctaactttcttttatttctttttcccttttcttgtcaaggaaaaagtaaaaccattatccttgaacgtgcgtataaccttcatcgtttgaagagataaatttgctattaggtaattttttgtttgtttagatagaaaatcaatgccgaaattcttaaaaattaactttggacatctttaataaacttttataaccattaaaaattgaatattaaaatttaacactcatgcaatgtcgtagctttgatacttaatgcaaattcagtactaaactcttcatcctaagattccccagagagtggtttgaactggatacataataatgtctaatttttaagacttaactaacatggaaatcaaatttaacacccgtgttggcttgttgtagtcctaaggaagtaagcaatggttatggtgttaggttatggaagaccataaaaaatttttgggagatagttaattgtagaatttccttctctatgggcaatgtgaataaggtaaagttttggagggataaatggggtggtgacaatcccttgagtgtttcttttccctccctttttgccttagctactttaaagaaggttggggtggcggacttgtggtctcactttaatggagacgtgtttggaatcttagattctctaggaatctaaacaattgggagattgagattgtggagcgcttcttggcaaggcttcttattaaggtggtagttaaggcgagaaaggacaaggtgtgttggttgaagacaaagagtagaactctctttgttaagtctctttactctaagcttgaaggaggggagatcagagctgttcccagtagatattgtgtggaatacttgggtttcacctaaggtgagcttctttgcttgggaggctacttagggaaaagttttgactcttgattaattacaacggagaggttggtctttggctaatagatgtttcccatgtcacacttatgaggaaccaattgaccacattcttctgcattgtaataaggcgagggtgttgtggcaacttttgttctctccctttttggtatctcttgggtgatgctatcctctgtcagaaagactttgttaggttgacatgactcttttgtcgggaggaagtagaaaaaggtttgagaaaccgtccctttatgccttttttggataatttggaagaagcgaaatagaagatcttttgagaatgtggagctctctgatcatagactaaaaatctcgtttttgtgtagcttgttttctaagttcaagctgtttataggagaaaaattgctatccatatttgatttcattgattatatgggtgctatttgagggaaggagtattttttattttttggtccctttttttcaggctttttggctgccattgtacatcgtgtgtactttggtgcacccttttttggagcttttcaatactattgctttttatctataaaaaaagtaaaaatgggtagccttgttataatccttgatgtgaagcaagattgtagtttcaacactgaattcaaattttgtcaaattctcatccaagtggattggccttacccaaatgcataatggtgtctaatttttaatacttaattaaaattaaaaccaaatttaataccaatgtagatttgttatagcctttggaacggaacaatgtcctaggttcaacataatataaattaagtgctaaactcttcatcctagtggattagcttgacttggatgcataattaaaattgaaataaaacttaacactcgtctagactagtgagagccttgacatggagcaatgtcatagttttgacacttaatagaaataaagtggtaaactccatgtgcaattaaatcggtttgacttggatgcctagtggtgtccaatttttaggatttgattaaaattggaagcaaatttaacacccatgtagactaatcatcacccccacaacgtaaacataatgtttaatgcaaaacgacaccaacttttttcttattctattgatttatttattttgttgcaaggatagtgtttttcaaatgcttcaaggaaaatactatgactatttttgaggaggatagtgaagattatggggaagaaaccactttgcaagtacaaaaccacttattggcccttgagccttacaagtgttagtagtagagaatttgttacatattccttccttgtcctgagtattgacttgcgagcttacaaaaatcagccacttgacattcaacagaatgagacttgtttccaacgttttgtggttaaattcttttcaccttgttgaaattggtactaatgatgaatttaaactgttgagttcttatatatatgtcggagaatttgaatgaggatgtttctttaaggtccttagaaaatatttctttattgaaggatattgggagtgggtggaggatgtgttgagttgacatggtaaactacttaaaagttcaaactttatgaccttatctttgtgcatctttgttcatttaaaactatcatgccttcattatcataactttttgtgaatgttggtgtcctactgccaatagtctccatacttccatttgagagatttccatttccttttaggatttgtatcacattgccagactacctattaatggatcattttatgatgaggtgcttctaagtttagaaaagttatcttatgatatgaaaagtcttcactcccatcaagttgctaacatttgtttcttggctatcatcatatttattctaagacgaatgggaagcctttggttaaaattgcttcataggtggcattcaagcacaaaggtttcaaaaagcatatgaagccctcaaagaaaaatgtaaggaacaagacatagaggcctaaaggggtccataatccttctgaagtctataaaccttattgcacctcatacgtggctagagatggagttgttccatgaccttagtgtggttaaggaagatgtttattcttcttaggagtagtgctacctcaattcgctctaagagtgttcaaggtggctagtaaaatgactcaaggctaattattttgttttgccatcttagtgttagcgagcatttaccatgagttgaacgaaattgtatgttcttcaaggtttgtggttaacacatcatcttccccatccatgacttacatggatggttaagtgattattttgatatatttttctttctctatattaggaacactcagagaaaaatttattgtgttaagtgagttttttgctcaacgttttaaaaactcgcaaatgtggaatttgatacaccacacccttacaagacaatatcaaattctacatttgtgagtcattgaaatgcttagtagataactcactagcacaatgagtttatccttggtgagtgttcccaatatagagaaagaaaagtgtatgaaaataatcacttaaccatccatatataagtaatggatggagaagatggatgaacctcaggttctgaaaaacatagaattatgttcaacttatcgtaaatgttggctaatattggaatgacaaggcaaagtattggccttgagccattttactaacaaccttgaagactccaatgtgaatcaaggcaacattcctcctataataacaaactttcataaccaacttgcaagtaaagcagccaaatatatctcttcaacatctttctcaagcacactaaggtcatggaacacctctatctttcaccgaatacaaggtccaacaaggtccataactttaaaaggattgagtccctttagccttttgtgtcttgttcctcacatttttctttggggccttcgtataccttttgaagtctttatactaaaatgccacctatgaagcaattttaatcaaagacttccccctcatcttataacaaatttgatgataggtgagaatcaaatattgatagtttggtgggagtgaaaacttttttgtattatatgtgcaaatttgttgttgtagtagtcttattgagtcatcccatttaatcttcaaatcttctaaaatgatcttcaaccatagtagttcacatattccttgagtcattgcgcgaaattttgtttctatacatcttagccaccaaactttgttttttacttctccatgttaccaaattcccaccaagaaggtgcaatacctagttgttgaccttatgttaactacagatccaacataatctacgtccatgtatgcttcaagtgctagcccgagcttcgtttaaataggatgtcttttcttggagaccctttaagatattgtagcactcagttagcagcttacagatgaacttcttttagactatgcatgaattggctaatcacactcataacatgtgctatattcggtcttgtgtgagatagataaatgagtctcccaattagacgctgatccatctctctatctaccatagcatcttcctcagcttctcctagcttatgattaggatatattagtgtgcttgttggcctatacgctaacttccctgtttccttgaatagattcgttacatatttttgttgagaaataaaaaattcttttcttagagtgtgcaaccttgatttctaggaagtatttcaacctttctaattctttaatctcaaattccttggtttagcattgcctttaagtctatctctttttttttcatcatttcccgtcatgatgatgttgtctatatacaccagaagggttgtagctcccctgaatttaaatgttttttatcactttgtctgtatccctgaatttaaattctcttcttagagtgtgcaaccttgatttctaggaagtatttcaacctttctaattctttaatctcaaattccttggtttagcattgcctttaagtctatctcttttttttcatcatttcccatcatgatgatgttgtctatatacaccagaagggttgtaactccccctgaatttaaatgcttgatgaatgacgtatgatctctttgactttgtttgtatcccatgttttttatcattttagcaacccttccaaaccacgtccttagagattgattcagcccatatagagctttcttagtttacacaccttcttagtggctaggttgctttcaaatctaggaaggacttctatataaacctcttcttatcagtctccattcagaaatgcatttttgacgtcaaactgttatagatcccaattataatttgttgccaatgataacaaaactttgatcgtgttcatcttggcaattgggacaaatatctctagataatccaaaccatatgtctaagtgtatcctttagccactaattttgccttgtgcctctctaatgacccattcaatctatacttaatagtataacccacttacatcccattggcttttttcctataggcaaatctactaacttctaagttttattcttttccaaggccttcatttttgcattcatggtttgtttccaattttcattggataaagccttggatagagtggtaagaatatgagtattgttcaaacttataagaaaactcttatggaaggagacagctttttgaatgacacaacatgggaaagtggatacaaaagacatttagtgcattctctcgttcccttcctaatggcaatatggaggttttaatctatgggtttttcaaactgaagttcttacttagtttgtgagggaggatgagaaactgctacctcattttcagaagccaattcaaattcttagacttgtataatgtagctttcttcctcgagtacactttgccagccattcgagcaataatgggctcaatggatgacttgaattcaaagaaggagggtatagatactggatcaaacaatgcctcgaattcaaaggaaggtatggatgttggattagacactttgggaaggctaatgggaagattcgaatagacactttgggtctagatatcggatcaaacaatgccttgaataaaataggagtctcgatccttatcttccttgatggaattctccctttaaaagtaaggcacgagaaaataagactcactttcattgaaagtaacattagttgagacaaaaaaaatttttagatggtgaatggtagattttattgttcttgggtccaattttcccctattttgattgtgaacatgcacaaaggacacatacccaaatattttaggaatgagatggtttgtggttctcatattaggataaaatgttgaggctattttcatgggacttttgaaactaagattccggagggtaattgattaatgagatgtgtagagattaagacatattcctcccgataagatttaggcacgtgttttttgggaacaaaaaagcttgtgttgtatcaaggaggtgccatttttcccctcaacaatccgttttgttgtggggtgtttacacatgatgattcatgaattattctttcatgttggaagtatggagttaggacttggttgaaataatttttggcaaactgaaacgtcttaattttgacaccatactagtttttttatcatgttatggaaatttaggagaaaaaaaactcatattagatttgtgtttaagtaagaagacccaagagatattgatcaaaaaagaaaaaagaaaaaaagaagacccaagatatcttagtacaatcatcaatgaaaaacacaaaccaatgtgtcccagatttattaaggacaacagaagaaccctgaatatcaccatgaattagatgaaaaagatttgaacttattttattacatgttggaaaggttgtacgtttgtgtttggttatttcacatacatcacgatgaaagctctcaaaatctaatttcctaaacagagaagaaaatgagatcttaagagtcctaaaagattgatgtccaagtttatgatgatggagctaaaatttttctttattgaaaaggtggtagtggtacttagaaagaaaagatacaaataatttgtttggtgtttcaaggtagtatagcttgttccatttcttagcaagtctaatcatcttcctcaaatcttggtcctaaaatacacaataaggtaaaaaatcacattgctactcaaattttgtgtaagcttttatataaagacaagattagtagacaattgtggaacgtgaaacacatttttaagtgtgagtgtaggactaatttggacatctcttacccctgtgatggtggttaatgaactattagttgtgattattttcctactacttggacaagagttatagttgttaaattggtgtgatgagtgagtcatgtgatctgtggcacctgaatttataatctgtgaattggaaaaagtttgatttgaaacttctaatccaatagaaataggaaatttactagaaagtgttggtgagtaggtacctaaaggttattcaagagcaataaatttatcagtttttcaatctcctcttaattgcatccgccttgttccaaggatctttcttcaactggttgaacataagacaagtgtgcttgcccattatccctttgttgctttccattgttagcccactttttgttagatgtagatggtttgccatggagtttccaacatcactcccatgtatgccttgccttctggcagtaagtgcaccataagttatccttgttatcacggtttgggacccttgactgatcaacccttttatgattagtagtgtttgccttctcatctcttcccttgttggtaaccatagtcgagccttccaaattccgaggtttgagcacaacacttctgatttcttctgcttgaatagtatagatagtctcattcaaagttaagagctttttgttaagtatttgaactctaacttggttaaacttaacattgagaccaactaaaaaatcatagacgatataattctttaggattgccacatcctcaagcatcttgtcttaatacattgatagtcgggatgaaaaacacataggatttgggaacctagctgacaacaatctgatgtgatgacggtctgtggtggttggaactcgacgcgatctcgtggtggtgaaggacaatcacaatgaatttgtggaggacacgcttctctattgtttttgacaatgcaaggagggttgttgtcgctagcaaaggcttagataacttgagagagatcattgatgtcgaagaagacgggcgtgaacagaaaagtcgagtggctagggcttgcaagagcactacagtgggagaaggaagatctatactagtgtgaagccaagggtgcaatctctgtttcatgatgagtttgcgatttgatgaaagtgatgaaatgggttttgctttcatgatggtgtggtagggacaatatgatatcagtggcacaacaacaggtgaggcaaatatgagaatggtgacattgaaggaaacctgtgattgcaacgacaaggtaaaggcaatgatgggatctttgtgtctgcaatgatgcattttttttgcagcaggggtgtgaatcaggtgaaagaaacctttaatcaacaatgaaggtcaacactaaactttgaactaggcaatgaaggcaaaaaaaacatttcttcttgattcatagatttatgagcctagagctctaatgccatgtaaaatatgaagaattagaaggtaaaaagaataaattttttccttaatttcaatctgtatagacccgcatatttatacaaatattcctaccacaaaaaatagaaatcttcctaacttagtaatatcaaatccccttgattacgggattgtcctaattctctctttaattacaaaattatatagttataatctttcctcattacattcttccacaatatatagagacttaaaagaaaaacctatttgactaaaccgactctaaatgtctttttggacaaccttcatttgaactatacaaatcatttttaaaaaaaacttcctagacatgataaatttttgaagaaaaaaaatttaagtggagactaaacattatgtctaatcgattggtatgactaaatggatgaataagaatagttatttctttccaacatcttttattcatggaaccatctattattctattgggagtaatcattgtgtacaaaacatgcctttagggtaataggatttttattttcttgctattcattcttgtttttctgcatctggatgaacaggg

SEQ ID NO: 11914 - DNA, 2416 bp, Vitis vinifera
  Intron number 3 from transcript GSVIVT01009619001 (locus G SVIVG01009619001) derived from phytozome v7.0 (chr-ID chr1 8; pos 9933912 to 9936327 reverse strand)
tgtcattctttcatttcttcctctttgattttaaaaataatttcccaagctccagttttcaaataattttccaaattctagttctttttttcaaataatttcaattcttcaaattttcatctttagtatttttaggcttaccaaaaatcctattttttcaataaaattggttgttgtttaccctttgccaagcatcatttcacatttttccttgattattttaaagtgttttaaaataaacatgaatttaattctgtaattccaaattatggaatttataaaattaattcatgcaaaaatgaatgagactttgctgggaaccaacatcattgatgtcttctctaaaaaaaaaaaaattgagtgaaatgcaatatctattaatgatgatttcttactctgtttagtgacatatgtgatatactttatgctcattattgtgcactaacctcatgatagtgtgttatcgtttactactacgcatacactctcattttgaccattctttatgcatgttttgactttcaatgtatgatcattttggtatttttccttatcaattgtcacccattttaggggcttagatatatattacgattcccgtgctcagagcctagatttgatttttcgcataccactttttccaaataaaaagtttcactagagttttctttcttattttgtttttcttttaaaaataaaacaaaaataaataataaattcaaatcattttttcaaaaataaaatattttttaaataaaaaatgagtctttcatcaagtgaaagtgcatgtgcatacgaggtccataatcatataagcatgtcatttggtgttattaaagtttttgtttaataataatcaagtcaagtttgagtttgggtgtgatgacgaaaacttaagacttattattttaattacttaaattaattttaaattatattatatttaaattgattaattaaaattcattatttaatttttatttttaagtattaaaggttgttgataaaattaatataaaatttattataaattattaaattgatcgctttttggcgtgaattttcgatatccgaagaaagttgaaacaacaaaataactggggactgatttttcctatttttaatattctcaaggaaaaaaattgaggttaaaaaaaccgcaaagaatagcgtctactagaatttttaaaaaacatatctaacacagtaggaaggttttctctcagacaaatgcctcgatttgtcagcaggatgaatagaatggagtatgtagagatcagactcgtcatcactgttaatcgtcatagagaaaacccccattgacactgtagtatttggcattttgtttctgttttcagggtaacggaaactttaactggaatacgattgaaatgaaaaataaaactttaatatagggctttgatttttctctagatcgattgcgaagcaacgatatgaaaagaagagaagcgttaataaacaaatttgaaaccgcaatcaaaacataaacaagccagtgaaaagcgacaatcacaaatcaaatcaaaaggaatgaattcaagaaagggtttctctcagacaaatgcctcgattcgtcgtcagaatagtggatcgaatggatatagatcggactcgtcatcgttgtcaatcatcacagagaaacccgacgttagattagaactgatgaaaaatatctacgaaaaaaaaacagaaaaaaagaagccctaatctaaatgcgtacacatcaagaactaagaacaatctaaatctacaaagatctcatctcaaaaaatcatctctgcctctgctcttctttatatagatggagccaagtgccgtgtttagggttttacatctctcatgtgcttgtaaaaataccatgttatccctgggatatattcgtattttcgacgctacccgtgcaaaatggcattaaaatgtcgatcttgtccctgagagatcatccggcaatagttgaaaaaaggtctctaatacgacgtcgttgaagttttgcttttgtacgtttcttcccgtccgctgctgaaacgaagcattttactttcaccgtttctttgggtcggaagtgactttctccaatttgctatggtatcgttagaagcttttaccgtttcatcctatacctcacgttgggtttaacatggtgtcgtgggatgcagctcctctgccggaaaagataatctgtcactctgttggagtgtggcgaaaatggtaacagctttagtagaattgactcagggtttaagcttataagaatctatactgtaagctcggtttcgatggcattagggtctggaacggctcgttctgtgagtttctgttcactccctcccattgggagcttaattctacctccacttcagaaggtgacattcaatatttcccagggctcgtttca

SEQ ID NO: 11915 - DNA, 890 bp, Vitis vinifera
  Intron number 3 from transcript GSVIVT01034509001 (locus G SVIVG01034509001) derived from phytozome v7.0 (chr-ID chr1 8; pos 20160043 to 20160932)
tgactgagcgtttattatttcatcttaatatctatgtgagtattgcgtctttttgtgtcttgccgtccttttttttttttttactattactaattgttgagcatagctaattatatcatatgtatagttaccggtataaagtatttggatttggagcttaaagacttttcttgtaaaatctctatttgcttggtacctgattttttggggaatgcatgtttggtagatttaattgatattttaggcatgggtttggcttttgccaaacccttcttgttgacttttttctgttttatttcttcccatttctttgtgctctttgtatacttcctaaatttcgggttaataggttcttaatagtatgatttgcccataaaagaaggtatgcatatttaccattatgtaatttagcttatcaattttattaagcaaatgtggtttactcaactgcaattcttactaaataagtttgcaactgtgaagtcatttctgaattctgataacagcagtaaaaatttgaacagtgttggccccatgtttgttgctaaaagccacagttactgtatgatgatatgtagattcatttttcctatggaaccacaatgatgtccaagtcctgccaggctgttttgtatggataaaagtctatactaagaagccttttgtgtgtgtgtgtgtgcgtgcacacgtgtgtgcttttttgtttgttttccctgtgaggggagacggggtttagttagtggtttgagagtgcagaatcagcaacaaacctggtgtgtggtgttgacgttggagccataggaattccttaggcagtttataccatccatacatagtgttttgatctaagatttcaattcttccatgtttcagcagtagcatattgttcc

SEQ ID NO: 11916 - DNA, 5306 bp, Vitis vinifera
  Intron number 2 from transcript GSVIVT01031747001 (locus G SVIVG01031747001) derived from phytozome v7.0 (chr-ID chr3 ; pos 4017740 to 4023045)
aaaaacccagtaagtactttgttcacatatgatttgggaatccatctattaattaaatttggaaaactttcatttttgtaaaaaaaaaaaaaattatataataaaaattgaaaaataataatcattgagttgtaaaaggggtcttatattgaattacgaagtttgaatcagttttgttgtgcctgactctggatgtcggatgtcgggggttgagctatctagtcggcttgcagggttgagctccccactaaactcataggggtcatgctatctaatcatggggtttgaagggggttgtctttttttttttgtttttttttatatgtaatgatttttttaacttttttatgtttaaaattttgtttctatgaatatgacttgaaagagttttttaagagtttcactattataattattttcgttctttttcattagtagcttatcgagttttgatatacttcgtggacataaaaatcatattaatcattaaaccacattaaaaaatttatctctttttttatttttttattaatgtgtgtaatttgattaacattttagagtgcgagggaatcaacccctttagaaggtgatcaataagctcccaaactaaaaaccatatttcaaccatggcagaacaaacatgatggcccaatccctaaagataagatcaactgacctatacccctccaatttcgttcttttttttttcttttttttttttgaaaaattacataggtttaatggaccatgaccaatcattccatccttgaggagtggaccgttctcaaaagaatttctcaattgtactgctacacccatgtccattactgttgaagtcttgacatgtaagtgtgaaatgtaaaagtttccttctattttagattcatccacgttcaaactttaccataattaaaagacaaaaaaaaaaaggttctttttccttatcttatcaaacagggttattcgttcgaggaaaggaaagcgggtttcattatcagcaattttgctttacagagatagtactctctgtcacgtttaacggtcatggtacgtatggaccaggggtcgacgctcgaccctggaccagggtggaccatcggccactcctaatggatccaaatggaatcacttttctctgacgaaagactcaaaaccaccctttaacgcatacagattagcccaaatccacctcttaaaacacatgcaaattaacgcgaatccaatctaaaacctgtttatatccacgtctaagcacgtacgtcatcacaccaggcgtgcaggtatctcttggaatgttcccacatgttcaatttattagtagtttgagtcgtttgacattcatgtgactttttgagaggccccaccaccaggggtggctagggttgtgccccttgacatgatcttggggttaatgttagaccgagactggcccatgaaagccccatctgtaaccttttttgcctcttccaagccccaaagtgaaaggatgaaggggacttcccccgtctcatgccatgggctgaccgttgttgaaaagtcagatatccgtggattgaatatgatgtttgtaagctgaatatcaacccgccgattttcttggaggaggtttctggtttcagagtacctgacaatgttactgggtgcatttaaagctgcgttcacaagaggagaaaggttaggttggggttataaagaatgtagcctcatggatgaggtgtggactagtcaaataatcaaagttggctaacccagaatggattcaaagcctcggatacgattttatctcatcttgtcttgtcccaattatttagtttttttttttttttttttttcattttctactgttttaaacatatataaatattatttttcataaaataaattaatattataaatatttatatttattaataaattgtgtttatttttaatagaattcaatatttaaaaaaaaatgaaaggaaaaattaaactaagggtggcgaatttcctacccttgccaagcccatttatttattttttttatttttttatgggaataagaataaatgcaaataaatggaacatcaaacctatccaattaccatccctattttgaatttatcttagcctaattaattaacaccaacttttgtgaacataaacataatttccctttttcctaatatatatatatatatatatatatatatatatatatatatattgttaaattaatgtaatgatatgtttatttatgtttaaatttatgtattaaattaacataatagcatattttaaaaaataatatagtttctaaaaatatttacataatgactagataattaactattttaattatttttaaatgagataataacatatgtaatcatcaaaatttcaaatattgagatttattatatcatagtataggtcaatgcatctacatattttttcttaataaatttatgatattttatatgaaatgatattacacatggaatacaaagtagtgaatgatattttatatttattttgtttcatttatggaaatactaataattatttatttaatcatcgcaaaaaagattaaaaatatatttttaataatccttgaaaaaatttaattaaatgtatatataacattcttgcatgactaactttgaattttacttaatttttttaagataaagacataatcatcttaaaatataatgttgaaaaatgagggttgtttgaaaaattaatattttgtaggaaatcattatttccaataataagaattaaataatcaaaccctctaaggacatattagaaatagtttccttactttgtatattatgaattatctcattgttttatatctaagttccattttttatatgtcgatctctggtatttgtattttaatttttttaaatttaaatcaaatatattgtactatcaattaataatccaaactcaaccatacacttcaatcatttgaatcacaaatttgatataagatatatttgataccatatcattttacaatatattaagtaattacatgaaatataacattatcaattacttcttgtgttttgtccataacaacttcacaaattgaagaagattatgacaccaaactaaaatataatgtaaaatgaatgaattacaagttttaaactaaggcgatgtttgtttttttgctgattagaaaaagtcaaaatattttattttttatatacagttaaaaatagcatatcgatatcaactaacataactaaagtgaacttgtcatcaatatgttcaatttagttatgttgattgatatcaacaagttacttttaccttaataaataaattcaaatattttgatttttttttctattcaatcaaaaaacaaacactactctaaagacaaacaatattatgtacacatcttcaaattatgttacctagttagcatagaaaatcaatttaaaaagtttgaaattcaaattgagttttgattgaaattttttatttcctttgtatggtattgataataagaattcaaagcaactttgagtctcattaaaacctcgtttaatatttttatatctttttaatttatatgattaattttattaacggttcttgatacttatcacttaatactttaagtttattttaagttaaattatatttagtttattagcttaaaatttattatttatcttttattttaaatattaagattgcttgttaaagttaacttaaaatttatcataaataaaaaaaataacatatttaccctcattaattttaaccaatattcatttcattcattttaaatcatctttattttcactaattttaagtaacaaattcatttttaaacatttatatttaaaatattatagatatataagataaccataaaatatttgttataaaaaatgaattatgggtgtagaattataattctaaaatatattattagtaatataagcaaataaggtaaaaatgatttaagattaaaaataaattaattatttggatttaatatttaaaattaaaaataacttatattaatttattttattgaatatatataatttatttaataaattaaattaagttattaagtcaacttaagtcactaaattaatttaccaaataccttcttggtcttcattgatttgattttttttttttttagaaaaaaaactaaggttaaataaaaatcatttttttaaataaatggatgatttttataatttacttaaaaatcaattaaaatttatttcaacatagtttttttctcttttaaattacaaacgcatggccttcattttttgggttacaattattaattattataaatttaaaatttattagtatagaaaaataaaatggtggtttaagaatctaaattaatattattttagtaggaaagattgaaggtcgtatagtcagagtagcaaagcgagaacaagagggtcaacgcgtcgccgataacgcataaatttaaatacactttaaccgtactgctcgccccatgaaggaggtccgagtagggccgagtactcgcttctctgctttaaatgtgcacgttccacgtcacccaaaagcacaaaaaatagataaggacaccgcgggagttcccactctggcgtcatcttccatgtcactaactcgcctcacgtcatcacttgatttgactccatttgctgtcgctcccacgtcgcacttatacatcacgtgccactatgccttcttcaaagccgtgtgtgaacggtgttacagctggctgccacgtagacatcgcgttagctatatatataagccgctctttccctctggctctgaaatcagaaatcagaaatcagaaatcggcaccaccaaaaaccatctgaaaaccaaataaggaaaagaaaatctacttcggagcgctccacactctctcctctacacgctatgcaacagagaacccccaagcggcagaagcacgcctctgctccgctttcggccggcgaaaccgcctccctccagtctccgccgcagcgcctcacgccagaacaggaaggcgccatcattgtcgccgcactcaagaccgtcatctccggcggggatgctcaggactttcgcctctttcccagcagtatggactgcgccaccacctctaccgacgtccacggcaacgcgttcctgcccatctctgaccccgaaccttgtcaattctgcaaaatcaaaggctgcctggggtgcaattttttccaagaagacagtaagagcgtcagtgttgctactaccactaaaaagaagaagaagaactaccgcggggtacggcaaaggccgtg

SEQ ID NO: 11917 - DNA, 3969 bp, Vitis vinifera
  Intron number 21 from transcript GSVIVT01021009001 (locus GSVIVG01021009001) derived from phytozome v7.0 (chr-ID chr 5; pos 15410696 to 15414664)
caacaaaaaggtaagaattgtgccctttgaataatttggttacatattggtgtctacattgtactttttgtttatttatttattttgtcaaatgttgtgaaatatcaattttaatacatattgatgattggatctgctaacgttatactcctattctgagataggagtagggtctctatgcagcttattaatggaatcatagatttagtgtatgcatctgatctttacttcatgatatgtaggaaaaattattaattctatatacatttaatttcttacatcttatgatatgtgcacatgatttaggttggatttttttattaaaaggaacatggactgcattttaagcaatttgttgtgtgcaataagtaaagaggagaaatctgttactgataaatattccacattatcattgtggaaagtgcaaataagatggaaaaagaaaaatgctaaattaagcttgggttgtatagttccagaatgaatacgatcatctagccaatatctgacgttaatttcagccatggtaggtagatgttttagttatcccacaaaatgaacatgtctccaggaccaataactgatatttccccctcaatctactcgtcagccacccaaagaccaccaacttccctcaggcctttcaaagttggaggaatctttctctatgacaaaatcttcacccatcagtttgcaaaagctagaacactaaacttcctataactatcctttctagattgctcaaatagcagctattgaatttaagcttcaaaagacaaagggcagctttataacacaacagacctaggaacctaagggagagagattggatgttaaaatgaaaagaatcctgtttcatatggagctccttatcctcttttctgtagataggtttctttttgttctgtggtgcatgaaggtgagttccaaatgcttcatgccatcttcttcctttctttcctctccaccttccccccttattacacacatgagggcatgaatgaaagaacatcagggtttgcaaggaaagaccaaaacacagaaaggtaaatataaagaggcataaataggaggtggacttgcccttgaggcctagctcaggtggtaaagggatggggaaggtttgtgggaggttccaggtgcaagtcccaatggggacaaaaatttaactatcaaaaagaaaaaaaaaaaaaaaagaaaaagaaatagataggaggtggacttttaggcctttaggccaactccaacttatgaatgaaatctgaaaaggacaagcgcccctctcctatggaatccctagactacaaaaataaagattgaagacaaaagcttttcccatcaaaaaattgatagctccatccgctaaaagattctctgattccacttcttccagatgcactgaaaaccagcacaagggcacacttcactgatctttcatgctccttttccccacaaaacacacttcccaattggctaagaaatgcagcacaggatgaggcaatgcacatgacataccaaagaaagagggtgaagtccaaggagagctagccacctcataatgaaggggaatatgattggtcaactcctgaccaggcatgcatatgcaactccaattcactagaatccggaccctctcaactaatctattctaggaatctttactcatacgctactaagtcaaaaagatagctttcggtgaaagtcttcctgccttgtaatttcatttactcctttcagattcactttgactgcagaaattgagccttggtaaataagggagctctaaagcatattggtctaatgtagctttggcaatttccatcccagctcaggtggcccttaggcctcactgcacctgtgtgaaacctaagttaacttagttcctttgaaatgtcccatggacagcaggaaggagaatatatttgtgggggagggggtggggggttggaggcgctttattatttcaacactatacatgagataatttggtgactcccaactactaagatatgatttagcactttagcattcctacaagactcaagttccttatcatgtggtcacctccataccttttttatagccaagctacgactctcctcctcaggggacaatgaagaccatgaaacgggttgtacaaccaatgtcctgggtaggtgattttttctgtcataggaagaattggatccatgcaaatgaagctgaatatttaaaaaaaaaaaaaaaaccagaaacccaatagatcttttctgttaattgaaaagaacaaggacaagacatccttccacaatgtacaagtttagatcaagacaagggaatggaatcttttacaagttagatggtattactacccactttatggtgatcctatttctttagtcattctgctgtagggcaaacctaagatgcagaagcattaatattagaaaaatagtactatgtgaaagtgtctagagtgcaagaaacaaggttagttattgttgcatgtacaaatcaagtgaatttttaaccattttccttttcattcttgattaattgggatttgtgggggttttttccccatcttttttgtgcacttttagattactttgattctttttgagattgatgagagagtgcttgcaaactggaatgaaaagttccttagaaggcatatgaaaatgtagcgtgcagacccattatgcctgggttgttgctgttggaaacataaaaggagaatattggatggaattgatgtttctgaaaggatatatgcttgggagcattcattcttggaattctgccaataatatgggttgtctgaggtgctagggtataggggttgtgcagtaagatgaatattagcagctcttggtgctatgtattcttcagtagaaaagaaagatctctttgaagatcttgaatgtgaagccttctgggagggaggcttagggtgtgtgatccacaaatggacaggtaccattagtagattaagttttcctagagatagatgattcatctgataattttagtcattctatcggtcaacaattgatgggtaccataagtagattaagtttacctagagagagatgattcatcggataattttagtcattctatcggtgacagctttgggatgatggaaaagacttttgattggtcaggctcaccaaatctgaatgaacttgattttcattcccttaaccacttaaatgtcatggtcctgagcttattattttatattgatatggacagattgtacttggaaagtgtagaatgatgtatataaattgtgattgggtaatggttgaattgtcttcaggtggatgtgactgtttaacttccttttgggatttagtttagatgaaatagtcttggcttagctttattattatttttttgtttaatataaagccgtgtaagctttcattctctcttattagaaataagccatattctcctttctaacagaaaaactcttttcctatggtttgatttttataatgaagaaaacaaaattcctcttgtttcaacatgtatgtcttgttttgaaagagtaacattctttttctgttgaattacttgtaaggttaataaaaagaatatggaattgtaatcatgtatccttttcttgcagtctgactttaacttttatgattatgaaatagattcactgttttaggagtcataaagcaaattttttgtgccttggatttttttagcaaattttcagtagtattcattctttggatttttcataccttaggtagactactcttaagtgtcaatatccattgttttgtggctcacttcaaaaaggtttttagtaagtccttacaagtgctgaaacaatttagttttctattctcagtgatatatcttgtgcatacggaattatgatcttgtggttgaatgaactctctttgtggctaacctttcttgatggtaataggaaattggtcaaatatcctggagaaacagagctta

SEQ ID NO: 11918 - DNA, 3862 bp, Vitis vinifera
  Intron number 6 from transcript GSVIVT01037261001 (locus G SVIVG01037261001) derived from phytozome v7.0 (chr-ID chr6 ; pos 16776108 to 16779969)
tgaccctatcatctggcattttccatattttcgctgtatgatgtgcttattctcctttagtttccaagtgcttattgtgaattcttttcctattaattcaaaaccccatttctttttttattaaagttgtcagtgttgctctattatggtttttaacatatttgagcaagaaaagctttattcaggctgaaccaaaagagtacagaatgttctaatatcttgagcatttccccttgcatccaccaatgcatggtggctaatatgtcaatggcttctgcttgcattttcagtcctgtttctgttgttttcctgtgtacctcttgtttgcctgcacttcttaagccttaattactgtttctaaaagtaaaagagcaggaattatagaaagcatgtttgattctagtcttctagctaggtaaaagaaataaaagaaaagggaaaagaagtttttggaaatagcgtacaagatttaccaaacactaccaggtcctatttgtggctttattaaaattttactgggggtttcatagctgcccctgtggaagggttttgtatgcattattttgttttatttctcttttgtggtgggcatgggggagctatcctaaccactttgtgcgttatttagttgagaggaactccaactgtgggagaatatttattttctcacatctctttggatgttacactttgtattgctggattagagatcattctgcctcacacattggagagtcatgtgggttgagtgggttcccctgctggttggcaccctgaaaataaactttgatccttggttaacttgtgttggatggggattggtggctcatttgagatcataaggtgacatcattcaagttctctcaagtagtcactttgtttatccatttgagaggtttgtaaaggacaagagaattaagcaccccccaccttgttgtggagatgattcaacaagaatcttagctgctaaaggtaggtaggcccagggcgcaacaactaccttgatgtggtgtcttgcatggtgaggcatgtgtttttatatatatatttatttaagctcagggcaaaatgacaaaatcatgtcagcatgcaaaaagtgtttttattttcctctgatttctaagttttttagtgctcattttgtgttttttttttctttttttcttttaaattttattcttaaaattattgaatatattgttattttgatggatgctttttttttttcaaatacttggaatctttatttatttatatttatatatatttatttacttttgagtagaattttatatcatatgtgatgatatatgagtataataaatgtttgcatgttggaaaaaatgagttttggctccaagtggattagacagtgcatctttacaatgcgtttctctatcttggtcaatagttccttcaggtttcttccaaagctctaggagtttgagacaagaagatcctttgtccccttatttgttcatcttggcgatggagactctctcttgcattcttttgagggcaaaggagggagggtttattgatggctttctagtaaggggaagagatggagaggggatggagatttcccatttgttatttgcggacaatactctcattttttgtgatgctagtaaggagaacattgagtaagaataaaacaggtttttaggtggggtttggggataaagtgaagttttagaaggacaagtggtgtggggatgcgcccttgagggattcatttttggatttctattctatagctacctcaaaagatgcttggttgagtgacctttgggtttaggaatcctaggtttacaaggtagttgcatgattgggaactagaggaagtagaagccttttttgggaggttgtttgcacacaccatttttgtgaagattgacgatggtatggtatggttgcctttaaagaatgctactttttcatttcagtccctctactcctcttggcaaataggagagcggagtcattccctcttggcatagtttggaatttttgggtttcatcgagaattagttttttttacttgggaaacaatttgggctaagattttgactctagattagcttgaaaggagagattggaggattcctaatagatgttacttgtgtaacggaaaagaagaaacaagtgatcgtattctctttcattgttcgaaagctcgcttattgtgacaattgttttttgtgctttttggtgtctaacgggtgatgcactctttagttagagaggtccttttgagctatcacaggtcctctttgggtaaaaagagaaaaaaggcttggaaggttgttctgttgtatttatttcagaccttatggagggagaggaataggagaacttttgatagttgtgaaagttcgaacctaacaattaaaaattatttcttgtatcattttgggattgggttaaattgtatattggggatggttctttgatgttgttagactttgtggattggttaggctcttcgtaaggtgtggttgttggtttttgtgtcttcgcgcctcttttttggcctttggtttactttgtatacattgtgtatacctctcttttattaatactcattatctacctattaaaaaaatgtttgcatgtttgaatttgcaacatatgacaaaattaaatatgcaccctaggttgcatatttaattttgtaggttgttattctcttggaaggtttggtcagtaaatcaacaagtcaataggttggttattgggggatcaatctctcttgttaacttgttggggatttttggctttgggagtttggttgcccatcctttcacctttgatgtatttgatggatcttttctggatgttttgatggttgggatccatttctggccttttttgcccctattgtagccttattttgttgggtgttcccatatacttccctttgtgtcaaagatttggttcactttcagcgtcactttttatttttatttttttatttattgtttgtttggggtgggggtgtgtggtgatatttgcctattgaggaagagaaaaaggttgttcttctttggaatatttgccggctgttttatttttttatttttttttataaggttagcaaaaggaatatcttggacataaggaaagaaaaaggtacttagattacatcagtatggaaatttgtttaataaatcaatgatctgcatttcctacctattaaaacattctttctacaaaatttctgaactgttgggtaacttgggttattagttggattttgaatttatgcaattccatctgtttttctatccatattgctggggtttattgctttaaaaagagggggagaaaatcttagtgtaatcttgtcaaagtttcagaaaagagggaaaaataaaagaaaaattggtgcatctttattttttctaatcacaactcatatggcataattcaatacttctgcggatatgccagtttttctcaagctttgtttccattatttcgtcacatatggcagactggtagaacagttagccttttgtttgggtgtccttggtgtgaaatttgtttctgtcatcataacttgacccttcttgtgctcaaattagcagaggatatggccttggatcattctgagtggtaaaaaaggatttttatagtcagtctttaagtcttatgtagtcgagacttaattttaaagatttgttcgtttgatgattttattgttgttctgcttctcgtatgtattcctttattctttccacatctctcaattttcattttagtggttttatttttcctcaattacgcagaatgatatttttctttacatctgtcttacacagctttggagattgagttcacaagatctcagatcgtt

SEQ ID NO: 11919 - DNA, 16938 bp, Vitis vinifera
  Intron number 1 from transcript GSVIVT01032015001 (locus G SVIVG01032015001) derived from phytozome v7.0 (chr-ID chr1 3; pos 23536661 to 23553598 reverse strand)
tacagtcagagatattaaaacttgggatttcagtcccattagggttcattccagatgcctaataaaagattttttttttattaagttcattccagatgcatttattattttaaactttgcctaataaaagataaatgtttttttttttttggaaaataaaagattaagtttttagattggaaaataagattttttttttttaataaaaaaggagatttttattttttttaataaaatcaatttttaataaaagattgaaaaattgatgccggaatattttatttttttaataaaaaaaagagagttggctttcttgttattatttacttatttatttattgacaaattattttttttattggagagattaagttttaaataaaaaaatcaggattttttttaaacggaggagttgacacttgaattttttttttttttgaaaataaaagattaagtttttagattggaaaatcagattttttttaataaaaagaggagattttttttttttaataaaagattgaaaaattgatgccggaatattttattttatttaataaaaaaaggagaattagctttattgttattattattattattattattatttatttaatttatttatttatggaaaaatcatttttttattggagagattttaaataaaaaaatcaggatattttttaaacggaggagttgacacttgaatgttttttttttttggaaaataaaagattagtttttagattggaaaatcagaattttttttttaataaaaaaggagatttttatttttttaataaaattaattttttaataaaagattgaaaaattgatgccaaaatattttattgttttaataaaaaatggagaattagctttattgttattattattatttaattatttaattatttattgaaaaatcattttttttattggagagattaagttttaaatcgaaaaatcaggatattttttaaaagcatgagttgacacttgaatgtttttttttgaaaataaaagattaagtttttagattggaaataagatgtatttttttttttttataaaaaaaagagattttttttttaataaaatcaaatttttaataaaagattgaaaaattaatgcccaaatatatatatattttttgataaaaaaaggataattagctttattgttattattattattattattattattattattattatataatttttttttatttaggtgaaaattattatttttttaaatggagatattaagtttttaaatgacgtaattttccatcaaattctctttcttgggcatgccatatgaggtcttttgcaactgttgaggaccgaaacaatcttctaaatcttggaataggaggaaaataccacattacttttgcagggactcccttcctctttttagtttttgttctatctaacttccatcgtgaagttccacaagttggacatgaagatgtatccttcaaatcattcatatacaatatgcaatcattcagacaagcatgtattttctcatattccattcccaatgcattcaatgtattttttgcttcatacatagacaagggtaactcattgtttagaggtaacatatctctaacaattcctaaaagctctaaaaagcttttatcagaccatccataccgtgcttttaggttgtataatttcaccaatgcagacaactttgtaaagtttctacaaccatgatataaaggtttttgggcattttcaagcaatgtttcataaaattctgggtcattcttacaatcatcatgtgcagcttgaaccatttctactatactatccacatcagtaaattgaactgtatgatgacattctacccaactagttggtggtccacttggagcagcatctccatgccaataccatgtatgataactctgatcaattccatagaaaaataaatgctctctaatttttagagaagtatggaatatcatattaccacattgaaggcatgggcatttaatggagtttttatatgcagaatgttttaatgcgaatgcgataaagctttctaccccatccgcataatcctttgatcttctatcctttgacatccaagagcgatccatttgatgtacaagagagaaacaaagctcctagataccaccaaccactaaagttattaataactatcctattagtagcctcaaaatatatgatccaccaatttcaaatttcaaacattgtcagaaatacttttaccaatccaaaaaacaacaatgtgtaagtcatctaactataagcaatatgacaacaaatataattagcatattaggttattaaaaaattagactaaaaaatggatctgaattccatcattatgtttggtttgtgcatgaataggaatcaaaagttagatgtaactctcaatcttgtgttctattctcaagtacacccagtttgaaattttaaatcgtttgaaaaatacaaaaactcataatttctgtaatgccacaagatgagcaagacatatggatggaaatatctttttaattatgggttgaaaatcattcttttaaatctaagtatcttcttaacatcatcttgattgttgaatagtatcaaacatagacatatgaaagagtaataattgagataataccaactaatacaaaaatatcactatggaaaacaacaaaagtttccaaatgtttcaattaataggaaaaaatgggcttactccatcaaaatttgatagagtacttaaaatgagacttaaaagttcacttatttgatgaagcaaaaaataagaaaggtaagtaaaaggatgatactcaatgataaagctttcatcaatttcattgaatttgctcctagaggagacaatgataacatgaactaaaaaagtgaactaatatggttaagctttcgatgagtacaagcaagtgatttatgcatgatttaggcattctaacatctccaacatccttaattaggtagtggttcctatcccatataggaatacataatccctatgtatcaattaccttgtattgaatttaattttaaagaaattttggtagcattttcctatagttctccaagtacacaaaatggacaaggcacaatatgtaaccttgtcgaaatatccacccagagaacaagaggaaagactaccaaactttctaaaaattgaattaagaacaaacaattaacttcatagatattatgttttcctatactatccaattgcacaattcaagcatcatttgtagagaaaagaactttatcacaagctaaacaaatttaaaagctgtcaacttgaaaatggcctagatagaccattttcaccatttgacaacttaaatgtctttattatgtaataagagaaccttttgtcttccaatgatacttgaatgggaactctaaggtttcatgcatgcatgttggattaaaattaaagtattataatgatttattgaattattataacatagcaacataactctcattctatcatgtttatctcaaatatataacatttaagatggatccataagaaccttttcacaacttagaccaacatcttctacaaaaagggttcatagtaaatataatcaaattaatatgatttgacaattttaaatgcacaataagtaattatcttacaaaacaaataataagagaactaaaagaaatccatggtgacatgatcatgcaaatgaattgcacctagaaaactagtaatatgaatgccactacttataatagaatataaggttcaggaggaggtggataagtatgcaaaggaaaagtcatgactgataacccattttttggttttagtagcccatttggacactcttagacccttttaggcacatttggcccatctagattcacttaggccctcttagacacactaagcccatttggacacccctaggccctttaggcacatttggtccatctaggttcagttaggttcatctagccacacttcggatcacctaaacccaccttaagcatacttaggtcaccatttaggcattctttacgtaacttgcatggttgcatgtcttgcatgaccctcaatttatttatttatttttatttttattactatcaatctcttatttttatttatttgttatttttatttatttgtttattatcttgtcttttctttattattattattattattattattattattttatcattctctaaaatttttattcacttatttgatttagtaaatatgatgcttttgcaaggaaacttaccaataaagaaaaattgatgctggaatattttatttttttaataaaaaagaggagatttagatttattgttattgttattattattattattattattatttaatttatttattggaaaatcattttttaaaatggagagattaagttttaaataaaaaaatcaggatattttttaaacggaagagttgacacttgaatgttttttttttaaaataaaagatttgttataaaatatgagattctgtaccactatggtaacttgtgaatgatcatccataaatatcttgtgtaactccctataaaagggagatgcccctaatgaaatttgatatagagttttcccgtgcattctattctcttcctacattctaatttctctttcttattttcttctccttccactttataattttacaacacattatcagcacgaatagtctctacaaaagaaataagaaagacgttcttctctttagagaaatagaaagatgtttttccctttagagaaatagaaagactttctctttttttttttctcacaaaaatgtatgtgataaacgtatatcatgattttctattttattaccttttgatctctattttcatatattttatttgaatacataaatatgtataatccctataaccagaagttatggggtaaattataaattatagggtacattcataaccagaagttatgaaaaatatgtacaatccctataatcataaattataaattatagggcaaattcataactagaagttatgaaaaatatgtacaatccctataatcataaattataaattatagggtaaattcataaccagaagttatgaaaaatatgtgcaatccctataaccaaaagttatatgaaaaattataaaattacatatacatgaccagaagttatgtatatgatccttaattatttatttttaattatatggtataactagaagtaataccaaacaatattatagccagaagctataaaataaataaatgttcatagcctgaagttatgtacaaatctacataatgaaagttcatagcccgaagctatgcacaaatctacccaatgaatagttcatagcctaaagctatatacaaatttatataaaaaaaacagttcatagcctaaagctatgtacaaatttaaatattttcttattctaacaaaataatcatggcctgaagctatgaaagatattaacttttaatttctttaatttattttaattatattgtgtaactagaagttatacataaatagttcatagcctgaagctatgtacaaatttgaatattttcttattttgacaaaataatcataactcaaagttatgaaaaatattggatttaatttttatttcgtactcatttatttttcacaataggaattatggaaaacaatttttattaacaattgtttcatagctagaagttatgcatacaatttctaattctcttgtataaccagaagttattcgaaacaaaattatcaatgaatcttggagctatgatcaaagaaggaaatcaaacatccctgcaggatcgcgcaaaaacactaattttccttcgtcatcgtctccatgaaggtttaacaaaaatgagcttttgatgagaaatcaccagtctcgtccaactagatttgaatcattccctaaagtgaatgcaatattgtcctaaactcgtggacggtgacgaggacgtggtcgttaaagaaatcccagataccatagttcttatagtaataattcaccaaattctcaaaaaaggaaagtctcattataccaccagaagtggaataatactgaggtaaaacaagaaaatgggaagtgtttacaagataaacctcctaagaaccatgagaataagttttatagatgtggtatgaaggggcattggtcgcgtacctatcgtatgcccaaacatttggtcgacctttaccaaacatcaataaaatgaaaggaagttgaaatgaacttcattgatagtgatggccaagtgaatctaacccatttagatgtttcggatttctttgagaatcttaatgggaaaattgaccatttaattggtgatgaaaatgtttgttatgattaaacgttatgttttttatttaattctttgcaaataggtttattttgttatcatatttgaacacattgtttattgttcatcttttatagtttatttcaaattcttttctttatttatacttgaagatacatggatctctctcataccttgatccatcactacaattagtctgattattgaaatacttcctagttatttcatgtataaattgctccacacttataaaatcaaatgtgtgagatacttacaaaatatataactttaaattatcttttcatatttgtcttattgtgttatatatgctctcattgcttttacacaacttattaagttaagttatcatcgatgactaatatttttccagtgatcttaactttttctctatgataatatttattcaactctataaagatgaagtctttatgacaatgtcttatgacttattactttgatgaaactcttgtctcattaattacacaacattgatgacaaataatgttaatactatataaggtgatagaaacctaattaaaggctccagaagagcttataccatgtcactagtagtatttgattccatgtgaatgacactttatacgatgatagatccagaagaatcttgtaagaccaacttggttccccggggtaaaaggtcatgtggatgtacattataaaaccagaagtttttatttagtgactagtctacctatatacttaaaaggtagaatgacatgttgtgcaaattatcattttaatgagacaattttcccacagttagagggagaagagccagttccagaagaacgccgtgaaattatttggaatgcattgactttgactcatcttgatcctcatacaaatcaatgtgaactagaagttcaaaggatcattcatttacaaaatcttgcaaatcaattacaaaatgcattaattgatacaaagaaagtgacaaagtcatatatcccagctacaaatactccaacgcagattgatatccctgtaggacagttaacaaattaatctaagatacgtctgaagcgtggtagacttgtcggctcaaaggatgtaactcctcggaagaggagaacccaagaaaaacttggcactctagaagagaccataaaaaataactgatcagtttaaaattgataaatctatagccctagaagaggcacaaataatacaagaagcctttgaagaggcacatgtacctgaaaattgtgagatctcagtaagttatgtatacacgggagaaaaatgggatcaaaataatattattttcactttccaagtgggctctataagaaatgatgaagatcttgaaccacgaaatgtggaagaatgtcgacatagaaatgattaaccaaaatgaaaagaagctatacaggcaaagttaaactcattaacaaaatgagaagtttttggacctatagtccaaacacctaaagatgtaaagcctgttgggtacaaatgagtatttgtacaaaaacgtaatgagaataatgagatcataagatataaagtgtgattagtagcacaatgtttcttgcaaaaacctggtattgactatgaggaaacattctctcccgtcatggacgcaatcacatatcatttcttaattagtttggtaatctcatgcgtctcatgaatgttattacagtatatttatatggatccatggataatgatatatacatgaaaatccctgaaggatttaaattgcctgaagcaaattgtacaaagcctcgtagcatgtactcaatcaagttacaacaatccttgtatggattaaaacaatctggacgcatgtggtacaatcgccttagcaaatacttgctaaaagaagggtatgtgaataaccctatatgcccatgcatcttcattaagaaatcagaaaccagatttgcaattattgtagtgtatgttgatgatttgaatcttgttggaactcctgaagaactcacaagaataacaaattacttgaaaaatgaattttagaggaaagatcttggaaaaacaaaattctgtctcgatttgtagatcaagaattttccaaatggagttttagtacatcaatcaacatacattaagagagttttgaagcgtttttatatggataaagcgcatcctttaagttctccaatggttgtttgatcacttgatgtgaaaaatgacccatttcgtacttgcgaaaaatgataaataattacttggtcctgaaggaccatatcttagtgctattggtgcacttatatatcttgcaaattgtatacgtccaaacattgcttttttgtcaatttattagcaaaatatagtttcactccaacttgaagacattggaatggtatcaaacatatattgcgttatctttgcggaactactagtatgggtctgttttactcaagagaatcaaagcaacaattgcttggatatgtagatgcataatatctttcagatccatataaaggtaagtcacaaacatggtatgtgtttaattacaatggtactactatctcatggagatctgtcaaacaaacaatggtggccacatcatcaaatcattcataaatactagcaactcatgaagcaagtcatgaatgtatatggctaaggtcaatgatccaacatattcaagaaacatgtggactaccttctatcagaggcaatgcaaccaagttacatgaagataatactgtttgtattgcacaaattaaaggaggattcataaaaggtgatataactaagcatatcttcctaaatttttctatactcatgagctccaaaagaaatgtgagatcgatgttcaacagattcagtcatgcaataatctagctcagcacgacgcctttcctcataggcagcaccgtgttcgcgctcaaatccacgccagaaaacaaaccgtcgccgtcgtccgagatcattgaaagccccggcttccactcttctcgggcccgacacacctctgtctccggctcgtgctgccgagctccagcgccggagccgatctagttgaactgctccacttagaaaccggaccgatctgagtttcttcgcccaccttggtcgccacgactcacgactttcagggtgagaaagaaagggagtcaagggtttgacgcaagcttttgaccctttgacgcttttgacaccttgtaagagaggtacttgtctctttcttcttgcagtggtaaattgcaatttctggtctggctgattactttgaagattaaattttattgtcatggaagagagtaagaattttgttgctgatatagtgcctattgtgtcaaaaataactgaacacaaattaaatgggtctaattatattgaatggagcaagactatcaaaatttatttgagaagtgttgctaaagatgaccacttgactgaggaacctcctaatgatcacactagaaaactttggatgcaagatgatgcacggttatttctgcagatgaaaaactctattaatagtgatatcgttggtctgctgagtcattgggaatttgttaaagagctaatggattatcttgattttctatactctggaaaaggaaatgtatctcagatgtatgatgcatggaatgcctttcattgtcctgagaagggagctaaatccctcactgcatattttatggacttcaagaaggtatatgaggaattgaatgcacttatgcctttcagtccggatgttagagtacaacaggctcaacgggaacagatggttgttatgagtttcttatccggtctcccatctgagtttgagactgcaaaatctcagattctttctggttctgacattggttcccttcaggaagttttcagtagagttctacgaactgagaatgtctcatcttctcagcacaccaatgttcttgttgcaaaaggagaaaatgcagaaaatgcaagaagggtgaataacaggggcggaaacagggcatttgaaaatcatggcaatgattcaagtacaattgtgtgtttttactgccatgaggctggccataccaagaagaactgcaggaaattgcaaaatcgaaatcggagaattcaaactgccaatgttgctacatctgatactgctatatttttagactcctcaaacaagatcgtcacaatgacagcagaagagttttctaaatattcacagtatcaagacgcactgaaagcatctactcctgttaatgctctggcagagtcaggtaaaacatgtcttgtctcctcctcaaacaaatggataattgattcaggtgccacagatcatatgacaggtaatcataaaaccttctctaccttcagaacacattctgctcctcctgttactgttgctgatggttctacctatgagattaaagggtctgggactgtgaaaccaacatcttctattacgttatcttctgtgttaaacttacccaatttggcctttaatctaatctctgtcagtaaacttaccaaaaatctgaattgtagtgtctcatttttccctgatcattgtgtgtttcaggatcttatgacgaaacggacatttggtaaaggacatgtatctgatgggctctatattcttgacgagtgggtacctcaaccagttgcgtgtgtcagtactgcctctcctgttgaagctcattgtcggttaggacatccttctctaccggtgttgaagaaattatgtcctcagtttgatactttactttcattagattgtgagtcgtgtcattttgcgaagcatcatcgtagttctttaggcccaaggcttaataaacgggctgagtctttgtttgagctagtacattctgatgtttggggtccgtgacctgttacttctcaaactgggtttcgatattttgttacctttgtggatgatttttctcgaatgacttggatttattttatgaagaatcgttcagaagtattttctcatttttgtgccttctctgctaagattaaaacccaatatgatgtgtctgtgaaaatattaagaagcgataatggaaaagaatatgtgtctaactcatttcagaattacatgagtcacaatgggattcttcatcaaacatcttgtgttgatactccttctcaaaatggggttgctgaaagaaagaacaggcatttacttgagacagctcgtgccctcatgttccagatgaaggttccgaaacagttttgggctgatgcagtttccacagcttgctttctgatcaaccgtatgcccactgtagtgcttaaaggtgatattccgtacaaagtaatacatccatagatatcactttttccactggcaccaagaatttttggatgtacatgctatgttagagatacaaggccttttgttactaaacttgatcctaaggtgttacagtgtgttttcttggggtactcaagactgcaaaagggctatagatgtttctcgcctgatcttaataagtatctagtatcaacggatgttgtgttttcagaagacacatcatttttctcttcacccacaagttctgcaagtgaggaggatgaagaatggcttgtgtatcaagtggttaattcaagaccaactgttgggcaatcaagtgtggtcgattctgatgcatctcttgctcattcgggccctgttgttaatatttctcctgctccagccaaaccaccaattgttcaggtgtactctcggcgcccagtgacaaccgatacatatcctgcaccagctccttcgtcatctgatccttccagtgatctcgactttcctattagccttcggaaaggtaaacgacactgcaaatctatctattccattgctaactttgtgtcttatgatcacctgtcatcttcctcaagtgtccttgtagcctctatagattctatttcagtacttaaaactgttacagaggccctgaatcatcctggttggaagaatgcaatgcttgaagaaatctgtgcattggaggataatcatacatggaaacttgtcgatttgcctcaaggaaagaaagttgttggctgcaagtgggtctttgcggtaaaagttaatcctgatggctctgtggcacgattgaaagccaggcttgtagctagaggatatgctcagacatatggagtagactattctgatactttctctccaattgccaaactcaattcagttcgactatttatttctattactgcttcccaatagtggatgatacatcagttagacatcaagaatgcttttcttcatggtgatctagaggaagaggtctatctggagcaacctcctgggtttgttgctcagggggagtatgtgaaggtttgtcgtctgaaaaaagctctctatggattgaagcagagtccccgtgcttggtttggaaaattcagtaaggagattcaagcatttggcatgaacaaaagcgagaaagatcactccgttttctacaagaaatcagctgctggtatcatacttcttgtggtctatgtcgatgatatagttattacaggaaatgatcatgcaggaatctctgatcttaagacattcatgcattccaagtttcatacaaaggacttgggtgaactgaagtatttcctgggaatagaagtatcaaggagcaagaaagggatgttcttatcacaaaggaagtatgtgcttgatctgcttaaagagaccggtaagatagaagcaaagccatgtactaccccaatggttcctaatgtacaacttatgccagatgatggagatcccttctacaaccctgaaaggtatcggagagtggttgggaagctgaattatctcatcgtgacgcgaccagatattgcatatgcagtaagtgttgttagtcagttcacatctgcgcctacaataaagcattgggcggctttagagcagattttgtgctatctaaagaaggctcttggtctaggcatactatatagtagtcagggacacactcgcattgagtgtttttctgatgcggattgggcaggttctaagtttgatagaagatccactacaggttattgtgtgttctttggcgggaatctagtggcttggaaaagtaagaagcagagtgttgtatcccattcgagtgcagaatctgagtacagggccatggcataggctacttgtgaaatcatatggatacatcaactcttatgtgaagtagggatgaagtgcacaatgccagcaaagctttggtgtgacaatcaagccgctcttcatattgctgcgaacccagtctatcatgaaagaaccaaacacattgaggtcgattgtcgcttcattcgtgaaaagattgaggaaaatctagtctctactggctatgtgaagactggagagcaacttggggatatttttacaaaagctctaaatggaactcgagttgagtacttttgtaacaagctgggcatgatcaacatctatgctccagcttgaggaggagtgttagctgtatatatctgtacataccataatttggttgtttccttagggataataccttcctaattcaggactctcaattgtatatataaacaagtattattcatctaataaaatacaaggaattgagaaataccttgattcagttacaattttaaaatcaaatgtttttctcaaaagataactttgaaaattttatgttaaaaaaaaatcatttagagtcctcaggatcaaaatctcattttttaaagtaatatgcaaccatacctcaatcgcttcacatccttcttggttttcaataaaaattttgattttgaacaaaacacgtatcaaagtttgtggtcccaaataaatgggataattctaggctaaattcgtgtatatcaatggggaattggtgaaacccccacataagaaaatcttttcaaaatttatttttgctaccacatttgctacttgttgtaatcatatttatatctatttttttttaagaattgaatacaaggtgtgtgtgataattgattatttcatatattttgatcatttttgttatgctaaattaaataacaagcatgttaggatttctgcactttattatttattatctaaccccccatgtcctgaggaagtttattatgagttatctatgctatccaggtatgctccctaatacccactttctgaattctgtaaatatgattgtcattatgaattatacctatatttgatagtgtttgggtgtcttgacattcgttacattgttcgattatttatgatgaagtgcatgttgggtgatataccatctaaactaacctttgatgttttgtgatagagcttaagaagtggttcaggtacgcaccctaactctcctttattgtgatttgatcttgtttgacatgctattttttgaaatcacctagcctacttaggtatctataattaaccaattaattgtcacgtttccttcaacttagtcagtagagacctttatagggcttagaggagtgctacctttcaaaggtacattcccaataggtaacctgatcccaaaacctagactaaggttttttaaagacatgctttttccaaaactatggagtcatttttttagggttttatttcttattttatttttcctttaaaataaaataaaataagtggcgactccaacttttctaaaattaatttttcacaaataaaaagcgagtctcgttgataatgcgggtccacagcatgatttagttaatagaaaactcttatgagtaagaaaagatctcttcttttagatttttgtgctcaatctctaaagtgtatatactatatatgcagaggtttcattcaagccatcatcttaacaaaagattctccttttgtctttcaagttttcttccccccctttttttttcttttttcctaaaagagatctagccaatgttgtgtttgtcaaatgctccaaatcgttttttaacaagattcagtaaacaagtaactctttattttggataagagttacatggcatgcgattcaatctatcgaataaacaatttgaagaaagttttttgaagaataaagattttgttgtataggtttttgcttttctttacactatcttcaagacatttgcattattttcaaactagctagcattgtgatgatggttgcagttaatgactggttggtaagatgggaaatagaccattggttatgaataacaattatgcacatatctactaatcatgaagaatgttagttacgaagtatttctacaataaatgattgtatctaattcatgtttggacagtaatatatatttctacaaatcttcttaaggatatctttgattaatatataaattaatgtttaatacaaaaggaaatgtggatgggattgttcttgaccaacaatggaaagacttgattagagaggataatgggagatcctttatttcaaaagtaggtacgtagatgatggagggatggaagtgtagtgtcctataaaacaatttaatagacgtgtttaacgtgggaggaaaaaaagttaaatatctcatcacatcaattgattaccaatgttggttgggtcttatctatagagctacccctacctcccatatatctcatcacatcaattgattaccaatgttggttggtcttatctatagagctacccctacctcccattagtttcagtttttgggatgtatctggtccaacactaacacaactagagtgtatgacaatgtctggaggttaatcgtacaagttgtaaatcttgatctttagaaaattccaaatgtgggcttaatgaacataagatctatggacagggcttgcaaacgaccatcgattctttgcacaattgtcatattttaatccctttaatctataaggaatttggagaatagctagcaacaatcttttgattagaaaatgtcttgcaaggtctaaaattaacacatatccagaattgttcatgggttacttgctaattatctgaaaccctattatatagaaaggttaaaggagggactggaagttattcaaccatggctgtttatatatcctgctatgaaaagaaactcatagatttcttatctgcatgattgaagtttttggcagtatctacaacatgtctaataaatttattgtactaattaatgctgagcaaccggacagaagcatcttagcttgaatgaaaactcaaggtaccttattgctaataaaccaagaagactggtcgagccatctactttacaaattgggtaaataaagattaaagaatgagatcaaggataaaaatttctggtagaactattccatgtcggctttaagaagatccaagggattatgtgatatcatatacttatacgctaattaatgactcattcaaattaatacttacttgtgtctagatcttgaaaacttggtcattgttaattagtgcttgtggcatgcgacttataaaataatggaccaggattcatcagcaaaatcctataaatatacagcctgtgatctgtatgatcaagagttacggaccaaaaactatggtatatatgatgattgtactaggtcccttatcaatatcgatatccatgaaaatatcttatcctttgcttctagctttctctatatatagagagttccaaaagcaaactt

SEQ ID NO: 11920 - DNA, 2977 bp, Vitis vinifera
  Intron number 1 from transcript GSVIVT01036463001 (locus G SVIVG01036463001) derived from phytozome v7.0 (chr-ID chr1 4; pos 22347070 to 22350046 reverse strand)
aacactttaagcgcaagttctaccagcgttatatcgtccgtacacttcctcgtctttaacccccttcttttgtttagtttcctttcacttgtccatacatctagatatgcctataattgtgtatgcagatgtgtatttgtgttgtatgtaagtctttatgtattcttcttgatcctatgagatttttttctttggactcttgtatgcggtcgtttggagattcctatccgggtcattacggatttctggggttttggtttctagcaattgggttgagttggattttattttttcccattcattacttcccactgtttctgtttctgtttctgtttttgggcacctgaagtatcggttttttcttttctttatatggcttctttgaattagatcgtatctctgatggatttctttcgttttgtctgtcttccatgtgggtttcaattctctgtcagtcgggtttgtggatttttttatttttggacctgttcttcatgattttattggaattagagctacaccttgttaatctcatctcacctgttttgggtttttgtttttgggctttgattcttggaatctgaaatgagggttttagaaatttattggcgcatttgaaaatatgaaaattttcattttcttgtttgtgttcttgattttatattttttgtaacggttgaactgaaagtctgattgagttttatctttttatttgtttatttcccttagccttcgcagctttgattcttggacttttaaaataggtatttgtttgattcattttccataacgtttagtatcatagtttccgtgcatatatattttttgattgtatgaatctagtggaactagaactgaacccaattgagtctcatttgggttttatttcttccacttattgtacttgattcttggacacaagattggttttccatggattttgtttttgtgctgctgagaaattctttactcttctatttttgttttaattttttttttttgtagttttatttcctatatttcttatttttgcagttttgaaattttttcttatttgtttttatggttgagaatttggtctttgggtttctttgatggttttacctctgattgtgatgctgcttttggcttcttcttggtaagctgttaccttgggattagaaaccagcataggtagcttcccttctccattataggtttggtggttgacctctcaggttttggattttgatttcatagaatggcatgttgtgattctcaaagtcagcttatgaggagttcgtgtgttatcttcttctcctcattcctttgagtgtgcccttatatggatttcaacttgcaacactcttccctcctaatttttttcccatgtttaatccacccaacagtttgatttctggacatattttttagagtagatcttaaaggtcttactaaaaaaaaaagatcttataattgtagtgcagatatctcttttttctattgattttggttctttttgcactgaatgtttctttttcactttgaaaacctgacacttcagataagtgttgtgcttggcctgcctttaaatccatatatttgagtcatgatggtgtatttgaaaggcggagaatcatcccaccgtataaaaggataggactcctggtattagtattaaagacctttgcatgatttctggtttcctgtggatggggtttcattagatgaagatggctttcctgtttagtgttttcattgacaggttgctgttagctcagggaattttttatttttttatattttttttcccgttttttcaattttctttttcttggttttacttagggagggagtagggggagagggttctgggtgtgtcctactgggttcgctttgctctggcaccttttaattctcctcttctctctttttgattcttcgtttattcttactgcaaacttggtgctgcttgttgttccagttctcgatgttttcttatgaaactaggaaaatcctttcattttaatctggaatgtgttcccccccccccccccccccagggaggggtgtgccttttaggttttaagtttaggcatttcacatgaacttcatggttctgtttttgaatggttgagaattcccattcacttctaaaaagaattcccttctccaaattttcttctggcaaactctttcctgttttcattcttctggacattttttttattttttatttttattttcttgtgaaactagaaattaaacttaaaattgttttggttttccttctcttatttgtgcttgctttctgtgttttatatttggacttccatgaattagggttctgttattttattatttctccaagtagttcattgttcatctttttcccttgctttagattatgtccttgtatcgggtttcaacatcttttctttccttttactaatatatctattctttttatacatgctcgtgaattgggaattaaacattaaaatcttgtttgaatatctgatttaacatttgcttctggatctttttatactttaaattgtaatgctaagattctcaccttttggttggaaattttctccctagcttcctttgaaaacggtttgggtactttagtgcatcttcagttagtgcatttaatatatctattttgtgttatatatattgaaattattgctttgcgtgtttcaaaaaatggggttaactataggtttgtggaaagggaatgggtatttgaatacacaactatactttttggggtttaattatatcatggagttaagagacacatgcgaactcatgccgtttgcattctaattattatatgggcctctagaggcttttggaaatatgttgttttaatttggcatgtttctgctactcatctagctttatcttaccttttgttgcttagacaatgattctctgatgatccttcactttgtttggaaagcaggatcctgagcttgtggttgaggca

SEQ ID NO: 11921 - DNA, 5257 bp, Vitis vinifera
  Intron number 1 from transcript GSVIVT01009706001 (locus G SVIVG01009706001) derived from phytozome v7.0 (chr-ID chr1 8; pos 10651514 to 10656770 reverse strand)
tgtgttgtttgattatcataaatcctcttccaatagtcccaaaatcatagtatacaacaaccatgagcacaagaaaagatgcatgtagagcattttagtattttactatgaaacaacgagacacatcacccatgtaagcaaacatacatacacttcccgagtttgtatcgacttcctcctccttcgccattcttttgtttcacataaaataattccccaggacgaaacaaacgattaagcttgagtgggctttaagcccactttctctttttgcactcctcatcgaggacgatggaacgacaaaagcatgtgagcggcaaagggatcaaaacccagagcagaaggttgagagagggctttcgatcatgtgttcttgtgtagcctatatacataaacatgtaatggagaatattagggattggcttaactactcttcctgggcttgcttttccgcctcgctctactctttgaaccctctttaaacagccccctttcttcaacagaagttgatgattcctccttctttaccacctcttcttcctccgcccgcttcacctcttcttcctcacctgtctttactttctttgattcactttctatgccgtgttctgctttttctgctgtttcttctgccttgtgtatgactttgcgaggcctacctctctttctacgagtctcagtctgaggctgaggctgaggctgctgctgctgtttctgttgctgttgctgcgtttcttctcctgttgatgaagcttccgctattgctactgaaagttgctttgtttttctgaacctcttcttcttcttccccatctattcactttctatcctgtatataaaaccaatacacggtgatcatccaaacacaaaaaccctaacgatctttcgtgttttacatccgttttgcgattctgtcaaatcaaaaggaatccaacatctagataggaaaaagaaacgccatcagaatcatatctctcaacctctaattcaataactcaacaacagcagagcttcaagcccaacagtcaatcctctcaactttccccccttcttttaggcatccatccatctctattatatcccactccttccctttgttccacaagaaaagacaaaaggagagaaagacataactcataaggtggagatggagggggttgaatgtaaaccatggttagacttcaacccaggtcctttatatatgtctgtatgagagagagagtgtggggttccgagttggtgtataaaggctagggtagtctaccattggtcaatgtttcagtctgaccactggagctttgacgtcgttgtgggtgtgggtggggtggatgtggagtagaagtgtggaggtgtagaagtaggtgccccgctcaattcacacttacggacgcattttggaatctatgatctatccaacactcccttgcgctggacttggacctcttgctcactcctgccatccccactcttcttcctcccttgcaaagggagcacccgcaccgaagtccattgataagtacttgtgtcagaaaagtccactgtccacccaacataatttggtatatcaattaattacttttaaataatatcattcaaaaagatcaaggaacaatattaaagagatacaaagaagggtctttttgatcttcaaaatatacttctaaactcttaagaataagttttgaggccctttcatctatgcattcaaattgtcaagttgaagcattcatgtcttcaatttacataccaaccaaaagttgcattcacgctttcatcaattattcaaattgaaatcaagctctagaccccttggtcaatgttttccaagttgaagcctaacgcccaaatcgagatcctaatcgtcaaatctaggattatgccttcacattcccaattacaagttgagcaaagcgttaataagttaaagcacaacttctctccaagtttaaatcgagttaaggcccaagattatcaaggtttaagtcggcccataggggaaatcaagttaaaactaaagtcagacaaatttataccaaaactcaaatcacatattattcaaccttaaaagtaattaaatatttctttgaaaatgggtacgcctcgagtccaaacactcgaaggctcaatttaaggcccaactcatgttaagacctaagctaaaccaatatcaaccttttcaaaatttcaatttgctcatgaaacatttttattgaagagaaatttatgttgacatccacatgcacttgtaaaatttgtccccttttatttttattttttttattactttagtttttagagttgtgaagcctgacatctaattcacatggggtgtccaggcgtgccccagggcccagcgccctaaccacctttttttagtttccattcataattatgaattcaatatcaatgagcgtgatcagtaccacctcttaaattctgattcatgaatggaagagcttgattaatggttacacgcttatttgggcctgcagccacccctctgacgggaagtttcaagaaagggggctggaaagacaaaggattttccatggagagaagcgcacgcccccgccaccacccccccttccaagtcaacttaccgcaatccaagaaccatccaatcaacatttttccatcattgctggttgattttacttgattacaaatagaaaaccataacgaaggaaaagaaaaggaggggggagaagtgtgaaacataagaaattcgcggaaaatccagtgtatagccgccggggactttttaatatcttgatgggcccgatgggccgcaatattaatgtgtggtcgatgtcttcgtgggggccaattcatgtttgactattcagtataaataccaggaaatcttcttttaaccctatagctgaagtcccggtcccaccctgattcctgtgtcctttgttttaatatagttgaaaagagtaggattagttacttgcctaattgcgatattgaaagaaatattcaacccaaatggtgaaataacgtgggatttgagaggtgacccatatgatataatgaggattttgaattaggcttcccaaaagtcaattccctttgaacatcaaaatgcttcatacctctccctactcttgaagtttgttgccccaaaaccatctcttttatggtctgtgtgtgtgttttcatgtgctgtggtacttgtcaagcaacccaccctttcgtttcttttcatcagggaagcaaatccatacttcaatgtttggatggtaaagtaaaaaatacaggaagaattatgttttaggggtagatggaccccaaattaacaaaaggtccgtgtaactctttaaattgagcccaagactcaatgaaaatatggaaattgagttgaaggatattatccttcagtagtttcaaaaataccctttgttgattttgagaaaaaaattaatatttttttaaaataattttatttaatttaatatttttaaaaaatatttttgatttaatttaatatttttaaaaaatatttttatgtaatttaatatttttaaaaaatacttttatttaatttaatttttttaaaaatattttttatttaatttaatattttaaaaaaatacttttatgtaatttaatatttttttaaaatagttttatttaatttaatatttttgaaaaaaaattatttaatttaatatttttgaaaaaaaaattaatttaatatttttgaaaaccacttttatttaatttagcatttttgaaaaaaaaattattaaaaaaaattatttaacttaattttataaaatattttatatgtgttcttaaagggtatatttgtccgttattatttcatatccttcaactcaatttgaagagttatatggaccttttgttaatttggggtccatctacccctaaaacataattctcctaaaaatatatattagataagatatgtttccaccattacacgcttctaaatttatccaaatttcatgttaatttcctagccatgtgcgtctcatttttcttcttaaattggattagtcaaatatgcatctaatttattgacttatttttattttaggaaaataattttatagggataaggactattaatgcttgtggcatacgttaaatactacaatgacaaatcttctagtcatcccgaaggcccacgaaatcattcataatgtctttgctcatctttacatgggtgccggacacgtatacccgctcccgcttgagggattggggcctggtggggattgtccaggcctacgaccatatgtccgatgatacaggatgagttgagcgagatctgtcctccaaatttgtccataggggcccagaatcgagaaaagagaaaggcgttacagtggggcggatcgtaaatgggcttaaagaagaaggcaagaagcccatgagcccataagtccacgtgaagcgtaagaaagcatgtacatccctttcaaggacaagacaccgacctcgtgaatgtgaatttggatggttgatgattgatggtgtgtttggataagatcataatattcatccagactccagactccagacccacgcccactctcccccatttccccaaacatcattttctctatttattcctcaaactcccctccatcacccatttctaatatgtcttcgttttcattcacatttcctctctaatcgttctattctaagcaacaaatttccattttatattttgtataaacgtgacatttggtgacttgggtcgtcccccttgcttcgtgtttctgaaccacaacttttgggttgggataaagacctttgaccttcgaatttgaaagcgatttcagaaaccatttgcaaataggatttaattatccgcatgccgtggatggaagattttctcagtaagtttctcatttttttttgaaattgtcttaagtttttgtgtggctctcacttccccttctctacgatcaattttccagggagagagagagagagagggtttttggcttcttgcgtgacgtgtgtattatatggtaattgccggcagttttgttatcattgttagatgcagtagggtatttcgtcttcgtttttgttttgtagtttccacgtggacatggagaagtcacagtgaccaactgtttactccttgttttatttttttattttaatattttgatttatttaatactgatatttcctttattcaaaaccatataattcaataaataaaaggacaaaaggccgacttcatctctgctcggcttttgattccggc

SEQ ID NO: 11922 - DNA, 8986 bp, Vitis vinifera
  Intron number 2 from transcript GSVIVT01014271001 (locus G SVIVG01014271001) derived from phytozome v7.0 (chr-ID chr1 9; pos 2207523 to 2216508)
agaattcaattgcatagaatacatgttgacaattaagcatgcatttaatagcaaaattcagtccgttaccttggttcatgctttgagaagtcatttctactccctttgatatccaataatctgctttccgggtgcgtgatggtccgagaatgagcgatcaatgaactcttcccttgtctcccaaaattcagtccaaagtggagtgtgtgagtgtgtttgccgggagagctctcaaagaaaagaaaggatgctcaatcgaaaaatgcaaacacatctctatatatatatatatatatacaaataaataaataaataaataaatatatatatatatatatatatatatatatatatatatatatatatatattgcacattacacactttagttggatgacttgacttaatgggccagtcaagtgaattagggtgagcccataaaaaatcaagcaacaatatgtatccagtcccattatggaccacaatgcaaaaataaattaatactgatttatgatattatcaaattaattatgtaagtccacacataaaaattccaacaattctcccacttggactacataatcaaacatcacaacatatacataatcataaatcaatgtcccatagaatctcatcagaaataaataatcaaaagcaatcatatatgtttcattgcttgattcatagggaaatgtacaataatagcaatcctttcaacaataacatagtattacaataccaaaaaatggctcccactaacttaatacaacctaggcttccaacaaccccatttgagatacatgttcctgaaacgcaattatgggtaagccttttgttaatggatccgccaacatactttttttggacatgtgttcaatatcaataagagactctgccactttctccttaacaaaatagaactttacatcaatatgtttggagcgagaaatactcctagtgttcttggagaaagcaacagctgcggaattatcacaaaataatttcagcggtctagaaatggagtcaacaactcctaaagctgaaacaaaattccgcatccacatagcatgacaataagcctcataacatgccacatactctgcctccatagttgaggatgctgtaagtgtctgcttgacacttttccaagatacagctcctcctgccatcataaaaatatagcccgtagtggatttcttatcatctatgcagccagcaaaatcagcatcacaaaacccaactacatcaagtaagctggtgcgctgatatgtcaacattaagtccttagttccttgcaaatacctaaggaccttcttagctgctttccaatgttgactcccaggattgctcaagtaccttcccaacatgcccacaacaaaagcaatatcagggcgtgtacatacttgagcatacataaggctgcccaccacagatgaataaggaatggtcttcatttcctctctctcatcatcattttgaggacactgagcctttgaaaatttatcacccttcacaattggcgctttagtagatttacagttgtgcatattgaacctcttcaatatcctttcaatatatgctctttgagacaatttaagcactccattagccctatcacgaagaatctttatgcccaagacataagaagcctcaccaagatccttcatgtcaaaatgggttgacaacatgtgctttgtctcaatcaacaagtcaggatcatttgatgcgagtagtatatcatcaacatataaaacaagaaatatgtaactactcccactgaccctcaaatatatgcatctgtcaactgtattttctttaaagccattttgggtgataatcttatcaaacttcagataccactgcctcgaagcctatttaagaccataaatggacttattgagcttgcaaactaaatcttcctttccaacttctacaaaaccaataggttgctccatatacacctcctcatccaaatcaccattcaagaaagctgtcttgacatccatctgatgtagctccaagtcaaaatgagctactatggccataatcattctaaaagagtccttggtcgacacaggtgagaaggtttctttgaaatcaattccttctctttgactataacatttaaccacaagtctagctttatatctctctattttcccactagaatcacgtttggtcttaaagacccacttgcacccaactggtttacaaccatgaggcaattcaaccaagtcccaaacaccattcatatacatagaattcatttcatcatccatggcttctttccaagatatgaattgaggacaatgaattgcttcttggtaagtgactggatcaaaagcatcataactatcatactcatgctcctgcaaataaaccatataatcatctgaaatagccgacctacgaaccctctgtgatcttctcaaaggaacctcattaacaactgtatcatctacaggaaggtcggattccacttgatcaccatgctctccttgattagtggttggctgttggacaataggaacatccatatttagaacatgagatgtaggaaaatgaatcacaacatgctcttctccaaaaggtatctcacgaggcataaaatttggatcaacattaacttcatcctcaaaatatacagccctgtctgattcaatgatcctggtggtatgagatggacaatagaatctggaaccccttgatccaatgcaatagccaacaaagaaaccactaatggttttaggatcaagtttctttgactgtgggttataggccctaacctcagccttacatccccaaacatggaaatggtgaaggccgggtttctttcctgaccatagctcataaggtgtcttaggcacagacttactgggcacttgattcaaaatatatgccatagtccttaaggcttcaccccatagaaattctggtaaagaggaattggacaacatgcacctcaccatatctaacaatgtgcgattcctcctttctgcaaccccattctgttgaggagtgcctggcaatgtatatttcgcatcaatgccacattccaacagaaacttagcaaatggtccaggattccgtccagtctcatcatatctcccataatactcgccacctctatcagacttcacagctttaatgggctttcccaactgcaactccaccttagccttaaaggctttgaacacattcagtgagtcagatttctcatggattagttcaacataaccaaatctagagaaatcatcaataaaagtgatgaaatatttataaccccctaaagcagttggtgacaaaggaccacatatatctgtgtggatcaagtctaaagtacttccacacctatcaatcttctcctttctggtctttgctgtcatcttcccctttaggcaaacaacacaagtttcgaagtctgagaaatcaagattagaaagcacaccatctttcaccaatctctctaatctttgcctagaaatatgacctaggcgtttgtgccacaacatggaagaactcaaattcattctagcacgcttgcaaccaacaacagaattaacagaggatgaatcacataataaaccatgatgcaaactgagactataaagatttccaaacaaaacaccattgccaattaagactgagttgcaaaaaatatccacttttccacctccaaagtgaaaagaataaccatgtctatccaaagaagatacagaaatcagattcctcctaagtgagggtataaaagccacaatgtgtaacaacaaaaaactttctgtgatcaacttcagctttatcatgccaaaaaaatccactttcactttgctttcgtcacccatatacacacattcttcatgctttgacagcttccttctgtttgtcatctcctacaaagaattagtgacatgaatagtggcaccagtatctaaccaccaagaattggcatgaacatcaacaatatttgtctcaatcatgtttgcattcaaattaaccacaaccacaatttcacctttctttttcttctctagccaatttttaaatttgaagcaatcaacttgcttgtggccaatcttatggcaaaagttgcacttccccttgaatttctcactctttgcagcattagaagaaacagatgtgttggaggttccttgatttgaattccctttcctcttgaactgcttagagcctccaaaattcttgtgtggaggttttttcatcacattactggcttgatttgttacaagagcaagggagtgagtctcatttttcttcagtgagacttcatgttgcactacaatggacatcaactcctccagagtccattcttccttcaaggcattgtaagtcaacttcactgcatcaaaggaaacaggaagagactccagtatcaaccatttcagaaatttttcacccaactccactttcatctcatttgccttgttgaagtagtgccttagcttgatgatatgatccctaaccccactaactccatcatatacagtagttgtgagaagcttcaaatgagttgccatttcagccttatcaactttggtataattggccttcacatattccaagaagtctttggccctttccgtctttggcccgcattctttgatagatttatccatagtgtatttcatcaccatcaaacaactcctgttggagtgctcccatctttcataaaataatctttcatctgcagagctcacattagtgagcttacttggctcatcaaccctcaaagccaagtccagattttgcagagtcatatgcacgttaaaggactcaaaccattcttcaaaattatttccagtaagaggtttgatggcagacaattgaagagaaataccaggattgctggtagctggaaaatagcaaaattcaacagtatgcatgttattacaatatcatgcatttgctaatttccataatttctcaatttagcaatagcttggaattttaaaaattccacagcggtaaggacaactaattaaatattacaaccaagatgtactaattttattaccgaaagggcaaaaaaaattagtacggttgataatatacaattaatttccttcaccaatctaagcatcctaccaagcattgttatcatcgataggacaattacaatacacgtatggatcttagtaatcacaataataaaacgattaaatgtgggagttaaattatctcagcaaagacaatttgacacatatagggtcacgataggcaaccacatatatgttcacaattgtcatgaataaaattcaaaatgtcttaattttcacaatttgacacacttggaattgcgataggcaatcacacaagtgtgcttcattacctcaataaattgaaatatttaacaaaattgacataggacaacattatcgatataaggaaaaattataccataaagaacaataataataataattgtcccaataaagtcaaatttaacaaatgcataataattctagcatatgcacaatcaatccaagaataccaaggcaacaaacaaacaaacaaaaaaaagtttttttatgacgtcatgatgacgtcatcacatcactattcatcttctcctccagctgagcacggcctggttctggagaagaaaaaatatatatttccgtccaaaatttcacgcatttttcgtcaaaaatacatagatttccatcctcaaacatcaatttttcaatccaaacccaaaaaattgcacaaaaaacggacaatagcaagaaccaaacaagccctaattttcgaaatatcatcaaatgagctccaaaaatcacaaaatttgatgggttttgctccaaacaatattctctacaagtttacaacaacaatcgggcttgaaaacagagaatcaacatcaaacgagaaataaaattccaaaaaaattgcttccacaacaggaaacgggaaaccaaaaaattaaccgaaaattgcagctcaaatgtcaatcatgcttgctctgataccaattgatgagaattcaattgcatagaatcacatgttgacaattaagcatgcatttaatagcaaaattcagtccgttaccttggttcatgctttgagaagccatttctactccctttgatatccaataatctgcttttcgggtgcgtgatggtccgagaatgagcgatcaatgaactcttcccttgtctcccaaaattcagtccaaagtggagtgtgtgagtgtgtttgccgggagagctctcaaagagaagaaaggatgttcaaccgaaaaatccaaacacatctctatatatatatatatacaaataaatatatatatatatatattgcacattacacactttagttggatgacttgacttaatgggtcagtcaagtgaattagggtgagcccataaaaaatcaagcaacaatatatgtccaatcccattatggaccacaatgcaaaaataaattaacactgatttatgatattatcaaattaattatgtaagtccacacataaaaattccaacagaaggaggccttgacgagccaaagctttttgagcaattatgttgacaattttgttgggcaattgcaaggacttttggatcataaatgatttcccctggagatggaaatgttttagcatctatcattttctgtaatgttgtttatctggtcaatgaacgaaagaggagagagatttaaaaatgtacatctcataccacctaatgagttttgtgctaaaataactcaattcatgtcaagaaatataagttttaactccatttcaaaacttatattcaaattagtctctttcttccacataggaatggcattataatttttattttcttttcaaaatttaagttgaagtctttcgattattaattgagacttcattttttaactaaacccttaattagcaattgagtcttcagttttttttttttaacttttaaatttaattaaaaatattaaatttcatattattattgaaataaatatatcctttaataataataatttatatatttaaaattaaagatctaatattacttcaataaagataaattgataaatataataataaatgaatattttatttatcaataaattaataatcttaaaataataagatatatgacatataaataagatataaaattatataatttattaatttaagatatttaatttgttgtatttttaagatattaatttatttgtattttgacaaatttatttttattgaaataatagtatattcttaagtttccgtatatagattttttattattttaaagcatatatttataatttaacataaaataaaataaaataaaataaaggctactatttttacacaatatatataccttgaatatacattttgaaattagttaatgaaattaattagaaaaaatctactaaaaaatataatttttaatagttttatcaaagtcacacaaaattacccattaaacatttatatagtgaaaaaacaaaaatctctcctccgtaattatagcaagtattacatatgatataacttaaattaataaattatataattttatattttaaaaatacaataaattaaatatcttaaattaataaattatataatttcatataactttattattttaagattattaatttattgataaataaaatatttatttatattatatttattaatttatctttattgaagtaatatgagatttttatgcttaaatatattaatttttattattaaagtatatatttttaatttccataataatttgtaatttaatattttaaattaaattttgaagtaaaacaaaaaaaattaaagactcaattcctaattgagactttagtttaaagtcatgaagtgtgaagaaagtgtagagatgattttccattttttttataaaaaaaggaaaaaaatgttgtagaaaagcatatttctaagtaataaagatagtagtttttcaaataagagtgtgtttggaaataattttagaaagtatttttaatatttttaacatttgaatgataaaaatttttaagtattagaaatattaaaagtactttctagaatcactaccaaacgggctcttaaagtaagtttggtaatgattttaggaaatgtttttaacttttttaatacttgaaagataaaaattttcaagtattacaaagactagaaatacttcttaaaatcattgtcaaatacactctaaaataccttcccaatatcacctacaaactaaaggtgaggactataaaacttcttctatatcgatatttttccttgaaattcaataaaataaaattacagaaaaaatatttataaatattttatattataaaatgaaattgcaatatacaatgatgaaagaagacctaccaccctcttgtggtaagtggcatgaggtgaggctgtggaatcgactaccttgtgataatcatgtcactaataaaaagggaaagaaaaaggaaatctaataaaaataatcttaaatttaataaatatcttttaaaaggagaagtttgaaaacatgtgaaataattcaaaatagaaaattattactatttttgctactaaggccatgtttggtttacaactttagttgggaattggagggaagtctaatgggttcaaggaaaaggaagagagtaatatatatatatatatatatatatatatatatatatatattacaactttagttaagaattggagggaagtctaatgggttcaaggaaaaggaagagagtaatatatatatatatatatatatatatatatatatatatatatacccaaaaaatgtgtgttgaatttgtttgtatattttcagtcaatggtcaatagacctcagaagcaaagagtgagacttggtgagcaggcctatccacacaaattattataccgcatgaatgccaaacctctaaattgcaccgtcttcattcaccagccatagcccaagccaagttacagtgaaaagacagggcc

SEQ ID NO: 11923 - DNA, 19456 bp, Vitis vinifera
  Intron number 2 from transcript GSVIVT01026088001 (locus G SVIVG01026088001) derived from phytozome v7.0 (chr-ID chr1 8; pos 24740226 to 24759681)
aagcaagatatttagcactgttggaagaggtattgttttcttctgatcttatctttgcatgcttgaatttttcattttattttttttaaggatctcatatgctattattgataattatcttatcttttgtcttgaatgtttttttagggcatatcctatgtatgtgtgttattttttaagcttcatctaatgcttagtttatgggaatataacgcttatagattatttcataagggtagcaaagatgtggttctatttattacttttttattcttagtttggaagatcaacatgtacatatgcgttaggcttaaaccaaaactagtctttctatgcatgaatgatataatatgatgtttagtgaagggctttcttgcatcgtatttgaaagtatcgacaagtatctacaaataaatttgtctatgtcagttcaatctctaggaaatctaaattggttattgtgtatattttaagtgtattggtaattaaagaggaaattgtgatttttccaagtgtgtattactaggtgtaggttgggggagttccatggtttggggggctcctgttaggggcattgcaactcgcttggtggttggtagttgttaagaaggtgggtgtttgtttttattttccttctcttgcttgccatttggccttaattgtatacttcgtgtgtactttgatgagcctttttctaggcatctttaatatattctcctttttactataaaaaaaaaaaaaagattaaagaggaaaaccttctacaatttaaggaaaaggaccttcctttgccttagacaatttaagaaggcatccatctaacatatgaggaacatcttgtagaatttgaagaagaggcctccatctcacatatgaggaaccctcttttgccttgggaatttaaagaagtgatcctttgccttcgtaaatggagaggtgagaatccttcctatcaacctttgatcaagctcaatagctttttgtcaacaacaatagagcattatgagcacttaaagaatctcattgttgggcaatcgtaatcaatgatgcagacaaacatagactaaacttaaaaacatttggatgaacaaaatatccacttcctaaattattttgagcaaacttctaagcttatccacttcctaaattattttgagcaaacttctgagcttcattaaaagagtaaaatcattgaaatattggaaattgaaaatatactcctacttgaaatcctcttagaataacaaagaaagaagtccattattctttttcaacaaaataattctgtaatgtgattaaggaattcctaaatctacattgttgataggaaaaatgttaacatgtggtttgccactcttaaaagctttagtggccccttgtggaatggttgtagggattgatccctaatagttaagaattcctttgagcaaccatcattgttttgtaacaatatattattaaactttcaagataaaaaaaatatgctaaatgattatctttatctttaatatgttcaaaatgtactatatagccattacatgtaatagtatatctacaagatttaaactcttctagtacttctactttttcacgttgtttattgtaaaaagtaactatgtcaatttgttcttatagtgaaaggtttgtttaaaaacaacctaaaggtatttaaagcattaattattcccattatttccaagtctatatgcttgtgatcttttatttgggtagaggcatccatcaggaatagtgtggtgtatttagaatacattgagagattgataatgccaacttcaacattatagtgcaactatgtctttgacatattctatctttgtgttcaatatctgagtgcttatacttcatctcataaggatatggagttgctatacctatacctataatattgatatacctataatattgaaacttaatgaaaaaagttaagattataggcataattaataagaatttttctattgttaatagtaattgtaaacttataatcacgtgcttgttgtggtacaattatcttgtttttgaaatgataggaagatgccttagtggagggacgcatttataattgaagaatttattgatcaattggcccattgtttctttgatagcacatgaacatatctttcacacaattggcagattggattcgataattaaatactttgcatttgtcaaagatgtgttagcgcatcactagattgaccactacctgaattgcttttgaaaaagacatgttgttttctttcacatttactagccttagatgctcatatcgtagttcaataggtttcctgctccttgaggtgcatatcaacaaagtacaatcaatggaaaaacaaaataggtgtagaagctagtataccaaagataaaacaaaaatagtgtatgaatttagagatttggaaagattgttagagaatgtagagaaaattgtgcaataaataaataaagaaatgagataaaagattattattattattattttttggatgcattggaaaacaattgaaaaactagcaatttatatccgttgggtctatagagcaatttccacaagccatgtcttcaacctcaatatagcatggtgtgaaggattgtgttggcatgacaggccaagtcttcaagctcaatgcaacatggcatgaaagactgtcgacacagcctaatccttcaatgggctggtcattcaacccatttgacattagatcagggtttgagatttcagacaaccttcatctgcatgaaactttatgattataggcctatgcaaatactgacagacctatgtaaatactgacatcaaagaagaattaccgttaaggatttctaaagttctagaaactagttttattctaatttagtacagaaagttaggatcaattttatttatttgtgttaaaaaaaaggtgtttgttcctaacatatagtaagttagttgtatggtttgttagttcctattttatagctataatttagtacagatagttgtatataaatagatatccgtattcctatttcctaaatgaaaaaaaatattaagaatttttcattcttctttccaatcttgttcacagcatcagagctggttctttcccaagactagtgacttatttgcaatctagtttcttcaccagattatagaagattattcttctatttctttcatctgtttggaatgatttagctattaggagtaagtgaagatgaagtttctagagaaaatatgaaatctgataaaacaattctagtacaaagttttggagacaattattccctgcaaatcacctaacaccgattgaatagacaagaattcttgcaatggtctcaattcgtgaaacttttattagaggaaaagtgaagataatttaattgataggctcattataccaattcaattagaagatgatccaggtttttcattgtggaattaataaattctatgattatgaaattgccggtgtattctatggagcttgagattggacaatgctttctcttcttgtcaacctcaaaacaattgtgggatgttgtaagtgaaacctactcaaatttgcacaactcagcacaagtatttgatattgagatgaagacttgagagaccgagcaaggagatcagagtttactagctataatagcattctaaaatgtttatggcatgaactagacatattttatgatctttgttagaatatgcaataattcattgggatagacattttttctgtgattaactgtatatttacagctatattattcccattgatgtgttctgctatgtataggaagttaggattttttttcctagtttagaactttataggttaactagtgtattctatatatcttgtaatatttttttctaagtaacaaatcattttttttatcactctttcacaagtttacatggtatcatagccatttaggctcttaggtttactggcaaccttcattattattctgtttaggtagagttaatagccagcattttgtgtcctacttcatgaccttcatcgttgttaccttttccatttatttttctgttcacaaccttcattgttgttatttttttgtgaccacctaaaaaaatctcctcattcagctcctaccgtcatattctccttcaaccatgtttgaaacacctaagcccaccaacaccacttcattaatagcttctttcaccgcccaggcatccatacactctgaaaatcctactctgcaaatcaccacatcaaaactaaagaggcatccatatgctctgcaaatttctttgagaagcaatgggaaattcaaatatgttattgggacagcaaaaccgccacttgaaagtcttagctactacactccatgcaacctgagattagtaagacatatctactttttcccatggctaaagacatttgggaggttgttaataagaccgttcaaaggttggtttcacctcccaagtttttcagaacaagcaacagattatgaataccaagcaagggacttcaagtgtcacggaatactataactctctcaaagggttattgatggagttagatctctaccaaaacatggagatggagtttgctgctgattcaaagaagatggaaatgctggaaatgggacgagtctttcgatttttgttgggacaagtaatcctgaatttgatcaaggatgggaaagaatactaggaaaagacctttttcctgatcttgatgaagctttttcacacattcatggggaggaaagttgtaaaaaattgattggcaacaaaactgaaaattgtggaagtctttacaacagaaaattttgctctagcagtggctaaacaaaatcaaaatgcaagtgacaacaagaagtcaatggacaaggataaaatgtggtgtgactaatgcaacaaatcaagactaaagaatcccgtttgggctaattaagaaattattctggtgatatatttaaaatacatgtacaagaatacattatatagacagattacaaaagaatagataaggaaagaatagataggaaaaaaatctctacagccatacagatatttacagctagaaattatctctacatctgtacaaatatttacagctagcaattatctctacagctggacaaatatttataactagcacttaggataacagctcctaggatctcctgagattgccaacaaagatgagccatgtgttggaagctacatggaaagccttaaaacctgaaacaaattggcaacaaaggaggaaatcagcctactggattgggacaaaccaatccacaactgttgttgaagaaaaatcagcacaattggggattcaacaaatctgatattaagaagctgaaaaaattgaactagttggaggattctaatgcaaacatcaaattcaggttcaagttccatgactcaattaggtacaaaggcttcaatttcttttcaaaataactccaatacctggatcattgattcagaccaacatgtataaatttttttccagctacttaccatgttcaggaaaacaaaaaatcaaggtagctgatggatcattctccttagttgctggtgaaggatctatacacatttcacccaccttaaccttacactctgtctttcatgtcccagatttaaactataatctattgtctattggaaaaattacaaaagatttgaattgttcctttaaattcacccttacaggttgttaattttaggatcatttggggaatatgattgggcatggtaaattgaaagatgaactttactacttggagaccaaatggagaaatggaggcgaagagtctcaatgcctggtttcaacccacaaaactggtttgaaccaaatccttctttcgcatgaccatttagaacacccctcttgcctttgttaaaaaggttgttccctatcttgtttgagaaaataaacattagcaagttcgattgtgaatcatgtactcttgctatactcttgctaaacaacatcgcgtgagctttccaataaaagagattcaatttgtttccctatttggtttaattcatttagatgtttagggcccatctcatgttaccaatatttccagtgctcattggtttgttacttttatagatgattgcactaggaccacttaggtttatctcatgaaaaccaagtctgaagtgcccttaatttttcctacatttcataaatttgttaacactcaatttagagtcaaaattcaaacactgagatatgataatagtaaagaatatttcaatcaagagttgatgaattacttgagcaatgaaggcattctatatcagtcaacatgtgtcaataccccacaatagcatggagtggctgatagaaaaaatagatgtcttttagaggcagctcatgctctcttattccaaatgaatgtatcgaaatgctattaggatgatgctatactaacagttgcataccatattgatagaatgccgacaaaagtcctagaaaaccaagcaccagtgaagaaactcatgacactatttcccaactttcaaggtgaagaatttctgaattcctttattgattttttaggtacacaccatacacatatatatacacaaatgactgaataagaaaatatcaatctagcttgattctctcctaaaattaggaaactgaatcatcctaaatgatctctccttttttattcctaaaatattttcctaaattaaaaccctaactttgaatgccaaatttcaacactccccctcaagctggagaatatatatcatataatcctagcttgcaagttaagtcttcgaagttaggcctaggtaaagctttggtgaggatgtctgcggtttggtgcttggtaggaacatagttcaatttaaccgtctcactagtcaccttctctgtgatgaagtgtctgtcaatctcaacatgcttggtcctgtcatgatgcacggggttctttgctatgcttatagctgcttgattatcacacatcatcagaattggagatgaactcgtttgtcccagttcactaagaaccctttttatccaaatcccttcacagattccctgtgcaagagctttgtactcagcttctgcactacttctggctacaactgattgcttcttactcctccaggtaacaagatttccccagacaaaagaacaatatccagaagtggaccgcctgtcaatgatgtttcctgcccaatccgcatctgagtatacttcagtgtcacggttctctgtctttctgaagaatagacctttccctggtgtcatttttaaatatctaagaatcctgtagactgcttccatgtgttcctcagtggggctatgcatgaattgacttacagcactcactgcaaagccaatatctggccgagtctgtgagagataaatcaagcgcccgacaagccgctgatatctccccctgtctatcggtgtactttctttctcgataccaagtttcttctgactatccataggagtatcaattggtttgcatccaagcataccggtctccttaagaagatcgagtatgtattttctttgagagactacaattcccttccttgatctagccacttccataccaaggaaatatttcaaatttccaaggtctttaacttcaaactcttctgacaaatacttcttcaaattctgtaattcctccatatcattcccagatagaataatatcatcgacatagactatcaatatggccattttcccggcataagacttcttgacaaatagagtatgatcagcctgaccttgtttgtagcccagcttcaggactgcttttgtgaatctatcaaaccaggctcgaggagattgtttaaggtcgtacaaggatttttggagtttgcaaacctgattctttgccatactttcttcgaaaccaggtggtatttctatgtagacttcctcttctaggtcaccatttagaaacgcattttttatgtccagttgttgcaagcaccaatcttgattgacagccaatgagagaagaatcctgatagtgttcagttttgcaacaggagcaaaagtctcctgatagtctatcccataggattgtgtaaaccctctagctaccaaacgagccttgaatctctcgactgatccatctgctttgtattttatggtgaaaatccacttgcaccccacgagcctcttcccaaccggcaaatctgtgatagtccacgtcccattcttctcaagtgcatcaatctcatcttgtactgccttcttccattctgaaattttgaatgcctcttgtattgtgttgggaacctgagtatcatcaagagaagtagcaaatgctctgtaagatggtgatagcccttcatacgtaacataattcccaattggatgatctgtacatctcctaacacccttcctcaatgcaatcggcagagtagaatcatcaatgctgggaattaacagctctccagccctatcctcacctatgttctatttaggaagacttgaattggagtcaatatattggtcacatgttgactgtgatccgtgctctaattcctgtcttttcctcctcctgatgtaaacttgtaagttctcattagcaagttgtggggctataggttgaataggcatgggagattggatggtcacgggagaaggaacatttgtgtgatgggctggctagactgatgacggcatgggtgtggacaactcagtgggcgcgaattgggaaggatttggtgactctgagtgaaaagaaggtacaccctcaagaagagactcccaaacttgatgttcattcatgctctccccctgaacatgagatttgggatagaagaagacatgttcaaagaaaaagacgtctatggtggtgtaaaatcttttgttggttggagaatagcatttgtaccctttttgggttggagaataccctaggaaaatgcacttattggcccgaggagcaaatttgctacgattttgaggatacacatgaacgaatgccatgcaaccaaatactttgagtggtaaatcagaagaggctgcacgggtgtgaggaaattgttttaagaaaagttgacgtggggattgaaaggtaagcactctggatggcatacggttaatcaaataggtagctgtgagaatagcttccccccagaaatagtttggaacattagaggaaaacataaggcaccgggcaacctccaagagatgtctattcttgtgttcagccaccccattttgttgtggggtgtcaacgcaagaacttatgtggataatgtcgtgattttgaagataagtactgagactactagtaaagtattcctttgcattatttgacttgaggacttgaattttggaattgaattgattttgaaccataagattgaaggtttgaaaaatgtgtccgacctctgacttttctttcataaggaaaacccatgttacccgtgtgtgatcatcaacaaatgtcacaaaccatcgagtgccaaaaatattttttatccgggagggaccccacacatcactatgtactagagagaaaacagtcaaaggtttgtatgggatttgaggatatactgttcgagtatgttttgcaaactgacaaatttcacaatgataagatgctggatttttattgataaataatttgggaaacaattttgcaaggtaaacaaagctaggatgaccaaggcgatagtgtaacattataatctcactatctttattaaccttagaatttgacacagaattgaaagactaacatactctgacactgtacgcaacttgcttgagagacttggtttgagaattggccacatgagaggaggtagagcccggaacacagttcagcactgccaatcatcttccccgatttcaagtcctgaaaaacacacgagtttggatagaatttagtaacacattggagatcacgggccaatttgctaatggacaaaagattacaatccaagtttggaatatggaagacagagtcaagatataagtctttagtaagttttgtagaacctgtcccggcaatttttgactttgaaccatcagcaatatggacggatgaatgaccattacttggcttgtaattttgaagaatggcagcatctcctgtcatgtgatcagaagcacctgtgtccactatccacggcttcattcctcctcgattagcaatgaaggctatcctggtagtactgccactgccaacttggcttaatagtttctgtagcatctccatctgctctttgttgaatggactcggctcgggaacagatgtgctcgcagagttggcagccacgtgtgctctgccatctctgtcagaccgtggctttggtttccaatcagccggtttgccatgaagcttccaacaagcctccttataatgacctggtttcttacaataatcacaccaaggcctatcccgtttttgacgatctccaccactactattaaatgaccgagcagcaaaggcagaagcatccaatgttggggcaggttgctctttggatcccatgatcactttctttctactttcttcacgcctaacctctgaaaaagcctccctgagacttggaaggggtttaatgcccatgattcggcctctaacatcatcaaattccctgtttagtcctaggaaaaacttgaacagtcttttttgttccacaattttcttgtatgttgctgcatcatccgaacatttccatgagtgagtctcgaataagtcaagttgctgccaataccttgtgagtgtgttgtaatactgagtaactgactgctctccttggcggaagtcatgtaaggctgattcaacctgaaaaagttctgaagtattttcagaacttgagtaagtttctttggctgcatcctagatgtcctttgcagtcctaaacagcaaaaaaatttcacctatgtcattgttcatggaattgataagccatgacatgatcatgctgttttcaatcttccacttcctgaaacccagttttgtagtttctggcatgactgcttctccaatgaggtactcatcctttcctttaccgcaaatgaacagcaacacagattgtgaccactgtaaatagttatggccatttaatttgtgtcctatgatgagaataggagaggaatcactgccaccaaggtttggaatttcagatctaccccctgattctagtgacgtgacgctggatacttgtgatgatgccattccgtattttgacatggatcggaaaggtagaagaacacttcccaaggcacgtgcagggattggagttgagaaaaaatagccggaggacgtcggaaaaactgatcagagggcccgcggaggcaaaagaaccccaaaagaggcacgtgcagggctcggatggcagaaacaggtaagaagggtggttggccggcgtcaggcgagcctggaggaggaagcgcgtcaccggaaagtggctcacgcgccctcacgcgccggcacgtgagatgcagccgccgaccggaaaaacgcgcgtggacggcgcgtggatggttttctggctccggtgctttgggaaaaattggagatctcctccaggcggtccttgcggtgtagaaaagttcgccggaaaagttgccggcggtgaatgttttctgacgacgattcgaccgaccggaaagcgttttctcccttgactctgagaatagggactgatgaccggaatgagagatggccagagagagagatggtcggattgagagatggccagagagatttggccggaatgaatgatggcttgaataagaggtggccagaagggattagggtttcagaaaactggctctgataccatgaagaatttctgaattcctttattgattttttaggtacacaccatacacatatatatacacaaatgactgaatgagaaaatatcaatctagcttgattttctcttaaaattaggaaactgaatcatcctaaatgatctctccttttttattcctaaaatactttcctaaattaaaaccctaactttgaatgccaaatttcaacacaaggagtaggtgctttaccaccaaagatctttggatgtgtatcctatattcatatccatgaccaataatgtggaaagttggatcctagagttgtgaagactgtgttcttagggggagaatacaagtgttatcaccctcctacaaagaagatttatgttgttatggatgtgacctttgtagagaatcaacaatactttgatagtacctatcttttgggggagaatatatcaacattggaagataggtgggattgggatgcggaaaaagaattgaaagaaggaacaaacatcattgttgctgaaaagaatgatgtaattgttgctgaaatgaatgatacagtggctgaaactgtggataaagctaatgggaataaaatggttgtccatccaagttagagagataatcccaaaaatccttcctacaaccaatcaaaaactgtttcaccaacgatacctgctgaaacttctcttaacctctcacaaataatgaaaccatcgctgagagacctaaaactccaattctcaatgtgtactctaagaagaaaagatccatcatcacatctctagttccaattgtcaaccttgaaacaagtaatgaaaataacaatgtaagtctaccttctactttagagatctcttctcccagtagtcttgatttgcctattgcttttagaaaaagggtttgagcttgcacttgttaccccatatctcattttgtgtctatgcaaaaactttcacctccatgccaggtctacctctcacaagttttgtttcaacaaatactcacctctatttaagaagccttaaactcaaaaccatggaaagatgccatgaatgaggagatgatagcattgaaaaaaaatcagacttgggagattgttgatttaccaaaaggaaagatgcctaaccataaatggatcttcaccgtgaagtataaatcgtatggatcattggaaagatacaaggtaagacttgtcaccaaagggtacactcaaacttatgatatagactaccacaagacttttgcaccaatgacaaagatgaatactgtcaaaattcttttgtctttggctgccatcaaggcttggtctctaaatcaatttgatttgaagaatgcatttcttcacagagatttagaagacgaggtttatatgggcataccactaggatatgaggagacatgacaaaaaaaccaggtaggtagattgaaaaaatccctctatggactaaaacaatcacctctagcatggtttgagaggtttaccaagtctatgcttgatagaggctattcccaaagtcaaggtaatcacaccttattcataaaactatcttcaattgagaaagttactggcttaattgtgtatgtggatgatattattgtgattggtgatgaccacgaggggattttagaattgaaggtctatttggaaaaaaaaattgaaattaaagaccttgaaagtgtaaaatactttctaggaattgaagtggctagatctcagcatagaatttttatctcccaatagaagtacgctcaagatctccttcaagaaacaggtatggctggttgcaaatgtattaacactccaataaaggctaatcaccagctagaagaaacacaagagaaggaagaaccagttgatcgaggtatttatcaaagaatagttgggaagcttatctacctatcacacacaagactggatatagcttaagttgtaagtgtggtaagttggtttatgcatgatctaagccacatctcaaaactgttcacagaattgttagatatttgaaaggaactccagggaaatgattttttttcagaaatgtggtgagtttaagttagaagcttatatagatgctgattgggctaactccatgataaatagaagactgattgcggggtattgcaccctcttaggagagaatttggtcacttagagaagcaagaaacaacccgtgttggctcattctagtgcagaggcagagttcaaggcaataatgtagggtatatgcgaactactttggttgaagataatactctgagatttgcgagtgagagtgaagaatgcaatgatactttatttcgacaataagcaactataaatataacacataaccaagttcaatatgaccagaccaagcatgtggaaattgatagacattttataaaagaaaaacttgactctagacaagtatgtaccccatatgtttcatcctccaaccagcttgcagatgtgctcacaaaagcattatccaatgcaaactttcaatagataattagcaagcttgggatccgaagtatctttgcatcaacttaagtgggagttttagaataggtaataatttgttagaatgggcattttttctgtaaattagttgtatatttacagttgtattattcccattgatgtgttctgctatgtataggattttaggattttttttttcctagtttagagctctataggtcaactagtgtattctatatatcttgtaatattttttttctaagtaatagatcgggtttttttttatcactttttcataagtctacaatcttaaatagagttgtgctattgtactgatagtgcttggcttaagaagatgcttgtgaaagaaagagtactagaatttcttgcctatttgaataaggaattggatgaagtttgtggacttgtacttggtaaagaacctcttccttctacaagagaagtcttctcagaagtttgaggggaaggaagtagaagaattgtgatgatggacaagactaaacctactatggtctctaaaaattttgccctttgtgtttctactatggaaggtctatcaactaaagttggaataacaaccgttagccaaaggaagaaatttaatgaacaagaaagatggtgtgatttttgcaataggctaaagcatgccatggaaacctattggaaattgcatgatcagccaacaaattggaagaggcaaaaacctgaagaaagaacccaaggaatgcgaccactagcaaaaactcaaaagtagtttttcctagagctctaagttttgtttctaatacatcttggattattgattcaggtgcttcaaatcatatgactagttaatttcaactttactcatcctatactccatattatggaaatttaaagattagagttgcatggaaaggttctatatttctttctaagaatctctctctaaaattagtcctttacgttcttaattttgcatggaaatcttttgtttgttaagtaaactaaccagggattccaattgcattgtagagttctcacatttttattgtaaattttaagacatatatttggagatgatgactagtagtgccagataggttgatggactatagtattttggtggggattcccttaatagtagagaagctcaaactacaagtagaaatgaagtttctttttctactaagaatcaaataatgttatggcacaatatttgaagcaattgttcactatttttgtttaagaataaaaatccttagtttttttcaatttgaaagttgtcaattgtgtaaacattattgtgtttcttttcaattgaaaccttacaaggaatctaagttttttgctcttgttcatagtgatatatgaggaacttcaagggtgacaaatttagcaatactagatggtttttcacattcatagatgatcatactaggatatcttggttgtatttgataaaaggaaaatccgaggctaagtgaattttcaaagaatttcataatatggttaaaactcaattctaaatccaaataagggttttagaactgaagcgggagggaatacttccataccattcttggctcttcttgaaaggacaaggtattattcatctattctcatgtattgacacacaacaacaaaatggaaatgttgagtgtaagaatgtatttttgttagaagtggctaggactattatgttcaccatgagagttcctaagtaccattagattcttacttgataagtagaatgcctactaggattttgaaatttcaaaccccattgcagtgcttcttcaattttttttcctaaaccagaattattaattctctcccattaaaagtctttgagtgtatatttgttcatgtccaaaaacaacactattccaaacttgaccctatgtttgccaaatgtgtgtttcttagttattccctaacaacatcattccaaacttgaccctatcaaatgtgtgtttcttagttattccccaacttaaaaagggtacaaatgctatgatcccatttttaaaaaatcttttatgagcatggaaaatttgaaaacaagcactactttaccataacttctattcaggagggagataattactagggaatgtttttttgggaaaattttaggttcactaactatgcctatactaacttcaaattcaaggggagaaacactacttgaacaagttgcattgaactttgtgtctactcaaggaggaaaaaagatcaaggtatggaaaatcaatccctcacaactcaccaaacatcacatttgagtatatgtaccttggaagaacatgtattccaactcctaaatctcttctatatgttatactatcttctaaatctctttcctcggatggttctagtgcagcaaatatctatagtgaatgtaaatgttccaattatgttagaaaaaagtactatttgtattaaacatcgtattgctaaacatgtcttagatcatagattttcttccactatgatggtctttaccactaatatgttcagtgttaacattcaaagggatatgcaggaggctttgattgttttagagtggaagcaagttgttttggaagaaatgagggcacttgagaataatgagacatgacaacttgtagatgcaccaaaaagaaagaaacccataggttgtaaacgggtatttaatgtgaaatacaatgtagatggatccacatagacttataggattaactacaaacatttgcactggtttgaatgcgatcagagttctcttatctcttacaaacatcttaaactagtccttacaatagttagatgtcaagaatgcttctaaaggtgaattagaggaagaagtttatatggttttgccttaggattttgaaagaagatttggcagtgaaaagtatatgtaggctaaaagaaatcaccctatggactaaaacaatcactaagagcttggtttgatttgctaagttcattagaagcaacaagcactcataaagccaggtagatcatactctcctctataatcattctagtgatggcaagcttgctatactaatagtaaacgtggatgatatcatcctagtataagttcattagaagcaatgggcactcacaaagctaggtagatcatactctcctctataatcattctagtgatggcaagcttgctatactaatagtaaaggtggatgatatcatccttactagagatgatgtaaatgaattagagagattgaagaattttctggctaaagagtttgagatcaaagattgaagctttacatcgatgttgattaggctaagataggcttaatatttaaaagcacaatagccttcagattgaatcattagattgatgctgattaggctaagaaacggataggagatctactttaggctattgttcttttgtaggaggaaacctagtgacttagatgagcaagaagcatcttgttgttgcaagaatttagccagctgctcatggtatttgtgaacttctttggttgaaaaagttgcttcatgacctaagaattcctagtgagaagctaataaagctcttggtatttgtgaacttctttggtagaaaaagttgcttgatgacgtaagaattcctagttagaagctaataaagctctattttgataagaaggcagctattaatattactcataatccacttcaacatgatagaactaagcatgttgaagtagaccgccacttcatcaaggattgaagtagccttcagattgaatcattacattgatgctgattaggctaagaaacgggtaggagatctactttaagctattgttcttttgtaggaggaaacctagtgacttagatgagcaagaagcatcttgttgttgcaagaatttagccagctgctcatggtatttgtgaacttctttggttgaaaaagttgcttgatgacctaagaattcctagtgagaagctaataaatctcatggtatttgtttacttctttggtagaaaaagttgcttgatgacctaagaattcctactgagaagctaataaagctctattttgataacaaggaggcagctattaatattactcataatacacttcaacatgatagaactaagcatgttgaagtagaccgccacttcatcaaggaaaggttggaagtaggattgatctgcatgcctgatgtgtctattgaagaattgttagcagatgttctaactataaggggctccatagatatcttcaaaccaacttaagggggagtgttgaagatctctaaagtttaagaactagttttgttctaatttagtgcataaatagctaggaaaattcaattatatatatattaaaaaaagttaattccaagtttataggaagttgtatagtttgttaattccttttttatatctagaatctatcatacatagttgcatataaataggcatttgtactcctattttttgaaattaaaaaaataataagaattgtacattcttctctcaaattgtgttaagttaccctaggaccttaaattctcttgcaatgtcgatgccctagatattaaattgcatatattgatgatagagaagaataaagaaaaagagagcataaatgaacaaagggtagaaagcaagaaactattcttgcatccttaatcgatgtatgtttcatatgcacacaaacataaatacctccaagccccatcctccaaaacttaagaagcaaggaataatactactaaaactatcaagtgcatgtcatgaagattatctacattgtaaatatatctttattctaggggttgtatgtctaatgtaaaatgtgcatacatctttttgacattcccttctcaaatataaactattgtgcttagtaattcactagctgctttgtgtaatctccaatattaagaagtgtaaaataatactaaaacgatcaagtgcatgtcatggagattctttacatatctactgtaaaatgtgcatccaactttttgacattccctctttgtgtaatctctttctctcactacatgtctacattctttttatggaatggattaagtttgcctatcttctctaaaatgttgtacatctctttcagatttgccccctttgtaattgattgttagtgacatcagctagaatgtgtaatgtgttttttttctctaatctatttgctttggcagtctttatttcgaaagaagaagctctttgtgcattt

SEQ ID NO: 11924 - DNA, 2788 bp, Vitis vinifera
  Intron number 1 from transcript GSVIVT01035412001 (locus G SVIVG01035412001) derived from phytozome v7.0 (chr-ID chr4 ; pos 1100877 to 1103664 reverse strand)
cggtttcttgtccctctccaattctcctccttcaggtttggcatttactatcaccattcataactaagagttgggatcgatacattaactgttactatgaaaatacctagggacaaaatgatatgggtttgggttttaaattttattagaagggccaattgtgaatattttctgtttcatgatgattcctagtaaccccacccctgtttggttgctgagaaaattcgaaaggatgaaaagaaatggaaatagaactgtagctgtattgagctgggatatatggtgactttagcatcgaaagttggaatttttaatacatttgagttcctataccaaatggagcacttttatgatctggattttcgtccaatcaggtagttacctgaagaacttgtttggttgcatggaattgggatccgttccaaatatgctgtttgtttgatatacatgcaaagtggttttggagtgaacttgaattctatgcatcccaaactctacaatcaacacagggaatgtaatggaattttcccatataaccaaaagacaacctaaattcagtgaagattttagctctatgtggatattatttgttttggccttggtgagaatgacaattcccattaagcatataagatacctagaaaaaatctgtgctgataattacagattcaatgttttttaactggtgaatccattgttaattgaatgtcttctatgtttatatggtgcttaaatgcctcaattttactgaactcaattaatttaactgagaccaatataggactgcaataacttaagatagtgagtgttgatcttccttgtctgggtgtatttggaagtaatgcaacagaagaattttttatggtgtggacagtcttgagttgcagctgcaaaatgttctgctgcatgctttgtttgcagtggcgtatctacatagggcctaaagggagtggggggtgcctcatgcccctcctcattgtatgaatgtttggcaggagatgaaagatgttcttttcgttctcagtgatccttgtataagctccatgtgcaatggttgcatgccaatttggtgctcatcctgtggaattcttatttacttatcaataagaagcaaagaagacagaagcagcatctcactgagtagataatataattaccagtagtgatgatattacatatgctgatcagtataataagggaatagctttttaccaatcctttttggtcaccccaataattttatttatgctatttattagttagcaactctagcaggttgggtgagcttagagcttaaactgaaggcctagaatctctacttagatcttgactcaacctgactctgtatggaaaaacttatgctcagatggctcgggttatgtcaggttcaagctgtctcattggttgataagacgaatggcacattgcgatcttccgtttggagctgccgtagaggggggaaacggtttgatatcatgaagtaattgatgaaacttgagaagttcagatgccttctggtaaagaaagaagaagaggagtgcaggttttagcctaagcaggctactaggggagcagagaaaggaggagggtggcagctgctaggaatttcctttctgcttaggaaggcagcagccgctattgccattgtaactttcagctataattgcttttgaaactgatcataaataaagacataatatgccatcttcaatgattgttactaccataaaagagcattggctgggtttggttggatcaccttctgtcttaacctttgtccaaccaatttcaggttgggttgatttttccaacctaagtgatcaaatcattgtccataccctccaaaatccaactgactctcaggtctcaccaagttcaacctaaacaacttgctgccttcctatttataccatatataaggggaatcatagttcttgtcatgaggccccttttatttcctgaagccatccctctttcctttctactaaaaccaatcaaaggacattgttggaaaaagagaacgacaaaaggaagtcacaaactaacctacgcatgcctattgagcaacattgctaccactcttgctgaaccgcctctatggaaataattaaccaactaagcatgaaaacaacaaatattttaaattctcatgttccaacaatgctcacatcccaaggcttttccaatggcatgtatgagtgtatctgctaaaaggaatatgctagatgataacttcctttctgtagccattgggagtgtttttctaccttcttctcaaccttgctattggttcaatattgcacattctggtgccatttgtttattacattgctgatgctaatcctacttcattatgcggccgtagttgtatctgggttaaaaagtgagattctaatcattctgtagtattttatatttacatcttgctaatagcttcatcatcagtttctttggaaatgtttgaggaatctcaactggcattcttttattttctgcactgggagctattcttatgtttctctgcatatgcatttctaatcctattgaaagttgtttcattagtataccatgacatctcaacttcagtttgtcactctgcccccaagttcttccatatggttgatgttcactgtatatgctggtggttattacaccccacattcccatagttggaaaagatttgctgtctttgtctttgattcatactggaaagttgttatcaacattttgtagatacctcatgtactgtttttgggattcacttggatttagattgcagaaaccgagg

SEQ ID NO: 11925 - DNA, 11747 bp, Vitis vinifera
  Intron number 3 from transcript GSVIVT01021613001 (locus G SVIVG01021613001) derived from phytozome v7.0 (chr-ID chr1 0; pos 8085719 to 8097465 reverse strand)
ctagtgggttgaatttgtcaccaaatttagaggtaaattgttcttatattgggtgcattagtcttattacttatttggtggactgttaattaaagagttagaggagttacagccatttgtggttgttggattacttaacaataatctttttaaatgctcctgtgtagtttatgaagtttcaatcattgatgccacatggtgatgttaattttttcatgctcctagtaattctatatattagagttcatttttgttgcatcataaaagaaatggatattttacctctagattaatagaacatgttttaaacatgaatctttagtacttaattgagttacacaacagtgacattgacatgggtattagttttcaacaaggtaacctcaaaataaattgtgcatgtacattacaggctgaaactatttctacccttttagacacttaaatttacatggagaaggagaagaatattcatgctgaaactatttctacacttttagacacttagatttacatggagaaggatatcgcaatgacaattgaaatctataatagatcacaatagtgtcccaaagaagtgaatgacttattctctaccctttttttgataagtgtaaatgtattagagtaaaaatggagtgtacatgatgtatacaaagcaactaaaaaaccaaaaaaacgcaggaacacaaacactagcaatcatgctctacaaagagcctatctagtccacaaactctgacaagggtaaaaagccatcaccaatatacaatcttacccattcctaaaaaaataaaattcaagtaagaacttttgattatttggtccaaactttcacaattttcgaatgctctcctatttctcttcctccatatggtctagaacaagcataatggagtaatcttttgagccttttttcttttttccaacaaaagacctgtgttaacttaagagatacaaagcaaaaatcaattgtcactgtataccgaacaaagcaaaaatcaattgtcacaaaacgcatgcttttgtgcgatgaagaagaataagatcactcgtttctttttcttctttgcacatgtagcaactattgggaatcctctaacctctccttctaagctaatccaggatcaaaatcctagcttaggttgcttcccaagcaaagaagctaactcttactaggacctaggaatttcaaactatgtcacgatgtaaaggcttcgttcccccactcgccaaagaggagtaatatgatttaacagagaaattaccattctttaaccccaaccataccatagtatccttcgagtttcagctaatggagtggtcatacaatctcccaaaaaattcatcaacctccaattcccaatcatgcaattgtctaacaaaccttgggccccaactagcaccatcccatacatcaatcacctaagcatcttttgaagaggaatgaagtgccagaaacaagtcccgcaaagttgtgtctccacaccatttgtctatccagaacttcaccttgttgctagagccaaccttgaaacctattctatctttgagtgcctcccaaccacttctgagtgccttccacactcccattccatgcccctctctcacttctttagtgtgccaacccacttcttcttactcatatttccctacaattatttgttttcaaagagggttccgttcactcacaaatctccatgaccattttcccaagagagtcttatcaaggattgataggtttttgatgcccaaacctttttttttttgatcagtaagaaaaaatgtgtattgcaaaagaggcgctaaagaagtgactcaaataaatacagagaagaacaactcacccccttacaaaagaacccaaaccactaggatagcacaaagaaaccccctcccttatcgtatacacacccattcaataaaatctattaaagtcgaaggcccatcttttatctacaatttggtttccgaccaaagtaaatacaaaaaagaaattttcagcttttggatggacaacacaccgtcctcaaaagccattgaattcctagtcttccagataacccaaaacaagcataatggccccaaaagccacgccaccttcctcttcttgcccacaaaagagcctctccaacctataagagtttccttcaccgaatgcggaaaaacccaagaaactccaaagaaagagaggagcaaagttcacacctcccttgttctttcacaatgtaggagaaggtggttaatcgactccccacacttttgacaaaaaaaacacctattagccaaaacccaacccctcttttgcaaccgatccaaagtcaaaactctaccccatgaagcctcccacgcaaagaagctaatcttgggctgagcacaagacctccaaataatctttgaagggaacaaagctgaagaagccggctgcatagccttatacaaggactttaccaaaaaaccccgtcctttgatttcacccaactcactttgtcctcctcatccaccctcaccatcttcccttccaaataacatagtaaccttcccacttcttccaactcccaatcattaaacgacctattgaaagtaggagtccaacttcccctcctacccccctcggctgtccaaacttcatttacccaatcctcttttgacgttgctaatgcataaagagacaggaaaacctcacttaaagggctggtatcacaccacttatctttccaaaacctcacattctttccatcccccacctcgaagccaaaaaaaggggttacaagctgtcccaccttatttatagaacctcctttttgtttttccatgcaaacaagtgcccaaatgcgacttgtgaagcaatgtcccctctcctcaaagaaaatcccttggaatctttttcaatctcacaaccaccatcttcgagatggtgaataggaacatgaaataaatcaataatttggacatagtgcgctttattagagtttgcctttacccttttgaaagatattgtctcttccacaaagcaagccttttttgaatatgttcttccaccatttcccaaaccctaaggttatgtttggttcctggaaaatgctaaggaaagaaaaaaaaatgcttaggtttcatttttggttgttaaatgaaaaatacgaaagaaaatcaaatataattaaaattaattaaaaatttatatgtttttgaatcatttaatctttatatggaagagttaaaataaattaaatgattttgaagtaacatgtaaaaataatttattgactttaaatatattttttactttccttaactttttctttcctttctattttctttctttcatatttttcctcaaattttctaagaaccaaatataatctaaaggacttgtagggggcacccaaaggaaggcctaaataggtggctggaagaacacccaccttacaacctaaaaatcctaactagctcctccatgctagggacatccctaacaaggatcaatttacttttctctaggttgatcgttaaccctaatcacacttcaaaccacatatagacccaactccaatgctctaacttctccttgttaacatcataaagaacgagggtattgtctacaaataacaaatgagatacctccgccccaaacccatttctactccttactaagaacccatcagtgtcacccccttattttgccttggtaaggatgcgggaaagagtcttcattgctagaatgaaaaggtaagggggcaaggggtggggtgaaggtctcaggtgaaaagagaaactttccatgcgttgctcattttgagagagaactttgcaaattagagtggtcggttaattgcaacagctccctactcattgttaggggaaggtggaagatcaatggggtttcaaaacctttattgtgaggtcgtggtctagttttgagtgtcggttgagagttttggtatgtggtcgggttttgggggtttcagtgtcaaggttgtgatcctagtggtgatttctcttttttggtcagtttgtcagggtggttggtgcttgctttcacttttctttgtttttcttttgcttgccttatgcccttttttgtataatgcatgtgtactctgttgcaccattttgcaagcgcttttaaaatattctctttatttacctatagaaaaaaaattaagttgtaagtctagatctgcaagaacctagcaatggagtctaggatagaataaaactcaaggaggcacaaacttccttataaatgcctagcaactagattgtaggctcacctatgtaattcattggttggttggatgatctagatagctaagtgaaagacttgaagagcaaacctaaccacttaaaagatttatgattttacaaatcctcccaagaaatttgtaggcaccttttatccttgagaaactcaatagagcaacaatgaatatattgtttggtgcctttgtatacatagtgcatgctttaacgcgtccctttgttaggtgttgtttcgtataatgaatgtattgtttatttatctatcaataaaagagagcaacaattatacccccttccccttggaaattttaatatgtaaagactttgacttagtcaaatctttaagaaagttaagatcttagcttccttggttatactagtgaaactaaaactaatcggctagaaaaaggatctgataattttatcataatgcaatctgaaaacatcactaatcctctcatgcattgagttccatggtgattaacttgtcaaatgaaacttaaaacacctcgatgatggaggttttttttttttgatagataaacccacaaaaatatattagaaaaagggtgcttgaaaggcgacccgaagcatacagggagtatacaagagtcacctaaaaacaagaaacaacagaggcaagcactcattgactctcaacaagaacccaaccagtccacaaagttaatcaaagataagggaccctacaactatagaagacttagcccaggataagagattacaaacaaatgaatttttcattctttgaatcgacaagacctcattatcaaaaactatcttgtttctttccttccaagccatccaaaataagcaaagaggagctgtccgccaaacctttctatgcttcttgtccttaaaggaagcacaccaacctaaaagagtgtctttaaccgtaaacggaaggacccaattaacaccaaacaaagaaaacacgagatcccacaaaaccttcgccttggaacaatgaacaagaatgtgatttatcgtctccttttcagcacaacacaaggaacatcttttagctaaaatccagcccctcctcttgagtaagaaccttcccccatgaagcttcccaaacaaaaaaacccacctttgtaggaacatccgggctccaaataatgctccacggaaacgggactgcacaactatgatcaagagaattatgaaggaactttacagtgaagatctcattcttcgtccctttccacaccatcctatcctccacatcatcattcagcctcttcccttgaatggtcgaaaggaatctctccacctcctccacctctcaatcattgaaaggtctagagaaacggggagtccaccctccctcttcccccattgaatcccaacagttcgctacccacgcatctttacaaaccgctaatgcaaacaaggagggaaaggcctcgcaaagggaattattcctgtatcaaatatcattccaaaacctcacccttttgccatcccccacaaaggaggaaacattattgagcaacaatgaaccttccttactgatttccttccaaagccccaccccatagccctcccttaccccacgagaactccaccctcctccttcttccccaaacttcctactaattttaagcttccaataggaatccctttcaactgcaaaacgctaactccatttgcacaaaagggccctattgagagtagaaagatttctaatccctaatccacccttctttttatgagaacaaacaatagcccactttacaagatggggcctcttctccaacgctcccccgccccaaagaaaatccctttgaattttctcaagtcttaatttaaccactcttggcatacgcattaaggacatgaggttcacattaccctacttatcaaaaaaaaaaatagaggttcacattaccctaacgattgttaaattgccgaatgaattttctcatatatctcaagggtatttatacaaggttacacaaggctattttagaatagccaactatacaaaataattgacgactatatagaataaatcacaactaattgacaactacacaattgattgtacacaactgtatgcatagttgtacccacaattgtacacagttgtatctacaactgactcttcccctcatgttggtgcatagatattgcacgtgcctaacttggataacgctacatagaatgaacaactattagcaacatgagtcatcatatttgccaactattttgcactcttgatgtatggacctttatcatgccagaatctaggttatccttgatgtggttcttgtcaagttctatatgcttagttcgatcgtgttgtattggattatttgtaatctcaatagctgtcgtgttatcacaaaaaagcaccataggtttcttgggaccaaacccaagctagcttaagagaattcttggccacgtaagtttcgtattcagcttttgcactagacagtgagatcacattttgtttcttactctccaagtcaccaaatttccttttacaaatgacacatatcttgaggtagactttttatcaaatttggatatgtcaaagtcaaagtctatgtatacctcaatacttagatgtctgtgtccggagaacataatacctttacttggagtggactttagataggtgaggatacaatttactgaattttatttgtcggtcacttgaattatgcatgaattgacttataacactaaatgcgtatgacaagtcaactctagtgtgggtcagatagattaatttccctattagtctctaatatctttgtttgttcgttggaatctgattagggtagatagacaagccatgatttatcttaatgggagtatctataggtttgcaagcggagttactagtttcaaccaaaatatctaatgtatacttccgttgtgagaggaagagtactcacttggactgagacacttcaatacccaagaaatatattagagcacccaagttcttcatttaaaattccttggccagatagctccaaagcttctctatttttgtaaagttactacttgtaacaatcatgtcatcaacataaacactaagtaaagtaatatcatcaccatctctcttataaaatagagtgtgatttgctattgcttgtttaaaaccatactccttcatcgagtagctcaacctgccaaaccatgcccttgatgactgctttaatccattcaaagccttttttagtttgcatgccttgcctctttttggtgtaagcctcgaaggtgtggggggtccatgtacaccttctctaatagatcaccatggaaaaagatattttttacattaatctgtcttaatggctagtctagattaatcgcaagagagagtatgactttaatggtgtttattttggccataggggaaatgatcttttgatagtcaattctataagtttgggtgtatcccttggcaactagtttggctttatgcctgtcaattgtctcatctgacttgtactatactaaaaactcccaccattttttttcctgatggagctcgaccatctctcaagtagagttcttctgaagagccttcattttttttttgttaggcaaagacacagtaaaagtatatattaataagaaaagggcgtctaacaaacagttcaaagcatataggaagtatacaataggcgctaaaaggcagaaacaaaagagagaggagttcaaaacaacacccccgctctcaactagagcccaaccagtaaaaaaaagttgattaaagaattaggcccttcatctatacacgacttagcccacaaccaaaagttactaacaaaagaatatttcacctttcgaaaactcctcattcttaaagacaatcctatttctttccttccaaaccgtccaaaccgtccaaaagagacacaaaggggctgctctcccaacctttcttctcttcttgcccataaaagagccatgccacccaagaaggacctctttaactgacaaagggagaacccacaacacattaaaaagggtaaacaactagtcctacaaaaccttagtcttggtgcagtgaattagaaggtgatcaatggtttcttcagcagcacaacaaaggaaacatctattcgggagagaccaactcctcttctttagctcatccaaggctaaaactttaccccatgaggcttcccaagcaaaaaaaccaaccttagggggaacacaagagctccaaataatgctgttcggaaatgggactatacggatgcctgctaaagtgctacaataggctataacagaaaacaaaccattcttagcctctttccactgaaccttatcctccatattagtgtgcaccttctttccttgtgaggtgacaaggaatctctccaccgtctccaactcccaatcattaaatagcctagaaaaatgtggattccagccccctcctccctcgaagcatcccacacctttgccacccactcctctttaaaagctgccaatgcaaacaacaaagggaaagaaaggcttaacgtgtcatcaccacaccacttattctcccaaaatctcactcttctaccatcccccatggagaaaacaagattgctctttattaaaggccattccttccttatttctttccaaaaccctacatcatacccctcccttacttctcgggtacaccaccccccttcttccaccccatacttcctactaatcacttgtttccatagagtccccctttcttccctacgccttgaggctaggttgcgaagacgatttgagttctctttttggttgcttttccctacgccttctgtcggcatcactattttatttgaagtggaaggtttctctagtaagtctttgactccaatgtgcttgatggggggaaggtcttcttctttggctgcttccacatccaaagagtttggtcccttggagggagtagggagtgggtcttttagcaaaaggtgaggatgatgtttgcaggcctctgcatatgagttttggtgatgggttggttgtggaagtcctagagatctagcctaaggatgcgaaggctgcgaacctagaagtgtgtagtgagaaggggctttgggttttgggagtcttagtaggggcccattggatatagaaagcctcttcgatctttcttttcaaaaatttatttctttttgcgagtttttgggattgccagtggttgggcatgagaaggaaattgcttccttgctaggaaagattaatatcggaaagggtcgtagggtgttggctgtggagaggaggccctcctccactcctcactttgttagggagcttcaaaatttggaatgcttgatctaatattgcaattcaaacaaaagagagaggagctagagtattggatgggagatggtttgcaagtgaccttgtaggttgtttttggggctgctgttggttggcttagaggggttgctgttggttagtgttgtaggttgtgtttgttatgctgggggtttcttgtttttctaggctttagggagacgtcttttattttgggtgttggctggttttttatgttcccttttgcttgtttttcattgcatcttatatactttgtgcaccatttccaagtgcttttaatatatttgtgttgtttacctatcaaaagaaaaaaaaaaatctattccactagggcaataaaagaaaagatgatcgattgattcactattcttcttgcacttggcagctaactctagattgagagctttgaagaacctccacttctagaagatatcattgatattaatcctcttactagccatgagccatgcaaaaacctttactttagaaggggcattagatttccaaataaaattagtcagagcaaaaaaaacaaaggtggattaatgagaaaggccttttgaacaagctcgaagaggacaagtaccaagccttgactttaggatggggaggttttgggtattgaaataaatcacctcaccaagtgtagggcctctcattcttgtttgtacataactatagttttgattagaaaagaaaattaatgacatggatttaaagaattgaacttgtgttgcaaaaatcatagtcatcagaataacttgaaccctttggtaatctatatccaaagagaagttaggaatataatcctttttttgatcgattaatcatattcttgttcattgttctaagacgaagattttgtgggatcttttgctttctctttttggggtcaattgggtgatgccgttttcggtgagagacactctattaagttggtatgtctcttttaaggacaagaatcatagaaaggtttggcgggcagctcctctctgtttattttggacaatttggaaggcaagaaataggatagtcttcgataacggggctttgtcgactcaaagattgaaaaactctcttgtttgtaatctcttatcttgggctaattcttctatagttgtaggccctttatctttgtttaactttgtggattggttgggttcttgttgagggtcgatgagtgtttgtgtttttgttgcttgctttaggtgtctcttgtatactccctgtatgttctgggacgcctttcaagctccctttttctaatatatctttgtgcttttgcctatcaaaaaaaaaaaaaaaatcctttttttgatcgaacatcactaacatgttccttttgcttgattctgtaactgaagtgaacttggtaaaaggaaattggaatttcacttctgttattgtgtaaaaacacagttaaatgtcaaaagagagcagggggataagatttgttcttcttttgaatttaccaaactaccaaaacagatcaccaccaaagaaggaatatggaagcgtaacctaattgatcctgggaaggagaactatattttccataaaaaaaaattcagctggaagtgaactgttgctttgctgctgaaatatggtctttacatgtctgggtaaacagcttgacaaagtgttctttccaggtgcatccttttagtgtaactttcttctagcacttctgttctttcaatcacagaatttcttcaacagtcttcaacattctacaaagttgagctttttgatgtttgtattctaaggtcatggacaaggtttttggtggagaaacgtgtctatgagacccactgtttaatgtaaaaaggtggtagttgctgtctggtgtatatataagtgtgcagaattacagataatgtacaatatggaacacatagattgttgacttaagtctgatttttaaaaaatgttctatgtagtagctactcacattgttttgacctgttgacttgcaatcatgttccatgtgattttaaattgctatatgccaaagggttttcctttttatttcctagaatctatttcagagtggagggagtgtgtcaaatttgatcatttcttcagtgatttatttattcctcaacttcaattcttctttggcagtttgtttatcttagagataatctcttgtctacatt

SEQ ID NO: 11926 - DNA, 1844 bp, Vitis vinifera
  Intron number 2 from transcript GSVIVT01019077001 (locus G SVIVG01019077001) derived from phytozome v7.0 (chr-ID chr4 ; pos 16995781 to 16997624)
ttcttggagaggatctgaaaagtaaaattgttgaggtggtgacaatttcttcattaaatttggtctatgatgctatcattctcgacctgtttgtttgatgtgcttcataggttttcttgaagactgtttggttacattttattacctaaccgtgacaaagtgggcatttcactatccctatctgtgatcatgaaattttgtgatttgtctgctagttgcctttttgtctctccttttgcaattatggggccgtacttgagagggatgctagaacatgatatacattatgggttaaatcctaacagctcgagctgtgaggaaaattggttgccaatgtcattaacatttgtgatttgtctccctcttgtctgctcactgtatgtcttttcatgtgtgaatatgggactacacggaagggggtactagagttgagagtatgatatacattttgggctcaaatcctcacagcttaagcttttatgaagttggtacttcaacatccttgactgtttattttttcatatggttaggtgttttgaagttcaagagtttagcaaaatttttggctgtactagattagaatttagaattggaagaatatgaatatgtattaccttcttatatgtacgcttcagtacctgtgaccaatcttcttaacattaatagcacttgagccagaagctatattcttgccacaatgccttctgcagtactgaatatttggttcataaatgtgggcatggtgtgactgcctttattattaatggaaaactcattagatgaatgcaagcttgttctagatttcagttgttagggactctttctcacatttatatacataagtgtgcatacatataattcattaagcatcacatgttagaactattgaaagatttatagcatcaggatattttaagaatatagtctcaaaaagtgcgcaacaattaggccttgtttggtaactggtttttagaacaattttcttttctctagaacaaaaaaaaaaggaaaacgcgtttggctattagaaaactagagaatataaacacttttctattcttaaaaacaaaaaatagtgtttttagagaacattttgtagttgttttcacttgtttttttgagagttgttttaaaaaataactatacaaatatgaaaaattattaaaaataaagcactacatgtaaaagttattttttaaaacatagaaaataagttaagagcattttagatttccaaacagaattttattctacaaaacatcataaaacaatttttaaaaattgttctcaaaaactgtttttagaatcgttttcaaaaacacttcccaataaagccttactgttaagagagggtgttgttttttatgttctctcttgtttgatgtgcttttaggtgctatttgtatacgtcctatgtactttggtgtgtcgtcttttggtgcattttattatatttgtattatttgcttatcaaagaaaaaaaaaaacctgtatcatgagtaacattatcattgtatgctcatttcattgggaaaaaagtgttttgagctgtttgtctcttaaacacttactacgagatatataaattaagcatcacatttagaactattgactagatatatagtatgggaatattttaaaaataggttcttggaaggtgctcaaaaatcaatgtgtaatgagcattatacattgtgtttctatgctgattttgttgggaaaagtgatctgagctgtttgccttccaagcactcattgcaagtgatttcagtattcaatgctatattttggctgacatttcaaaattttattttaggaagctttaaaatcgtgcctcatcgtca

SEQ ID NO: 11927 - DNA, 6486 bp, Vitis vinifera
  Intron number 6 from transcript GSVIVT01031064001 (locus G SVIVG01031064001) derived from phytozome v7.0 (chr-ID chr1 4; pos 21726626 to 21733111 reverse strand)
tttgcagagatacttagttttgccttttgtgaaaggtatatttattcctgagtcactagattatccatgtcttgaacagctgaaaaaattatattggttttgctggtaatgtgtgtacatgaagttcatgagtttaaatgtttaaccttcgttaagttttatggacagtttcttgattaaaacttctatacacattgcattttgagtttgcatcttcactagagcactgagaatagagtgtgacagggagcaaggtcttctcagatggtatagtttaggagtaggttttacatccacaagaagcagataaaaggattgggctcaatgataaggtcatagaatgatggtcatatcattgtgtacatggatatgtaattatagcatggacataaagatgaaaataagagcttgctcttcctatttttatttgataagcaaatatagcatataaaatagtgtcatagggggctccctactgctgaaagagagatgaaccaaggggtttaaccaacaggctaaagtaacagttcctaaggcaaccctaccttatcaataaaatcagggacagataagcaactctttttgagtccttggactaacaactcatggacttaaggagattcttcagaccaactatgcttgtttcacaccttaaagatcttttggttcctttcattccagataatttccaaacaaatccagaagagttcttgcctttcttctctgcttccccctaaactgccacaccagctgaacaaatgaaccttgagcaagaacaatgttacttacagattttgttttttttgataagtaagcacagaattcattaaaaagaggcaaactagccacaaagtatacaaggggtatacaaggctactaaggcctcccaagcaaaaaaagaccaaaaaaacccaccaccccttatctggaggctaaccactccagaaagcctattagggaatgtggctcctctctaatatacaatttagcccaaccccatatgctacaaactaaagaatatttaagtctctgaattgctaaccccctccctaaaagttagtctattcctttctttccaaaccgtccaaaaaataaacaacggaatggaattccaaagtttattcttttttttccccacaaaggagcccctccaactaaataaaacctctttacagtttctgaaaacacccactgaaccccaaacaatcccaaaactaagtcccataacactctggtcactgtacaatgtatgagaatatgatttacattttcctcttcataaccacacaaaaaacaacgattgaggagctgccaccctctcatctggagtctatcaagagtcataatcttccctcaagcggtttcacacgcaaagaacacaattttagttggaactctctccacccaaattttattttttggaaaaacggccgtcaaagggctatccaacaggctgtatgcttcctttactctaaactgccaattccttccttccttccaaaaaaccgagtcttcctccaaagttatcttgtgacccctcaaatcatgaaacaagttgcctaccatatccaattcccagtcgttaaaatctctaataaacctcaaattccatcctcctacgccaaaattctgatcccacatttcttctattgtcgcattcctatgagctgccaaagtgaaaagatgcgggaatctttgggacaacactgtatccccacaccaaagatcagtctagatgctgattttattgcctttccccactttaaacgccaatttttcccagcaccatccaacttgcttcaaaatctccttccaaacccccattccaaacgcactcacaaccttttttgtcctccaaccaaaatcccccttccacagcccttctgattaaaacactcaacacttccattcccatgacaaaagatagggggaaagagggtccccttggcgcaacccctttaaacttgggaagaaactagctggaactccgttcaccagaactgagtacttagctgtggaaatgcaccgccacatccaactcaaccacttcggaccaaaccccattttttgcataaccttcattaggaactgccaattaatgctatcatacgccttctcaatatccaacttacggattagacctttctcaccccttttttgctatgcatcaatcacctcatttgcaattagagaggcatctaagatctgtcttcccatgacaaacgcattctaataaggagagaccacttttcctatcacttttttgagtctattggccaacaccttagctaacagcttatacagcccccccaaaaggttgatgggtctaaagtcctctaggtcctcggcccctcctttcttaggtaacaacaccaaaaaggtattgttgagactttagaggaaaacattctgctcatagaactccttaaacatctccaaaatctcctccttcacaaagtcctagcaactttgctagaaagccaaagtgaagccatctggtcctggggctttatccccgttcatctccatcagagcaacctggacctcagcctcagagaaagaaagctccaacatacccgcttcttgaagactgatttggtttaactgcaaccttccaatgtccgtcttccaatccgagctttctaaaagcagctgttgataggcattcgctaccccttccctaacttcttgatcccctgacagactcacaccatttatcttgattctgtccatgtagttggctcttctatgggcggatgccatacggtggaaatagcccgtgtttctgtccccttcctttaaccataactcccttgaagtttgtctccaatgggtttcttctaagtccacccacttagcatacccctccttgtcttcctttttgcaagttaattcctcatctgtcaaacttctctcacattccatccgatcccaatactccacttgttggagagctgcatccttattgcattccagactcccgaacacctccctattccaattttttaagttttgtttcaactccttcagttttgcagtcaatctaaagctggcactgcctctaaccaccatcccctgccaccaactacgaattagatatttaaacttctcaactttgagccacatattttcgaatttgaaaggggtgggccctctccttaggccacccccttctagtaagactagaaaatgatccgaggtcggccgaggtaaccttctctagactaccctacaaaactggtcaagccagtagggagttaccagaaatctatctaacctagcccttgactggttattaagacccccactccaagtgaaagatcccctttgcatctgtaaatccacgagacctagctcgtctacaacctgagcaaaccttctcatagctgaggttattctcccttgtctacttctttcattttgagaaaggatgatgttaaaatctccccctaaacaccaaggttcttcccaaatccctctaattgccccagtttctttccacaaacactccctttcttctttggtaaacggaccatgaacacccgtgaacacccaaacaacccaattttccacattcctaaatctgcaggatatagaaaattgtccctcctcccattccagcatttctagagatcttttgtcccagaaaatcaaaaggcctcctaccgatccaaaagcatccagggccttccaacctaggaatcttcctgaccttaaacttctcaccaccctattagacaaatcttgaatttttgtctcctgaatgcaaagcagatccaccttctgcttcctaacaacagacttgattactttccttttaaagctgtcgttcgctcccctcacattccagctcaacagtttgaggttcattggacaaccactgactgaccccctctgccctgaagaggacaattcttcttaccttcctcctcgtagttaattgagcattccaacttctttaactccctttcaaattttgatttttccaagatacctttactatgaatcatttcccgcctttttctaattttaaccaggaaactcagtatttccttctccaaccctttagtcgaaaaccccaaaaattggctgaacttcgctaggctactttcttcctaattaggttccctttccccccttccttcttgggattcagactgagatgaacctccttccgaataccttgccactgaaataggaccattaaactcaaccaattcccagcagttattgccattcgcattgggcccagctgtgtcttggaaacttagcaaatttccattatggcaaacctcccttaacgccccagaatggtaaaaaaactccctctttggagtccgacccaacgaaaacaagatagaaggagaaggagaccccaaatcccttaaaccccccgagtttgaaaaggacccatacctcgaatcttcttccactaacacgcagtctgtcaatgagtagtgggagtccgcctgctgctttctcccagcttccttctcttgctggcttataaactccagctcaaaattgtcttccttacagagctcaggttggactgaagggcaaacattcccagacggacctttatcagtaggctgaaactcggctgagccatggctgtcccttaacatagctgaaggcccaataggctgcaccccaaaatccttaagatgggttatagacggtccatttctattccttaaagagacatcaggcccagagcgtggcccaaactccacaactgtacagtgaaaagaatatactaagtcatctactgactttacctgcataagcaacattagctcgccaggactctatccctccttataagttggtcaatggtaagaacaaagaatcttttcctcaactatttccctgagaaagagtatcaagacccccacattttccaacattaggaaaggagaagtgacctcaaagagaagcacccttagtgaggcttccaggctaaaaatcctccttcgcagagataagatcacaactcttaaatgcacgtaggaaactctccacaatcccagcctctcaattatgaaagcttttactgaatattgggttccaataaccaacactgtctttcagcatcaataatagcaatccattcttccatatcctctgggtaaattgacctgggaagcaatctatgagagcagctgcaccatgcaaggtgcaagaagtttgttctacaactgttcctataagttttcatgtttacaaaacccttgcaatccttcttgacagttttccaaatcctccactctgttggttctattctatgtatttgacaccatcctcctccaactttcctaacttctctatgatcctcctctgcaacctatttctgtttccaacaaatctccagtgccacttcaatagtgaaattttttgttaagaactgacaaatttcgaatctcagtacaccctccatctcctcctaaagaacccacctcttccttcctcaaaattgcttatagactattgtgaaaatccacgggttaccatcatcaaggtatgtgaacatacaggaaaccaataaatcactgaaatctacctccaagatttcaagcactctcttatcccacaacaccaactgacatcctgaatcccctagcagcaacaggagcctactccctgaatacctcatgcatacagttaggcagacctccttaggaatcatttgagttttagtttctagcaaacaaatcaaatcagttctatgcactttcagaaaagacttgagcatcctacactctgctacttattaaggccttgcacattctaagagacaattctaaacttcacagggaaaccagagaaacaaccaaactgttcttcccacccgagaaatcatattttggccatagttgatcaaagaggagagtctctgcaattcccttccagtacatgagttataagctgccctattccttgtggaattgcactgagattgacaacttcatctaggctttttcagcaaaaagcccagtgacctggtctttacatgttcacaggaaaagaccaagtagcccatgaacattgcaacagtttgaaacactgaatcaggaacaatccctttgcccaattccaaacaccctgaagtgtgtcaacccattctcatccttctctaacatttcttggtgttttttttttctttttttttccccctcatttagcaattctcacaagctgctgtatcaaagcagcctcaaattgttgattgctttgaatcccaattccacagtaaatatgtggccacaggaatgtagtttgcatgtgatctaattatttactcttttttttccagttttttcataacttgtgagtttctgtgtattgcatgcattgcatatgaatacatactattcttttcctgcttaacttaataatgttgtgcatgcttctaagtgtccaactatgtctcattatgctgaaattgcagccagtggagttcggttgaagaacatccgaattggc

SEQ ID NO: 11928 - DNA, 16930 bp, Vitis vinifera
  Intron number 1 from transcript GSVIVT01026008001 (locus G SVIVG01026008001) derived from phytozome v7.0 (chr-ID chr1 8; pos 25905460 to 25922389)
tctactcaagttaaaagtcctctttcttcttatcttttcttataaaggattactgattaaagttttactttgagggatgatgttttccactaattaataaagtcattgtgttattctcttttctttcaaatgtctcctccacttaaaagacatttttgttagtatgtttcttacgaaatgtttgattaaagtcgccttcctgttttcctttttctttttctttcaaatgtctattcaagctaaagttatttttcttgttatgttttcttttaaaatgttctatagactaaaggtgtcttttttttcttttctctttttttttggtctattgaagtctacccaagtcatttttcttgttgcctctgttttgaaatatctaccaatttagttgccaatggtggtagaatctcaatattgaaattatagaaatttttagtgataagcttcctaatattttaaataaataatccttagatttcttttcttagtatttatttttaattaaaatttaaattctaccatattttgagaggaagaagttgcaaaaagattacaatatatgaaagaagaaggtgatttttatttttattttttttcatattttatgagataatttgttaggtgttgtgggcaagtactaacatgtgctgtttggtccaagtgggtgggacatgatcaccatttagactccaaagttattgggcaatttataatggaccaaatcattatctactttattaattgtcacatggaccaatccattccactttagggttcaatgattctttcttcatcccaactttacctgtcttcgatttatgcaaaaaaaaaaaaataataaataatactaaagttgttggatattatcttctattttatatgatagctattttttttttaaaaaaaatgtaaaacatatttagtaatatgcactttttcaaataattaaaaattattggacatagtctcacatttaaaatagcgcaatatatatatatatatatatatatatatatatatatatatatatatttgttaacatgttcaaaattgtttcattaaggcttcgttcttgaaaatcttgaaggaaaacacgaaaaaagagaaaacaaagaagaaaaatagaaaaaatatatataaaaataaaaaatcaatttaaaattaataaattgtttttatatactatttcagattatcttacttattttaaattttttatataaaaattaaataatagaaaaataaataaatttctaaccaatttgaattatatttgattttctttaaaagttcatttttttttagcattttgtatctttctttaatactcaacgaaatcaaacaaaatctaatgtttttttaaacaaataatttttaatgctaaaataatttttttaatcatgctttagtaattgaatgtgattcaaaactaggtacttttgtatgtttttccttttcaaactaaaaaatacttttaaaagagagagagagagagagaaggttttggccatggaaatgacaaatttctttttctttgtacatatatagtggaccaagtcatgagcttcattattgtgacattgagcattcgacttcacttttcagtacaataattgtttaagctttgttcccaggcttgtcgtggaagtgttcgaaaaaaaaaaaaatatatatatatatatatatatagatatatatacaaatgattgaaaatatatggtgtggttcaacaagcttctttttcaaagatcctgatatgtaaaagctatagatggtgtgatcaaaagatattaaaacaaccacattgaagatctgtttatgctattatgaagatttatttattatttttttttaaaaaaagtttaatttcacaagttagaaaagagattaagacttgttttataattatttttaaaaattgttctctaatattttataaaacaaaaagtgaatctgaaatatctttaacctgtttttaacatttttaaaataatttttatacatactactttatttttaatcattttatatacttatataattattttctaaaacaatccttagaaaataagttaaaacaattaaaagatattttctgaaaacatccgattatttgtacttaaaacaaaaaataaaaaataattttctaattattaaatacattttcccttttttttgttttaaaaaatagaaaatcgttttcgaaaacacttgcctaaaagatcctaaaattcaaattctaaaaaaaaatgaacaaataaataaaaatagtaacagcaagaaatgaatctcaaggattactaacatcaaactacacccttggaatgaataattataatgaaaaatcatgtttaattcccaatcacacacaaacatttgccaaatgcatatcccttagctaataataagacgaggaaaagaaaaaacaaaacagaatgatagaaagacaagatcattttctccggttctttagatgctatgaaaaaaatggaatgaatgaattgtatgaagcacaccatgaaagcattaaactatgaaattgcaagaatatttataattggctcaaagtaatttccaagaaaaaaaacgataatgaaatgaaaaatacctgttcttgcccgtccatcgtcgtccatctaagcaaaaacttcaaatattataacttcttaatcactaaaagatcaaggatatgaagcacaaaatgaaatcctactctctagctctagacaaataatggagcttgttcttcttcggttgcctcattggccaatatatatacatatatatgtacaaagctaaaccattattcgcaggcattcaccttctaataattaactctctgaccttcataaattccatagtgtacaatgccccacacttagaaataatgactaggtttgtacttcattttctactcaattttaaccagattttatggaaagcagagagaattgtactaaagatgaaacaatatgtttctttccatcagtcaatctatttatttcttaatttttttaataaattgccatggtctttttgatgacctacttttcataaaggcaaagaaaaaaatataaatataaaaaaatataaaaaaataaaaataaaagaaggggatatattgcaacccttaaaagaaaaatgaaacacaattagccatccttgaaatgatccaaaacatgatggagtcaagctccaaataaaactgataccagtgaagcctttagatgaatgaaaacccatcaaaaccctaagtacaaggtttaaatctcttcaaagccacctctctgcaatcactacaaatttccactcaggtcaaattcccacaaccctagattttcaagtgctctccatagtgtcttctcatatttcacatcaaatatatctttctaactttttgaacgtgcgctttataaagccaacaagacgtttggtctccccactactttatgacaatttataatttacaaaaaatggtaaaatgatagagtaataaaatacaataatatgaaagataaattgcaactctaaagtttcatcctcttatccccctacattgagacagaaaatgattggcaaaagatgtgcatatattaatgtagaagtataggaatacatagattactcctacacataaggtttgatagttgattgctcttaatttgtgggtgagattgaggctttcttaaaatacctttacaagatggtgcttttgtccgaaacaccagtcatggacacaagaatggcaaaacgggacttcaacaatagtttggtaggcacatcaacaaattgattgttagtggacatgtgagtaacatggaaagaaccaatagtaactatgtcccacataaaatgatagtcaaaagtaatatgcttcattttttgaatgaaatatggcatttggacacaagtacgtaatgttaatgcatgttaccacaaagaaggtgaggaggcttgggaaaagagggatacttaactcatggagaagattggtgatccatgtgatttcaatagctactgaggcaatagaatgataattggttttagtagggagtgagcaacaatccgttacttttagagcattaagaaattggatttcccctaaggaagagaacatatgctgaaatagaagtacaattatcatgatggcctgtctaatcagtatttgaatagccattcaagtgtagtggttagatacaacgaagaaggagaccatagtccaaagtgtatatgaggtatcgtaggagaaatttagccattgtctggtgggtttgatttggagcaggcatgtattgtgccaatttgttaatgccataagtgatattaagtttagatatagagaagtattacatgcttctgattagactatggtacttagaggcatcaacttgcaaagagcaggaggtcattggcatttttttttttagagaggaatagcctagatgttgaaggacttacatccacaccaagacaaaaatgaagatgaatgtgatatttgattgagaattgattgaagagggtggtattaacatgtcgaataaactatagagagttcccaaaatttactggttacccatatggatcaaggtcgtagcaagaattcacaaatcctaaagataaaataaaggtcttgagttaagtgaaccaagtctgaggtccttacttcaagctttaagctaacttgtgaaagcaatagacatgattaggtcaagtttgttcgatgaagaaaaggttgcatgtgacataaaacttcttcatgaagatgcccatagaaagatgcattattaacatctaattgatgcactccccatctataagaaagagtaataaagagaataatttgaattgttgtaggctatattacaagagtaaatgtctcatgataatctaggttaggtcattcatgaaaaccctagcaaaaaggtgagtcatgtattgagcaatgctaccattgagatttcattttatatggaagacctatttacaactaatgacattttgatgagtttcacaaggaattaactcccatataccatttaaaacaagtgcatgcataaagcttttcacacatagcatttccattcttcgcgtttaagagtttgggttacaattatgggtttaggtgttaaaagggatgagacacttggggcaataagggagaaaattttatttcacttgaagatgttattcttgaaacttttctacatggtatgagttagatatagaaagggggatcaatgccaaagagtatactattgaaaagttgttgggaatacctggatatctccattcctagctttggatcattaaagtgcatgacaaaactttttttggggacctttagatctaacaagtagaagcaagagcatattaaaaacttagatctaaaggttcatagggagggagagttgtttggggctttttgggtttgggaatttacaaatctacccttcattagtcaatcacgtgtacaacatgtgatatatttgtccacttaaaataacaccatccaatgaaaaaggcaagtgctacaatttaagaatcttgggatacatgtattcaattttaaacctaagagggcaatgtgcaaaacatgggataggttgaggtgtaaagtgtatttaacccttttatttattatgactttgattgcctttatttatccttattgacattaattatcttttgagcattcacgcccttattacttgcattatacattacttagatgcattaagagttgtatagaagattcaagtcctgagtctcttgcaagataatttgttcaaaatcaatttatggattagggtaatccatcagagacaatagtgcattacctcttaattaaaaagatgatttgtcttgatcatcaagatggttttcctatgttgaatacactagtatttataattacacattagacattatttgtagtgaatcatgacattggttatagggtaatcatgattcaccaagcttctacactatatagatttttaactttgaaagtatattaagtctatgctcaaattaataaaaggttttagcctatgggtaagatcttaaggtggttatatattctttataaactgggttattgttgataaaaaccaatagctataagtattcatgataaaggcaccatgataactaatgagattgagatagtgtgtcatcttggtatcatccaaataacatgtgcttaggaaaattatggttgtgtggaatttgacatattctctttgtgagctaacatatgtgagttgatcacataataagaggatttgtaacttaaggaatggaaagacaatcttgagaggatgatagtacatccctcattagattacaaataccaattcctagggagcttacatgtagtagatagtaggtcacaaactcaagctttgtgtcgttgtaatatcatatgataatgaagtttactttgtgtagtggcatgttgggtcaacttcaaaattagattttgaggaagctagtatttttctataggtcctagtgatccctgtttgggcttctaatttatagtggcacatttatttgaggaaagtattgatttgtaatttataagtgtgcataaaggtgttttgataaaaatacaaggtagcactagattttatgaatgatatttttgagttaagctagttaattaattaaaacccaatagaactaattaattaattgattaggacctaagttggatgattggagccaaaatatatgcttcaatgacacatatatgacatgatttatgcaatataaaaggttcaaatcatccaacttaaattaaattgattataagatgttagttatgaatttaaattctattttaagcctaattataggtttaagagatgaaaaaatgataagtgtcaaactcattatcaatgaaggaagtaaaagaggttaaacatgcataatcgagagattagggccttatgaaccatgaaaagtctaagcaagggtataatgagcgagtcataggcatgaaatattagcaacagatatcatggagtgagatagagtgcagtagccataatggaggaggtttaaagtaaatgcaatcaagttcacatggaaatttggaactcgaaatctggcaacaacatgttctttgaatttgaggtgaaattttgagtactttctaatgtcattttaggttatgttatatattgtttcaaagatcaaggagtcatcaaacgatgtgcgaatcgaagctaaaacaaagaagttatgcatatttgaagcgaattggacagagaataatgctaagttcaaaattgttaacttgaattcacaatggtttttgatcatttagaactcaaaaaaatgcaatgaaacttttggctgagcttgagttcaaaccctcttacttacttcgagcaagagatatgcatttcaaacttgaaaatatggtaaacatgaatgagtagtgagtgagtttgaaattcatagtgaattttgaactcaccatggtgatttcgaattggtcatctttcttccacttatgagttcaaaattgatttggaactcctctcaatttcaaatttagccactggtgatcaagtttgaagctttgaaatatgtcgaaacaagttccaaatggcttcatttaactcaaaatgcatgatactcacttagaactcgtaatattttaagtcttctacgttatctatgacttttctttctaataagtggccagtggaagtgtgccacatgtgaggttattaaattcactatataaactcttttcattctaggtttatgagagaaaatgggagaagagaaggaacataggtaagaagattgatttattttcttaaaattctttaataaagttttaggttttattttattttccttttcaatctttccattttattttcttggtaaactaaacatgggttgtaagaagaaatcatccaccatgtttagttaactggattgatctgaaaatgctaacatgaaagtgaaggatccaaaaaagagtacaaagaaacggcgatgtgttgaatgatctgattatgttttcaacttttaattggtaagaataaatcctctatgttaaatctcctaaaataaattatagaggattattatcaagatataagtgattcttaagaagatcttgattaccagttattataacttgattaacaaatctaatgatcaaatttacaaagatatatatgtacttttaattaaataaaatttaaaataaaaattaaccgtcatatctaattggtttgagttataaatcatgaatctttagtcctacccttctgagttttatcggggaataatacaatagattattatccaatactaatgattcttggtaacttttgattattattatcctaattttctctatccttatctttaccaaaacaaagttacaattagtataaaaggttaaaaagttttaaataattaaagaggacctgtgacccaatcctctcaaatatttcaacaatgtcaaaaaatggaaatgagatgagatgaggcaaaagttggtttgcagtagactccaagtcctttgaaatttatgtggatgtgtttggggagaaactcaaggggaccattgtggaaagaagtagaggttttacattgtggatcaggcttgggagtctcggtttgtgttgtctgttggaaagagtggaggtttgttaaaagctaggaggatggatgtaggaagtttaaactggaacatcgtgcaaataaagcaggtaggttcttattgtgttttgtggttgactcggaagcaaagaagtattgtttactattcccggaggagaaagacattttgggagattgggccttattggcttaaaagctccactcttttagaatattaacaagtgatgagccaagaggagtctttgatttctttaggagaaagagtagagttggggtttttgagggaaagacaaaaaattcctatgttgatgcagtgaaatcaagagctagaagattaggagaagtagtgtggctatagttgggggaaaaagatgtgctaagcttaagggagttgttggaccggtgtcaagttggaaaatggggagtgtctctagtgtcagctccagacttgtttactttaggcacctggggaagatctcattggaaccttaaaggaggggtgaagtttgcgaggctaggggcccccttcatattgatcgagtttgagaataaagcagaggcaaaaaaaagtgttactaaaagggcttcgttgttttaaggaatcgtttctacacttggtaaggtaggacccaaaagtagggtgttctaaaaattgtgagcaagttaaggaagcttggatgagagtagtaggtttaccgttgcatttatagagtcgagaagtgtttagaaagattaaggaaggttgtgtggggtttgttgcagtggatgaaaacattgttgcttttaaagagcttcaatgggctagaattttagtgaaatctgagtggttaaagtggccaagctctttgcaggtggtagttggctcttcttgtttttctatttaactgtgtcaaaagttcttccagtgattagaagtgggatgagaaatgagtaggaggttagggatgatggagggatggttcacacgccatttgtaatgtggagtaagtacagactcattggcagtctgcaaaggtggctatgacgtgcaaaattggagaagtttgttgcagaaaagataggaaggttgcttcctctgactgtgtcaacaagagggcgaatgacaaagggataaaaggaattgtggaatatgataaagagaaggtctcagttgacgagcctgttgcccaaggtagtagatctttgggttgggttttgaagttggatgtagagaggagacccatctagtctgaggagggccaagccagcagcactttaaaagaccccctggaagtgggtcgacccatgtctgagtctttaaaaggtccagtgttggtgagccaaccctcttttgtagccttgaatagggctagggctcgcgagggccttagagacgttgactgtgggaggctatacggggatgtttttggcatccaaatggggtcatctccactggttccaaatcttacagagattaccaacaaagctttaatggaagaggccttcaaatacacagactatcatccttgttctctgttctctttggaaaagcgggatttttcttcttcttctacttcttctaggcgggatggggcaatcgtgttcattgatgggggtttcgaacagggttgtgtttcagaagaagttggggtagtaggtttgggccctttaagggtgattttggcgaatgggagggagacggaggtttctggttattcgggtaaggttattggagttgttgataaggtaagagaggatgtttcggaaagggctatacaagaggttgtggaggagatggtcaaagcgggtgagccgtgttggtattctagttgcttggctaagtttagccgctgcttaggaatgctaacaaaaggtttcgaatgggatattttgattttgttaaaaatgatgaaagagatgaaacatcagaaaaggaaattggatggtaggaaaaagaaaaaattggagtcgtcatagtttgaaagggagttgagaaagctagaatgtactatgaattatcttggagggggaggaggaggagaagtggagggggggggggggtagtttttgcaggtctagatgaagattcggttgctttcctggaatgtaagatgggttaataattgtgacaagagaaaagtgatcaaaactttgataaagaataatagagtggatttggtttatttacaaaagaccaagatctaagaaatgtcaaagagtcttgttcgtagtttaggagtgggaagatttctagattggggagttgtggattcaagggatgctactggaggtatagtggtgttatgggataatagggtgttggaattggtcgacttagaaaatggagtgttctcaatctcttgccactttaagaattgtgaggatggcttcatttggacctttataggggtttatggcccgaccctgaagagggatagggagtgtttttggggtgagttagggggcataaaggttctttggaatgggccttggtgtgttgctggggattttaatgccattttaagccttgaagagcgcaataagagagggagtttgaattcagatatgagaaagttctcagaagtaatagaagacgtagagttaaaggacttgtcacttcttgggagtccttttacttggagtggaggggtgaacaataagtcactatcaaggttagatcaatttttggttaatgaggagtgggactgccgttttagtggatcaaagcagtgtgtctccccgagacctatgtttgaccatttcccaattctattagatggagggggtctgagaaaaggcccctccctttttagatttgagaatatgtgcctaaaaatggagggtttcaaggatcttttgaagacttggtgggagcaggacagctttagtggctcgtcaagttttattttggcggaaaaactaaaggttttgaaatctaaattgaaatagtggaatagagatattttttacagggttgagtataggaaggatttggccttggatcatgtggaattttaggatgctaaggagaagattagcaaactgtctttggaagaattggaagctagaaaagaagcgagggaagaatataaaaaatgggttttgctagaagagattgcttggaagcaaaaatttagggaagtgtggttgaaagagggtgacagaaatacaggtttttttttcacaagatggtcaatgctcacaaaagaaggaataatgtgaacagaattaggattaatggtgtttggttttcggaagagaatgaaatcaaggaagggatagtcagtgcttttaggtttttgttgtccaacccgggagactggcgtccttctttattcgggctgtagtgtgagactttggagtatatggatgcttgtgctttagaggtgtcattcacggaagatgaggtgtttggtgtgttgttgggatgtaatggggataaagctctggggcccgatggtttctctatggctttctggcagtttgtttgggactttgtgaaggatgatgtgataagtttcttcagagaattctatgaacacggtaaatttgttaaaaatctaaatgcaacttttctagtcttaatcccaaaaaaagcgagggttgaagatttaagggattttaggcctataagtttgttgagaagtttgtataagtagttggccaaggttttagccaatagactaaaaaatgtggttggaaaggtggtctttaaggctcaatgagcttttgtggaaggtggacaaatcctagatgcaatgttggtagctaatgaagccattgatttggtcctgaagaataatgagaatggtattttgtgcaaacttgacatagagaaggcatacgacaatgtggattggtcttttcttctcacagttatgcagaaaatgggttttgggaagaaatggattgggtggatcaagtagtgcatatccactgtaagcttctctgtgttggttaatggcacctttacgggtttctttcaaagctcaaggggattgaggcaagacgatccactatcgccttatttatttgtgattgtcatggaggtttttagcttttttattaaaagggttgtggatggagattttattttaggttatatggtgtagggtaggagtgaagaagggattcagatttcccatttgttgtttgatgatgatacattagtgttctgccaagcttctcaagaccaactgacctatcttagttggtttcttatgtggtttaagaccgtgttgaggttgagaataaacttggaaaagagtgaactaattctagtagggagggtagagaatattgatgatctgactttggattttggttgtagagtgggtagtctctcatccacttatttgggtcttcctttgggtgctccgtttaagttagtgacagtgtgggatggagtggaagagcgtttctatagaaagttggtcatatggaagagacaatatttatccaaaagaggaaggacgactataatccgaagcactttgtcgaatttacccatttattttatgtccttattgtgcttgtcaagcttagttagatggagactagagcaaattcaaagggatttcctttgggaaggtggtaatttggagcgaaaaccacatttagtaagatgggagttggtgtgcttaagtaaggagaaagagggtttgggggtcaaatgtctatccaatctcaataaggctcttctttgtaaatggaattggcgtttcacaaataagagagaggccttgtggaatcaagtgattagagggaagtatgaggaagatagaggggaatggtgctctaaggaagtgagagaggcgtatggtgtggggctttggaaaagaataaggatagactggaatttggtgggccctaggattttattccttgtaggtaatggacggatggtgagattttggagggatagatggtgcagggattcccttttatgtgtgtcatttccatcattgtttgctttaactgttgataatgtagtgtgtgtggcgaatatttgagatcccttggctgagaggggttgagggggttggaatccccgtttttcaagagcttgcaatgcttgggaggtggaggaggtagaaagattcttggagcggcttcatgggaagagaatgtatggaggttttggaccgaaacaaagagtgaaaagttctcggtcaagtctctgtaccttgctctagaagcaggttgcccttctttgtttccttctagctgcatttggaaggtgtgggtgcaacctaagattagtttctttgcgtgggaggctacgtggggcaaagccttaaccctggatcttgtttagaaaagaggatggaccttgacaaatagatgttttatgtgccttgagaaagagaagaccatagaccatcttcttctatattgttctaaaacaagggtcttatgggatttactctttaatttctttggggtgccatgggtgctgccttcttcagttagaaagactctccttagttggcatggttcttttgtgggcaaaaagcataagaaggtgtggagagttgctcctctatacattttttggacagtttggaaggcgagaaataaattggcatttaaggatgatgtgttgtcaatctagagactcaaatactcttttgttttttatctttggtcagaggccaagttgtttatagttgattgcgctctaactatagttagttttattgattggttggactctacctaaggttgtttgtggggccaactgggtgttttttttttcctttttggtcgttttgatggtgggtgtataggtatataggtattgtataccttgagtcatttttttagcgtctcttttgtatgtgagaattttctttacctatcaaaagaaaaaaaaaaggttaaaaagttgcctttaactagtaattaatttcattcacttaatagttttaagaatttttttaaaaaaggaaaaaagttttcgatgcaatattagtcttaagttcaattttgtctcgaattgctttgaccctaaatcttaaattttataatgttttctttttttctaaagatttgacactgaattgtaaaactctttcaaacaatttttcttttatttgatttatttaattaaatattttaggaaatctttatttatattttattcatatctatttaatttaaaatttcattatctttagcaaataattaatccttttaatctaaaaacaaataaatacttagagttaatcctagaggacgacaacttagaatattataaaattgtggtaactttatatttggtttttcttagttagagttataaggtatttaggctttactatttaaattcaacaaagatttataatcatgggttagattaagttaccaaagctcaatttagactcaagtcacataaacccacatggaaacctatataaaccaacttaagggcttagagcttcacttttgactattgtcttctagattaaagaaaagaaaaccctagtttccctctagagaataccacctttctcttttacaagagatccatgaaaagactgattgagtaaaagtgtaacaatagagccctagaaaacatgatatgatgtaatggattttagtttcattaatagatttatttattatgattttggttgcctttattatccttgttagcatgaattatatttatagcattcatactcttatcacttgcattgtactgacatagatgtattaaaatttatatagaaaattcaagccatgagttccttgaaagatgataagttatttacgatcggttcatggatttaggtaatccattaaaggctataatgcattatctcttaatttgaaggataatttaccttagtaattagaatagttttcccatggtaagtgtattagtatatgtagttacatactaaagaaaacctatggtgaatcataacattaactatagcctatagggtagccatgattcaacaaactactatactacatagactctcaaccttgagagtatattaagttttcttgaaatcaatgtgaagttttgacatatgggtgaaacctttagctggtcatatattctctattaattgagtcactattgatgaagattgatgacaacaggtgtcctcgataaagtcttcattgtatctcaggtgataagacaatatgtttccttgggtgatcataaggacttgtgatcaaataaactatagttttagtaattcataactagaatttgacatttcctttttgtgagctactgtatgcgagttgatcacataataaaaggatttataactcaaaaattggatatgtaatcttgaaaaaatgataacatatagcttgttaaattacaaatattcactcattgggagactatatgcaatggattgtagatcacacatccgagttttgtcttgttgtaatatcataagatgctaatgtgtagttgaccctttatagtgaccattaaatcaataaatgcaaaaattaatgaattaatttcaatttcatttacaatttataaggaaaaaatatactacataaaaacaagtattaacttaaaaaaacttttgatatttccttaacaactaagtataattagagtgttatttactatccaaatgtcaattaatgctaattatataattaattattataaaattttttattatgatattttaggatatttaaaaatatattttgtataattataaaaatgcataaaaataaatagattttacttaataatatttcaatattaataaaagtaaaccatttaaaaaaacatgaacaacgttccattaagatttaagttaaattgaggtctatattaatatttaagttaaattcaagtccatttaaattttttttttaaatatcatttaaattaattaaccatttatcttccaactcttcctactcttagaaataagtgaaaatatgaaaaagaagaaaagtattgtagacatttttaagagatggatattttattatctttttttaggaattattattattattgtaatatttttccataattttcttaaaacaaatatggaatagaaaaagacgaatttgctaaaaatattaaggaaaaaatttaaatgacaccgttttaaatgaaaacaccaaaaatgtgcggcaatactctaaatacagaaattaaaaacgaagtaaacgacgccgtttctaagaagcctaatagcttcagtgccgcaaatcttagctgcaggggctattatcatcttcactgtagaggagcacaagagagagagagagagagagagggagagagcaa

SEQ ID NO: 11929 - DNA, 9059 bp, Vitis vinifera
  Intron number 1 from transcript GSVIVT01021807001 (locus G SVIVG01021807001) derived from phytozome v7.0 (chr-ID chr1 4; pos 7114351 to 7123409 reverse strand)
ttccacgagtcaaactaggaaaccagggactagaggtacaccccattttgattccttcagtacctctgctcatttcatttacatcatctaggttttttaacaaaagaaccatggttgtagaggagtccatccatgttattttttatgagtctaacaattctctccaagaaagagagaatttttatgatttaggcttggagaccttcatgggaaaattacaaactgaagatagaaggccacaagaagaaattgtaaaggatccaaagaaagaagaatcgcctttgacactacctccttctcaacaagtgcaaggtgaatcaagccaaaaccttcctaaagattggaagtttgtcatcaaacacccacaatatcaaattataggcaatccatttagtggggtaagaactagatcatctcttagaaatatttgcaataatcttgcttttatctctcaaattgaacctaaaaatataaatgatgctctagttgatgaaaattggatgattgctatgcaagaagagttaaaccaatttgaaagaagtgaaatatgggaattagtgccaagacctcaaaatcaaagtgttattggaactagatgggtctttagaaataaaatggatgaaaatggcataattgtaaagaataaagcaagattggtagccattaggatgctacttgtctttgcatgttttaaagactttgttttatatcaaatggatgtgaaaagtgctttcttaaatgactttataaatgaagaactatatgttgaacaaccacccggttttcaaagttttaactttcctaatcatgtttttaaacttaaaaaggcactttatagtttgaaacaagcacctagagcatggtatgaaaaattgagtaaatttcttttgaaaaagggttttaaaatgggaaaaattgacacaatttttttcataaaaaccaaagaaaatgacatgctcttagtgcaaatatacgttgatgatattatttttggagctactaatgtctctttttgtgaagaattttctaaatgcatgcatagtgagttcgaaatgagcatgatgggagaacttaacttctttcttggatttcaaatcaagcaactaaaggaatgaaccttcatcaatcaagcaaagtatataagagatcttctcaaaaggttcaacacggaagaagccaaaacaatgaagactccaatgagctcatctatcaagcttgacaaggatgagaaaggtaagtccatcaactcaactatgtatagaggcatgataggttatttgctatatttgaccgctagtagacccgacatcatgtatagtgtatgcttgtgtgctagatttcaatcttgtcctaaagaacctcacttaagtgccgtaaaatgaattcttagatatttgaaagggagaatggatataagcctatggtatcctaagggtgataactttgaattaattggattcttggacgttaactttgccagttgtaaagttgaaaggaaaaacactagtggaacttgtcatttcctaggacactcacttgtttcatggcatagtaagaagcaaaattcggtagccttgtcaacggcggaagccgaatacatagcagccggtttgtgttgtgcacaaatcctttggatgaaacaaacacttagtgatttcaatttgttttttgagcatgttcctattaaatgtgataacacgagtgccataaacatttcaaaaaatctcgtgcaacactctagtactaagcatatatagattagacaccattttcttagagaccatgcacaaaaatgtgacactacacttgaatttgtaagcacaaaagatcaacttgccgatatttttacaaaacctctaagtgaagagcaatttgttgatattagaagacaactaggggtgatttctttatgatcaaatgattgcttgatgaattcttgttgaatataccttatgattgcatggatttcatatcatatgcatcatatagaaatactcttaggaaaaaggtcaaattttgaccaaaaatcaaaattcctttggcattggacataaaaaattggggatttcaactaaaaagagcaagggaggatcatgagacatgaaaaagcataaaaaaaatttggagcgttgaccgttgaccaagcggtcgatcggttcgtcggggctggggatttaaagaggctcccgtgcttcattttctccactgttcttttccattccttgaagactcttcacattcctacttccaaagaccagtttgggcaagatcttggaccgtttgcaagctttggagttgattttgggacattttttaggctagggtttctattttgggagtgattcctctctgaccgcatgcctcaaccaagttcagttccatttccgtgcgcttagagcttctggttagatttcattatcccttgtttgggtttgttctctcttccaacttcatttcttcattttccgcttttctaatggtgcctaggagagagatggttgcctctaggggttagggcaatctccctactgagccatctcagcttgaacagacgcaggctttccgaaaggcaaggtatgacacaaccctcttcagttctgtcgaagaatatcaaagatacaagcaaaaaattcgcccaaaggaaagtcgttccagggataagtatcaatttatctcaacttcagtacttcgggtttgagagactctttagtcggatgggatgactaccagttgtgacgatttttgagccgattttcctgactctagtgcatgctttttattcatgggtgacctatggacttggaagaccgatcatgtctactgttagaggtgttgagatcagattgagcccgaagagcatttgtcgcattttcaacatcccttcaattggactccaagtgtatgagtccaaggtttggcccactgtgccgggtttcgaacctagagaggctattcagagattgtacggccttatagacgcctagaggatgggcaaaccattggcacacagcctgatcgtgaccaaccgagtccttcatcacatgatctgctccatcctattgccacgaggtggacatcgagacgaagtctcctaccttgaggctttcatagtggactccattctgatgggaagacagattcatgtagggtatctgatgatgatgcatatgatatcctactgtgggagcacgacccaagtactcccctatggccgcttccttactcgagtattcaaggatggcagggttgatttgagcaaatagacagactttgaggcccctaccgtttatgacacttatgatgagcagtccctggggcggatgaagtttgagaaggcccccaatggctcctggattaggagagttaagcgacctccatcataggctcggggacagggatagatgcatcctggattagaggaggaggccgagatcaaagagatggagggtgggttagaccctcagagggactttaagcaaagagggcccgagcttgacattcatcctccacttcagttagagggtattcattttaaggccattttttcagagcctatgatgaatgagtcttcttacacagccggaccatcctctcagccatcattcaccaagattcctcacacagagataccatctcaggcacctcacgctcttgatcatgcacattggatggatttatctgctcagattagcttacttggcactcgtatggaggagcttgccatagttaatgatactcgattctactctatggaggatcgcacagataagtatcagactggtttcacttctcattttgagcgcttccaacagagatttgagcgtatagacgagcgtatggattagcagcagattattgagcgcattgagagtcgctaggagagtcaacatgaggagatgatggcttacctccactccgtgtttctacctccacccctcagccttgagtttatctagagtttcccctcaatttcttttttatgttgccaaatggggagaaatatctaggatctaggagaccctcatgcatatcattgtcatatctatctggattagcatatatgttatgttttcgtgtacatgtgatgttaccatatatatatgatatgctattttcatgatccattgtttcctattcaaattttcatgctttacattgtttcctattgaaaattgattgattgatccatgattggtttaagggggagatttttttctcctagataaccaaggtttgtcatcataaaaaaaagggagattgttagcccaagggttctcctaatcgggttttgatgataacaaaccatgattaagtgactaattggtttaatggttaagaatctcagatataaactaaaaaattcaccaaatgaccaaatggatacaaaatcgagacttttggaagacttgtaatcataggaaacgaatgtaagatgaatgcatgggtgcacttaggattttcataccatttcatgcatttttgaaaactcggtttatcccttaaactttcaatttcattacaacccgagttttatcaaatataccttaggcaaaatgttttaaaattgacataataattaacctaaagacctcgcctaagtgttagaaaataaaggaattgaaaaagataggttttcggggccaaaaggctcaaccggtcgaggctatggccaatcggctcaaccgattgaggaaccggtcgaccggttgaggaatcggtcgatcggttgcccttgtccagtcgaggtccggtcaaaggatgcccaaaatattctctctcctagttgaggttcatcctttcccggtcgaggtctggtcgaggcaacagtaacctatcaagcattaaatgctctaacggctagtaaaccggtcgacccctagctcgatcgatcaaagttaccttttgctgtttttgactcccaagcttagaaacctataaattgagagctccacttcatttattgataagagaacacctgtaatcaattgtctacctacatgttcttgaccaaaaaactctcatttctttcttagtgcattaaatcatcacctgcatatcctttagtgcactcttgtgtgtcatcctagctttgtcttgtattttgagctatccttaagctaggttgagggattcattcttgtaaaagctgagttttaaagccttcaagaggtttgaatcttgaagagattgtgtaagagccaattggagtcggaatccaagtgtaagaagattggaagcttggttgaagcttcaagttaatggaaccctcacttagttaggagattgaggagagtggacgtaggcaatgaagtgtcgaaccactataaaacccgagtttgaattctctaactctatctctttatttttgtttatattgtgtttgaacttgttgagtttgaaaagatttttaaaaacccaattcatcccccccccccccttttgggtgtttttcttaattaagcatagcctttattttctcaaagtcaactcaaaattttggaacatgtaatgtattatctaaaatcaaatcagaaaatagtttgatatatcatgtggacttaatcttcgcttttccattgttaggtaaataaaaaaaaccaatatgagtgtttaatttaccatgtgtttgtgggtatttggatatatgatctatctcattgtcattcgtactccaatataatgttgaaaataaatcatgttgagtagtattataagtgggtgtgaatgcaacttaacatttgcaaagaactaatcattaccattttctttacgaaggctatgagttgatcatactcctcggtggtgaatgttgtcatttccatagttggtcctctaggtggtttaatggtgttggtttgaatgttatgaataggaagcctcttccctattagcttcactttatttccatacaatttttcgtctactaggaatccctaaaagtagaaacgatggtcaattaagtggtcatcttagtcacaatggctacacttaagctaccttctcaaagttttgcattttcttatggcatgggaagttgattcatttggaatgcatgagaggattacattgcttaatggtcaacatttgtttcacatttgatagttatgttagtctattgttcttgttggagcacaagagcatgaatcttgtgagtatctagtaaaggtcttatcatcaagattgattcatggatggttgcatatgattcattcagtccaataagaagttatataactctttcattttcttctcatttagcaagggcattcaatcctctacaattgtagcatagaggctcatggtatgaagtcaattcatcctaaagagtcattttagtgtagtaaataaggacggattgttgtcattatcgatgattgtcatttcttgtcaaatttgaaaaattttagaatcgtctccttatgaaaacctctcttcgagatcttcccaaactttggctattattgaagcataaatgatagtacttgctatagcaagatgaattgtgtttattatctatgacaagaacatataattgtatcgttaccatatatggaattttagatttgtagatgctagagccttaatggattcatttgcaaatccaatcttgttttttgtgctaagattaatatgcatagcacaactccatcgctcataattgtatcattaaagtggtttagagattataaccatcctcaaatgatgtaagtggtccaaaataaggggttctaaaacatcaattgatgtctttatagttttcatgtcaggatgaattgcatttaggatccatgacaagaccatatcattgtatcattgccatatatggaatttcgaatttgtggacgccagagccttagtggttccatttgcaaatccaatcttgttttttgtgctaagactaatgtgcatagcatggttccatcacctaatggttgtatcattgaagtggtttagagatcaaaacaatcatcggatgatttgagtggtacaaaacatggggttttagaaacatcaattgatgtctctattgttttcattttaagatgaattatgtttagaatccatgacaagaccatatcattatatcattgccatatgtgaaattttggatttgcaaatgctacagccttaatggatccatttacaaatctaatcttgttttttgcactaagacagatatgcatagcacgactttattgcccatagtcatatccttaaagtggtttagtgattagaatcatccttaaatgatttgaatggtgtaaaacaaaggattcaaaaacatcaattgatgtctctatggtctttatttcactcatgatgttgtgtttgtggagcaaggtgttttgattttgggtcaccaatatcgagttctttgatatcatgtgaaaaatagtaagaaagagagacaaataggaagaatttctcattgtatatagttaagaattagtcacataagttttatacatagtgagaaaaaactattctaggtatatgttttatgattaattgctaattacaacaagaattcttataattattccaagccataaatataagaaattatacctacaatcactcctaatcattgttgtacacaaattatatgatcaaaatacaaagtagttttttttctttaatattaattctataaatagagggttcctcttagttcaaagcacataaaaaaaataaataaaataaaaatcaaagaaactttggaaagctcttgaaaattttccttgaagacttaaaatttcttgaaaacttcaagaaaattcaaagatttcttaaagaataaaataagatttgaaaatttcttaaagaaattgagacttcaagatttctttttattggaagaattcatgatttattgtttgataatgaaacctcttttgatctaaattaagtactaaattgtttaaaatggtgtttctatctttgtaagaagaaattaggggataatgaatattgtcccctcaaattatcaaatttataattttacacataatctctttatttgataaaatttatgtgcacaagagtgtttatgtttatccacatcatgtccatgtgtgtccaattgggatgttaaggttgcattttgtgaccttgttaagctgattgggtaaggccaagattcctaggcctatccaaatatcttattgatgattcattagtacatatttttacaacataaattaatataattttgatatatggtatatttagtcaatgttaaatttttattttatttttatttttttgatctttaagaccctcatttaggttgaaaacatatgacccgcaatcaaaccaagataggcaaacacatctcctattaattataatacattttgatcatctaccctatcctatgctcacccctacccacgagcctctaatccaaaggttgttccaaattccacttgaacttggagaagtttcattgaagtatgagtcacactaaacttatagcaaagtttaaaccaatttgttatgaattccatatcaatcaagacaaacttttgaaatttatttaaaaatttgaaataaaaataaggaaaaaaaatagaataaataaaaaacaaaccctaaagttgggtttgtaattaggtgaatgtgactcactaaaatttgttaggaaaagacaatagttttcatatagattgatgctaaagaagcaaaaggacaagaaaatttcaagttgcaaaatgctctacatgaaatgcaagtataactgtaagaagcctatacaatagttatcaaggagaaagaagcagcaaagattacaattgaacatggtctaccaattatcaaagagtttatagatcataaccatacaatgaagcatattcattagtccttatggcatgtagagacataatatcaacacaacaaattgagttagtccaataagatattgtttgtttgaaatgtctaaaaattgtcaagtacatttttttttctttcctaattaccaagaaaaccatgatgtactaataaagtctcatggaagacaagcaatttgcttgtattgtgtacaaagcacttcttca

SEQ ID NO: 11930 - DNA, 11467 bp, Vitis vinifera
  Intron number 7 from transcript GSVIVT01025372001 (locus G SVIVG01025372001) derived from phytozome v7.0 (chr-ID chr6 ; pos 1308886 to 1320352)
tgcttgattttctgcagtgcatttttggatttcaggttcgattccatgactgttgcttttggggttgtttcatccgtgcttattttgtcagatctatgttaccttttagttttggagtttcaatgtgatattgtttagcttatctttcatgtgtatctatgatattgtttggcttatctttcatggatgtatgtatgcatgtcagtcttgaattatattggatagctctagttgaattatattggatggctgtagggggaatctaattagtagttgtggaaagggcataaggtactttgtatacagattcatgagaatttctgagtgcttgagcattcaatcaattttagattggatgtataattttatataaaataggaaagtgcaaaaagaaattctttcttttcggtaatccctagtcaatgataggctgtctcctgattatgtatgtatatatgtaggtatgtatgcatgtacctgccgttacctatatattaatgtatccatacatctacgtgactatgtttatttgtttgtatatatttggtatatgaaatcacctacaaacactagggggaatctaattagtagttgtggaaagggcaaaagatactttgtatacagattcatgagagtttctgagtgctcgagcattcaatcaattttgaattggatgtataaatttatataaaatagaaaattgaaaaaaaaaaaaaaattatttcttttcggtaatccctagtcaatgatagatcgtctcctgattgtgtatgtatgtatgtacgtacgtatgtacctgtcattacctatatattaatgtatccttatagatatgtgactgtttctttgtttgtatatatttgttgtatgcaatcacctacaaaccatatgtatgtatgtatatatatctacgtgattatgtacaaaccatatgtatatttgtatttatgtatgtatctatgtacttgtcattacctatatattaatgtatccatatatctatgtgactatgtttctttgtatgtatatatttggtatatgcaattatctacaaactatatgtatgtatgtatgtatgtatgtatgtatgtatgtatttacttatcattacctatatattaatgtatccatatatctacgtgactatgtttctttgtctgtacatatttggtatatgctatcacctgcaaaccagatgtatcatgtaaatgtgggtatattgatgttcacgtggggttgtcagagttgaacctggaacaatcagatttgtggcttgccccaggctcactccttatcactgggccatctgtttgggtttaaacatttacattttcacgtaatgagtctacattttagatctagtatatcagatgatccctagtccacattaccaaatgatgttttgaagttcagcattaagttgcagtaaggacacttattggctgttttgttggtaatatttttctaaaatgaacaagtgtgaatgtgttggttggctctggatatcttggggaagcccatttactgctaatagtttctttcctattttgagtttgataaactgctgtccatcataataacagtcaaagtagtattgtgaattctttggtcaatgactaggcgtaaggtgttttaagctttaataagaagttgctttggcatctaaatgaggctgtgggtttctcttctttccattattgttttgaaaatatataaaaaatgttcaaaagaaaaggactgaacaagagatagtcctagtacatgggaaaactcaaaatatgaggaaagatgaactaaaaggttggaagtttggacatcgtttccaatgaactatagcctttcaatgaaatcaacagaagaaaagccacctacaatcacggactcatgagaccatgaattttttttttgataagtaaagaagagtatatatattaagaagaggcgctaaagtagtgacccatgatatacaagataaatacattcacccccatagctgaaacataaaaggctgtgaaaaaggaggtgcaaaaaaaaaaatgtccctaccctcaacaagatcccaaccaatcaatgaaaccaattgaagtcgaaggaccatcctttataaacatcttagtcttcgaccaaagaaagtaaacaaaagaaccttttaccctttggatggatagcatatcatcttcaaaggcaatcctattccttgcctcccaaatcgtctaaaaaatgcataaacggcctgctcttcaaactttcttacactttttgcccacaaatgacccattccaacccaaaagtgtttccctcaccgaagaaggaagcacccacaatgagaaaaaggaattttgtggcttgaagattgataagctcatcctctagagaatatgacaatttcgctcctttcggatgctttcaaaaggcaaaagggacataactctccaaacccttctattctcttttggcacaaggattctacaccgactaaatgaacaatcctttatagagggaaaaagcatccaagatgtgtcaaaaatagagaaaagaagcttttagaggaatatactaatcttatgttgaaggaggatatgattagtagactccttgcgaagcctatgacgaaaacaccaatgaactacattccttcctttattggtcaattacatgtatctcttcgcatatagcttcctgtgcaagaacacacttcggacaaaacacacaagccttacacttaggattttttttttgataaaccaagagaagaaatcatattagaacacgccaaaaacagggggcgctccctacgtacaccgacagtatacaaagaaagcctcacccaaggcaacaaaggaaaaacaaaaacctagaaaagccaaagacgaccaacaaatcaaccacccaacacattcatttttttttttttttgataagtaagcagatattagattaaaaaggcaaaaagtcacacagcatacaggacgtatacaaagcagccaaacccaaaaaccagaagaagcccacaaccacacctaccctcaagtggacgctagccactctagaaaacctaagagtgaagaggactcctctccaatatacaccctagcccaactccacagaaaccacccaacacattcataaaagagagatagtccacgtccatgatctgttgagaccattcaagaagagaccgaaggaagagattcttcaagctcgtatctgacttctcttcttcttggaacactcttctattccgctctccctaaatacaccaaaacaaacaaataggcgccattttccatactacactcctcttcttttctaggcccttaattttccattcaatgagcaaatttctcactgagttcgggaacacccacaccaccccaaaagaagagagtaccacagtccaaagctcccttgtcttaccgcagtgaattagaatatgatccgccgattcctcattctctttacaaagattgcatctattaaccatagaccaacccctcctcattaacatatcaacagtagaaattttaccccaaacagcttcccaagcaaaaaaaacgagttcttaaaggggcacacgaaccccatacctcctttgctagaaataaggggctgttctccacttttaaagatcgatagtaagatttaacactgaactttcctttcctctcaatcttccaaattagagaatcctctctttcttgaacctttactgcagagatgtgaattagaaaacgattcacctcctccaattcccaatcatgaaagggtcttctaaagtgcacctcccatcccccgccaccacctccttgtctcccccaaagatcagccactatagcagagttatgggttgcaattctgaagagcaaaggaaagagctccttcaacttagaatctccaacccaatagtcccaccaaaatctgctacgtctaccatttccaatacgaatactagttttgaggaagaactcctcccatccctttctaatgtctttccaaaggctcatctcataggactcccttacctctctagtggtccaacccccttccccctccccaaatttaccaacaatgactttcctccaaaagctctccctttcgaaagaaaatctctagagccattttccaagcaaagcagattgaattccttcaagtgtcttaaccccaaacctccatacttcttatctttgcaaatagccgtccatcttaccaagtggatccttcttctcccctccacatctccccacaagaactccctttgaattttctccaatctaattctcactttccttgggattacaaaaagtgacataaaatatatggggagatttgagagggtgctcttgatgagggtaagacgacctcccttagaaagatattgttttttccatgtagccaattttctctagaatctttcctctaccacatcccaaactctacatgaattatgaggggctccaagaggtaagcctagataagtagtagggaaattccctacttcacacttaaaaaccgcagcggctctatccacatcctccactcccccaactgggataatttcacttttcttcaaatttatttttaggcttgaaactacttcaaaacaaataacaacccacttccaaaaaaccaacgggttcctatcatcctcgcaaaaaagaagagtgtcgtcggtgaacaaaagatgggaaaccgaagccccttctccattttatccccattaccttgaatcctctaatgaaaccttcctccttagcttttgagattaagctactaaaagcttccatgattagcacaaatagataaggtaagagtgggtctccctgccttaggcctctacaagttgaaaaaaattgtgggagtgccattcaccaaaactgccattctcacagttgatatgcaaaaaaatatccacctacgccacttgggcccaaaccccattttctccaagactgagagaaggaacctccaattaacgtgatcataagccttttcaatgtccaatttgcacattagacttgcatcggcgcttcgcttccttgagtctatcgcctcattagctaccaaaaccacatctaatatctgcctcccttccacaaaagcgttctgactgtacgaaactagttttcccatcactcttttcagcctatttgctaggactttggcaataattttataaagactctccaataggctaatgggtctaaaatcctgcacatcactagctccctctttcttcgggataagcactaaaaaagttgcattatggctacgaaaaatagtattctacacatggagttcctcaaagacctgcatcacttcccccccaacgataggctaacaaaacttccaaaatgccaacgtaaaaccatccggccctagagccttatctcctcccaactccgagatagctttgtaaacctcctcttccgaaaaatgcccctccaaagactcattatccaaagcagcaaaagttttaaacagacttgactccacatctggtcttctcacccgaggttcctcaaacgaggatttaaaataagacccaatcccttctctaagctcctcctcttctttactcagctgaacacccttaattgtcaggttgctgataaaatttcccctccttgcattggccatatggtgaaaaaacttagtattgctatctccctcctttagccaaagagccttagacttctgcctccaagaaatttcttcaaggatggcacagtggctgaattcatctctagctatccgctgactattcctatcttcctccgaaaaaggaccaaacctttctaaattgtcccaaaagtttaacttctccaaggcagcatccttcctaattgtcacattgccaagggcctctttattccacctcttcaaatcatatttcagagtctgatgcttctttgcaagcacaaagctaggtttccccctaaaactgtaggactgccgccaatctttaaacttgtccatgaaaccttccacccttagccagatattttcaaacctaaacgggcttttacccattctcatccctccacagtctaacaagattggccagtggtcaaaaacaggtcttggaagaagaacttgcattgcccctgacacccgttcctcccaatctcctgaaaatagaaagcggtctaaccaagcctttagggatcctccttcccctccattccaagtgaaagttccacctcccaagggaggatcaactaattcaaactcctctataaagcttgaaaaatccctcattgtggttgacatctgtctgccattactcttttcaactgggaacctcactacattgaaatcccctgctatacaccacggatcacctcaaagccccttgacagcggctagctcctcccacaactccctcctctccttaccgttacacggtccatataaaccaaagaagacccacacaaaactctcctcgcaatttttaaaacggcaagaaatagaaaaagagcccacttcagcctccaacacttccaggattctcttatcccacatcactagcaccccacctgccgagccccttgcatctaaggaaacccaccccaaatttttaccaatccccaagcttcttacaatcctatcagacatttccttcatttttgtctcctgaaaacacaccaaatctggtttgtgtcttctcaccatcgacttaataaccattcttttatcagggtcatgcaaccctctaacgttccaggacattattttaagcttcataaggaaccacagtaatttgccttcccaactccccttcctctgcctctcttccagccagcccatcatagttaaaagtactgacaagcttcttcagctccctttccttccttgaagccgacaatgttcttctcttgctatcattaggcttcctgataacacctcttctattctcaatctccttaaggattctcaaaatgtcctcttcaaagccttcaatcgagacccccaccgtcttacaaaatcctaggaatttcttatttacctacggggatttgaccttttccccttcttctgctacagttatgtgaagaggtggcatctgaagctccttaccccgagacttaggggttaccctctttggcagggtgaaggatcgaccatccttgaggatcacccttagcggcacctcagtctccagaggttcatcacacatctcctcagattgccatgccaacggatactccacagagtcccctagtcccgaagtagaaggagaagaaaagctagaaaactccccggacaccccccaaagtcgatctagggaacatacctggcgaatgatttttcagaggcgattccctgctgccttggtccagcggggtcgccttcttccctgagctctccccagcaaaacttggcgtttgtgactccgtcttgagctcccccgacttagaggcagggagccctaggattgagtcttggattgattcttgggttagcccctttttaatcccttctaagttattgggcctgacaatcacaacccatttccctttctttttatataagcccaagcctggtcttttaaaagggatcttggcccgatggagactgggcttcccactgccagacgaccctcccagctcggcccacttagaaatttccccgcccagcccttccacaggtctccttccaccgcaaaaaatcagctttccgtccctcctgactcctgctgccgacccactccctgtcgtgtcactcgtctcctccaccaacccagcagcctcttgcatagaagcagggtcttcatagcctactatcctagccttttcctcgggaatccggagctcccatccaaatactccatcacctatagctgcaccagagtttccttctccataacacatatcatcttgcgtgactcacaccccccttcctcctgctgaagggaggccctgttctctggttcatcttccctttgaatctttaaactattcgccacctgaagagccgagaaccacaccgagtcctcccaccataacgggatagagaatgaagcaaaccccgctattacctctaaacttccaggcacctcctttccattgttcttaacaaggattctagcccccttcctataactagcttttttggtctcctcatccacatctacaaagcccccacaagcatcacccttttaaagaactccatgctccagaactgaagcggcaaccctgggattctcacccaggatacatccctctggaattccctcctagagcaccccacagttggagcctaccagtctagagataatcggacaccattgaggcatcggctcccctcctccagcactttttgagcatctctcactttagaaaattcaaaaagaaacaaggaatcacttaaggaggctacactcacttgaccactgaaactccaatgggtgtttgcccaaatctccaccacccttaagtcgggagctgcctcattctcggcattccatcttcccaccaaacagcgtctgagatctttcagtttggaagtgtaagcctcgttccctacttcaacccaaacttcctcacttcttcctttagccttcctcttgaatgcatctacatagcttaaaccgggccttacaagagaagtatcattccctccaccataggtgccagagtcctctgctccatgcttagagccatcaccaactctagctaactccttcaacttgcttctgaataagtcccaacccaagaggtcaaacccctctggtatttatggagcttacttttctccctctttggagtttcatgggtgctcccctcttcaataggagaggtgttattggggtggttagggccttgtgtgggaaaggaaaggaagaaagtatggctttcagctctcttgtgccttttttggattgtttggaaggaaagaaacagtagagctcttgaaaatgtagagcattcgattcaggggtgtaaatcggttttactttgtaatctatgggcgtggactagggggttttttgtttctggtctcacttccgttgtagattttgttgattggttaggcaatgggtaaaggttctttccctctattttgtatacctcctgtatacgttgggggtgcttccttgaagtgcctctttttattaatatatttctctttattcatcaaaaaaaaaaaaaaaaaaaatgaaatatctcctatcattttctgaaaggaccgaaagcaagagttaacgtccaacatcattttgatgcatttctattctaaacctcctacctcgatcattcacatctcccttgaatagtttcttccctctccatttgcatcatgcttcaatcgacttcagaaaccacaccactacccctctacttgccttgatccatctacggaagcctttacctttctccactatctgcacctcacccctaccctttgattagacaatcctcacctcaaaggaattggagtcaatgcggaagaagcaagactccatctccctcctttggtttttcttgtcttagaaaatctttacacctaggatgctagaaataattataacaacttgtcatatttatccttttttatgataaacatatcaatgtaagccaacaaatcaactgcaagctccaagtcctaattgtgaaaacattagatagaatctttgattctagggtttttgctcattctttctacaacaaacatttgttgatgaaaccatgatgaagatcctatgtgctgttctagatatgaagccacttagaacctcaataagcaagatgcaaagatatggggacactacatctccttgccttaacacactagaactttgggagaaaatttttgggagtaccattaacatgaattaaacctcatagttaaggtatataattttcaccaagcaatttatcaattcataatcctattctattcaatgcaataattgagaaatcctaattttcatggtctttggctttcttaatgcctaacttgcaaatgaaacgagccttagagttctaaagtttataatcaatgattcattattcattagcaccgaggaccacattatttatttgtacatctttggtgaaaacattctaaaacttcatgattgggctttaagatcgaaggaaaagcaaaagaaaaaacattaaacaagcacttaagaagatgagacataacccaagcatacaaattatcttgtaaggatcattgaaaagcaaacaagaaagaagaatgcatgccacccattcatccctgttccttcgtttactattttcctataattgttaacttgtaaaacataacttgtacgtttttctatttttttgtatcatgtattgtattgtgtattgtaagttttttatatagtgaaaaataaatagaaaaaaaaaatgtaaatgggtgagtattcattgattgtatggagtgtagagtaatatttatccaattttatggaagatggtaggatttaaagagttaaagtatatcatatcatatgaaaacattgaattttaaaattttaagaagttcaaattaacaaaatataactttaatatataggttcatgacatgacccacaaaaataaacttcttgaatttttagctatgatttttagttccaaattctaataaggcatatgtacttattgtgttgttatatatatatatatatgcgtctttatgtgtcatcttcaaaactctagcttttttaggtttgtcatcactccaccaaaaaagaaataaaaaaaacttaatatattaagtaaaattttttattcattaatcactctcattttcattgttaacattcaaaccattcaaatgaaaattttgcaatattcattatgaaaataaagttacttggcttctaatataatatctgacaacaagaatgcagtttttcatatatgattgttgtacctatttctcctttttatgatcaattttaatcctttaatatattttaaacaattaatataaaaatcttttaataaaaaatttaatttatatttttttaataataatagaaaatagtttaagatgtaagtattgttgtatctaatatcatgtatcatatcgtatatcatatgtgtattgtaagatacgctttaaaattagaaatggattgcgatacgtatcgatttccataaaaaatgtatcgtattgtatcgttgtattgtatcgtgtatcataagtttttaacaagtagtcttttcctatgaagtacttaaaaaagaatttttggagtaagacttgggatagtatatgaacaccactcatatatattggagatgccaatagagaagtttactcattgacctaatacataattatgtctatatttaatttctagacaaaattaatttttacaattgctctatcgattgatcatgtggtttgatgctaatttctttaatgtctatagatttcttcaagctttgttgtgtttcttacgttctaatgctaaaacttcgttgctgttggcagaaagaca

SEQ ID NO: 11931 - DNA, 1918 bp, Vitis vinifera
  Intron number 2 from transcript GSVIVT01015742001 (locus G SVIVG01015742001) derived from phytozome v7.0 (chr-ID chr3 ; pos 16698097 to 16700014 reverse strand)
catctagagacacccacactgaagcaggagttaaggtctccttctgcttctattagattatcatctctattcttttcatgttcatgtttattttttgccttatattcatgtgggttgttttgattcccatgctttctgctctgattttttctcacaagttcggaatttgtgatctgggttctgtttgtttggtttatttatggtttttttttttttttaaatgttattcgttgttgatttctttctgattgtgttatgtttcgcgggttgattagagtcctcctggaatgtgtatgtaccctccgattttctgttttgtgttattggtgtgaaaagttggagaatcattataatgtttgcaccaaaattgtgtaaataaaaaaaataaaaaaatgaaaacgttctttttgtgggtttgcagtatattctgtgactctatactgaacttttatgcaatgtgcatatttctgctagatgaatgcaacttgctttattgaatttcttaaatgtgttttttttttcctccttccaccgtagttgttatggatataggatgctgttaagctcgctggaaagtctgaaacgaaattggagtataatagaggattatttctgatttaattgttaaatttctgcgtttgagcatttttttttaaagcaattatggggggaaaaaggaaatgttttagttttaaatattcctctcctccataatgagaactagaacaattactaattaaattagactgggatgatcatgaaatgtccaggccactttagaagaggctggaccccagttctggaaacaacccccaatctcaacaaaaaggtgtatcttgtgatgttcttggggactcctttaatgatataattcttgacagttgagatgtagcactggtttgggcttcaatagacaatctatatttccattgctggtgaggtattgatagggaaggaagcaaacttggggcagggtagatggtaagttatggtcagacattcggacataaactttattgttaaagggtgcatatatgttagttaaggggaatggaactcataatttctctttattacatagaatagatcataaaaatgaagaaaagtgttacctgtgcattaggaagagttctctaggtcgattcatgtttccggtttattaagggaaagaatatgctcggtctactaatggaaagaataaatgaggacacaaaatgacaaaacacatcatgaaaatagtaaaggaaatgtccaaaattataaaggaggataaagaatggaaataataaaggaggttcaccgagttaagtgcataatgataaaaaatctgcttcaatcaacatttttataaatcaagagcaataaaaaactaatagtattttgttttcttaatttaggaaataatatttgttttctttaatttaaagatatttattattctgttctttttataatccacaatacatttatacaatgtatgaatttatgaaaagaaagaataaaactcaccacttccactgtcaaattgtcaaactcttcaatgtcagtaggcaaactagagcggtgaagctgtctccttttagtatgaattggatttcaattttaatccatctaaatttataatttaggtataccattgctcattacttgattttatcactattgttttacagaaaaaactgtttgtattcttgatgtcaatttcatagttttatagtcaaacattgaggttgttaagattattgaggctttgtcacttactataagaagaaatgaaaaagatgaagggtatttggtagcttaacctttgtttttcccccttcctatgcaattaacatgtttttttatgttttaaaacactctgtcctttctttatttagcagaacaagttcagatcaagaaattacttctcttcact

SEQ ID NO: 11932 - DNA, 1781 bp, Vitis vinifera
  Intron number 2 from transcript GSVIVT01010528001 (locus G SVIVG01010528001) derived from phytozome v7.0 (chr-ID chr1 ; pos 21493758 to 21495538 reverse strand)
gaatagcagtgagccactcaaagattttgccatcggtgagtcctgttctcttatctgcatttttctgctcatatgttcctaaagacatacatcgtttcatatatccatcaaactggttagtcattgcatggccatccatgataatttagtgtaaaatgtagttgcagaatgaaacatgatcaataggtgaccatatttcacatgtgtgtaagcatgtatgcgcatgtgtgtattaatagagttcctagtgtgctggctcatgtaagcctgctgctagatgcataatggaccatgggaaactcgataagctatgagctaagcttgggaagacaagtgcaatctaaattagacctaatctacctggtaacagaatcactccaagaaacacctgtgtgtgtaatttgctagccttttatgaagcacttatcccttttgggttttttttcctcttttccttttttgatagacaaagaccttatatatcagcaacgtctaacaaaagggtgcatacaaccttacatagtattcacaaaggggccaaaaggccatctaaagcaaagggatacacaaaaaacagctccctcaccttacttagagctcagtcaatcaataaaattcatcatggacaaaggcacatccccattgataaatcctaacaaactgcacagtagtagacactaggttaaattaaactttgacccctaaaattactaaattacccatttattctggaactttaaagtgtgtccaactgcttcctgagcttcaaagggatctttgaatttggcagagataaaaggtgttacaaaaattccacttttacccgtaatcttgtaatcatttctccacatgctaccactctaagaattcaatggtgcctatgtgatttcaccactttagcaccaaaaagcatacagaaacaccatttaatgatcatatgtattgaaggtcatccatgttcaattagtataacctttttcatcaagttattatgaaaaatagagcaaaaaaaagagcatgaaattccaatgcttaaaattgataaaattgaaatcttttatgctattgtggcaagatcacatcaagcacttggatctttgtattagacttgtatgatcttgtcatggcagcaccataaagaaacgtttccatctaatgggccaattcaatggattaaacacaaggaaacgactcgtttcaatgatttccttctaattttggctatatttccacaaatggaaaaggctgtttaagaaaggaagtgtatgaggctgtggatgataaaaaattaatccaatagagatggttttttcgtagttagttgactaattaggacttatcaaatggaggatcccgcaatatatagattttttattcctgatatatcaagatcacacaagtacctaaacttcaaaaggcacactagtgtgaccttacaacatcaatacaaaaaggcattgttgatccaccatcaaattgtactaaatcatccaccaacaatggcaagaattctgaggtaagaagacctgattattgggcataaacagactaaagaaccgtgatattagtatgctaacatcatctatttgcttgagacatcctagaaaagagagaaaggattttaaaatttaaaataaattaataataacctatatggcattcctgctgaaatgccaatgcaaagtcttctcccccaggtaaccccattattagcctacttccttctacattttgcttgtcaaatcagtctgtcaattgtttttcaggacaaagatcactgg

SEQ ID NO: 11933 - DNA, 17851 bp, Vitis vinifera
  Intron number 4 from transcript GSVIVT01013621001 (locus G SVIVG01013621001) derived from phytozome v7.0 (chr-ID chrU n; pos 1763590 to 1781440 reverse strand)
ttgtaagttatgtttttttttatatatatttctatttttattatcttttaatgaaatttaattactttgtgtaactaaaagaagaattattgaagaaaattgtgagaattttctttcatattatttactctacagaaatatacatttatagggaaataggagattaccaacagcctggtaattccttaaaaactctgtcagatcccacaagagaggtaactatcttctatctatagaaaatagtctacaactatttactgctagcaaatctgtaattacaacctgtaatatcttctaatttcatcctaaaatcatccataaacctggaattccatactccccctcaagctgggcaatgaatgttaatcatccccagcttggagagaagtatgtcaaattgggttctaggaacaacctttgtcattatatctgcaatctgtttccgtgtagggatgtagtccacttctatgatcttttgctctatcttctctttgatgaagtgacgatcaatcttaacatgtttggttcgatcgtgatggactggattttttgcgatgctgattgctgcttgattgtcacacatcaacttcataggtccgtgaggagcgagctggagttcttcaagcagcctttttaaccatatcccttcgcaaattccatgggccatggcacgaacttccgcttctgcactactccatgccacaactgattgcttcttactcctccaagtaactagattgccccagacataggtataataacctgaagtagaccttctatctgttaagaaaccagcccagtctgtatctgagaagatctccacgtcacggcttgccactcttttgaagaataatcctttacctagagtcatctttaagtagcgtagtatcctatatacggcttcttgatgttcttcggtgggattgttcataaattgactaaccatactcactgcaaagctgatgtcaggtcttgtgtgtgataagtagattaaccttccaactagtctttgatatcttcccttgtcaacagcagccatatcttcttttgagcctatcttgttgaatggatccataggagtattagagggtttgcatccaagcattcatgtttcctttaacaagtcaagagtatactttcgttgtgatacaaagatacccttgcttgaccttgctaccttcatgctaagaaaatacctcaaagttcctagatctttaatctcaaattctttacttagaactgttttaagtcgggaaatttcctctttgtcattcccggtaacaattatatcatcaacatagactataagaactgtaatcttaccaccaggcgatctcttaatgaaaagagtgtgatcagatttcccttgtgaaaattcctctcctttaatcaccttagtaaacctctcgaaccaagctcttggggattgcttaagcccatagagtgatttctgaagtttgcagactaggtcgttgctactggagagttttaggcctggaggaatctccatgtagacttcttcttcaagatcgccattgagaaatgcgtttttgacgtctagttgatgcaaattccaatcaaggttggttgccaaggatagcaagactcggattgtatttaaccttgcaactggtgcaaaagtttcttgaaaatcaatcccataggtttgtgtaaatcctttggccaccaaccttgccttgtaccggtctatcctcccatctgccctgtatttgacattgaagacccacttacaacccacgaggcgttttccttgtggtaatttcgtaatcttccaagtgtcattcttctgcagtgcttatatttcttcattcactgcctttctccacttaggatgttgtaaggcctcttgtatgcagtttgggagagcaatactctccagatttgtgatgagagctcgaagattaggagatagcttctcataggacacaaattttgagatgggatgctgagtacaagatcttactccctttctatgggccacgggcctattgagatcatccatagagtcaatgtcatcagtaataacaggagaatcaatattaccttgaatgactccggtgggatttgattttgggtcatcagtttgataaggcataggaggaagcttaggatgtaggtccaccagtttagggttcttctgacgccttgagtaaacttgaagttctttgccaatgaactccttgtctccttgaatttgacatgactctgatggtggtccatccggtgccatagatggttcattggaaaaattaggttctggcaccctaaagtcaagcacgagcacatcccaaaactgatattctgcttgctaattgactggattctccccttgaatatgagttttggtgtaaaaaggtacattctcaagaaaggtcacatccatagtgttataggttttccgagtggaaggacaatagcacttataccccttttgataagaggaataaccaataaagatacacttgacagacttgggatcatgtttacttcgctgatgcggagggagatgaacatatgcagaacatccaaagaccttgagaggtatatcagttataatccgatttagaggaaagtttttggaaagggtttggcatggagtatcaaatttcaagactctagaaggcatgctatttattaggtatgtagcatttaaaacagcctctccccataattgttttgggatatgagtggtaaacctaatagatcgggctacctctagaaggtgtcgattttttctctcggctatcccattctgttgtggggtatcaatgcaggaactttggtgaataatcccattttctagaagataatttccgagtataacattaaagtactccctagcattgtctgttctaaacacttggatcttagcttgaaattgtgtttgaatcatggaatgaaagaatttgaagatagaacctgcctctgatttttccttcatgagaaatacccacgtaacttgagtatggtcatcaacaaagctaacgaacatctagccctagagatattgtgaacatgagagggtccccaaatgtcgctatgaataatggaaaaaggttttgatggtttgtaattttgggatggataagagttatgacaatgcttagaaaattggcaaatctcacattggaaaagtttgggatttttgttcttaaatagtgctggaaacatctttgataagtacataaaatttgggtgtcctaggcaataatgcagtaacatgatggtactttctttatttgaatctaaagataggtttaacctaggatcaggagtagagaaagatacatgttgtgcttgagagtcttgttttctagctgccctaaaccagtagagtcctttgctttccttagcattgccaatcatcatccccgaagccaaatcctgaaacaaacaatgagaggaagagaatttagccacacaatttaggtctcgggtaagcttgctgattgacagtaaattgcatgagagcttgggaaccaaaaggacttgattaagagttagggtctcggaaataatcactcttccaatactagtcacggtggaaagagagccatcagcaattcttactctgtaattctcatggcaggggctacaatcatggagtactgatatatcacctgtcatgtggtcggaggcacccgaatcgatgatccaacctgatgaatcttcagtttttgtgtgtaaaatagttaggaagttacctctctgagtagcggatccggttgagataacggggttagtggatgatccttggctaaacatcttttgcagccactccacttgttctttgctaaagagagtagaatcattggcacttctttttttcccttcaggatctgccacaaatgctcgtgcttccttctccttgtttgacttccagtcagcgggcttcccgtgtattttccaacatgtttctttggtgtgacctggtctgcggcaatgatcacaccatggtcttcctttcttctgccttgcatcataggtagatcctcgggaaacaagggcagttccttcttgaatgtttgtgcagccttgagagatgagtgctgatccttcctgaacattggagaatggccttgttcccatcatcagcttcttcctgctttcttctcttctaacctctgagaaagcttctcgaatagtagggagaggcttggttccaaggattctcccttttacttcatctaggggtttgtttaatcccaataggaacttaaagaccctttctttttcaataatccttttgtattgactagcatctcctgggcactcccaatccatggtctcaaacacatccaattgttgctaaaaacgactaagagtgttatagtagtgagtcacattcatctcaccttgccttagatcatgtagggctcccttgatgtcaaatagatcaacagtattgtcactgtcagagtatgtttcctttgctgccatccagatttcatgtgcagtatcataaaatagaaaattttgacctatttctgtgtccattgcattgattatccaagacataaccagattgttttcggtgttccaaaccttgaatcttttatcatccttcttaggtagttcagtagtgctgaaaggtattcatccttacctttgcctgtgataaacattagaactgcctttgcccattgatggtaattgtggccaattaacttgtgccaagtgatgaggaatgatgaaccttctgcaccaccattgctcacgagttcttggccaaacatggttcccgtaacgctactgctagtttccgaggccatagggaaaagtgatacctatgagagactagactcaaaaacaaaaaacttaaagaagcaatgagttgggacgaagaagaagattggtttgcacccagaaaattgggttttagattaaaaccgagaaagaagtgataggtccaggcggaattgctctgataccatgaagaaaattgtgagaattttctttcatattatttactctgcagaaatatatatatttatagggaaataggagattactaacaacctggaaattccttaaaaaactttgttagatcccacaagagaggaaactatcttccatctatagaaaataatctacaactatttacagctagcaaatctctaattatagcctgtaatatcttctaatttcatcttacaatcatccataaacccggaattccacaattatattcaagaaaatgaacatgcaatattcaaaagttaggggctaatgcattcaaattctaatgggcattagtgagttgagataagccctagtagaatttactcatatatttttgttgggtggtaggggttggaaacaagcgaaaagaacccatgaaagaaagagaaaataagaatattttattgcaactaaacttgacttttgggatatagtaaacttattaaaagttttatggtcaaattgtagttattatattctcataatatgtcctacatattttttctttcttctttgtgctacttatttattgtattctaggagaaatcccatgtataagaaaagctgaagactagactttgttattgttagaggtagttgagagttgtagttattgcatagttgcaggatgaagatagtaaacatctcatggatactatataaagttcatgttgaccaggaagacaaccaatgtgatctcttgtggagactataaaaggttcaccgagcatcttatggactatatgagattctctttgtaatatttcttctgctatggttctgttttaatcatttgaacaataaacaattgtggcagtcgagatactgtgatagaaatgttgattgctgacaagtatattcaattccagatttcagatttgattctagttgaccctttttttgagggattgattatttcaatttccataagcaaggaacatatttgtagctaccatatttagctccttgactatgggaatttgattattattatggctgaaaaataggaacagattatagggatttgttttagattcttcctggtatagctatttaatccttgtatagctttttcttctctcttataaatattttacaatctgtgaagtaaatatacaaaaaaattctctccaaatcaggatgttatcaaatccattttttttatcattaggtctgaacttttactattgatctattcccttttaccttctatccttgttgtttgaatttgccactgaaaaatccatgtctgaattggtggcaaaggtttctagttctagtgcaccaccagttattccttctaccatgacaattcaacatgataatgtgcatgtccagatgacttctaacaaacttgatggaatgaactactctggatggtcccagtttgtgaagttgtatgttacaggaaaggggaaattgagatatttgattggagggaagagacaaccagctatttctgattctttttctctacttggatggaggagaatgccatgttgatgtcatggcttcttaattgaatgacttcagatattagtgccactttcctttgacttcgtaccgttcatgctatttacgatgatgtggctcaaacatattttgatgatagtgatgcttgtcaaatttatgaacttaggcacagggcatgtgagactagacaacaagggaagccattgaccatctttttttctactcttcaagccattcagctagagcttgattttctcccgccatgtcatatggagtatgtcatggatacaacaaaactaaagaagaaaatggagaatgagagggtctacaattttttggctgggcttgatgagttttaatcaaataagagttcaaattttaggtaggatcctcttcccagtcttcgtggtgcatatgcttatgtttagagtgaggagctttgttaagctaatatgcttgcaggtgtctcataggagagttcatccttaaatattgcttatgttccaactgcatcagttatctctaactttagaaagttggaagcaaggagtctttactttgtacacattgcaataagataggacatgcttgggatacatgtttcaagttgaaaggatatctagaatggtttcataaaaaaggatttaattcagattccacagcacatcacgtcttttgatacataatcacacccctcggcccaaccacaatattctcaagcccaagaagatcaaatcaatgaaaatgctcaaaggttatcccataaagattcttccttaacttagccaatacaagtaagtttggatttgcctttagcacctctagtcatgattgttatgagtcatcttgaatttcaaagtccttcgatttcaaacccctctcaagtccttgtctaaaacacatcttattccaacttgtcttcatatcccccttaaagtgtttggttctatttgttatgttcatatttacaaacaaaataggaatacacttgatccaagggcactcaagtgcattctttttaggatattctacctctacaaagggatacatgctaccacccaccttcagaaaagatgtttgtttccatggatcttacttttgttgaagatctaatgactattcagggggaggtttagatgcttctctcaagacagaagtcttaggatgtgccgccactaccttgtactagtgtatcatcatctaaaactattgcacccactttaagaggatttcttgagccatacaaattagtatattcaagaagggagaagactcaaccacctcttgatcacccaatgactgatcagatgctcctataacaagtaatcttaaggtaattccttctcctaagctctctattgatacttccattgaaaagtcaactcaattaattgttgagaattaaacttattatccttttagagagcgaaaaccaccatcttgttatggttttgcaaattgtattgtaaaataccttatctctcatcatatgtcttcacatcatttatctccatcttataaaatatttgcaaactagttatcctctgtgtttgttcctaataacttacaggacactcttgacaatccaaagtggaaagttgcaatggttgaagaaatgaaagcattacaaaaaaatgatacatgggaactagttgagctaccaaagggaaagaagacaattggttgcaagtggctattcacaatgaaacataaggtagatggttctgtggagaggttcaaagcaagactagtagctaaaggttatacatagacgtatgaggtagattatcaggaaattttttcatcaatgacaagggtaaataccattcaagtccttttatccttggttgttaacatagataagcctcttcaatagtttgatgtgaagaatgcatttcttcatgaagatttagaagtatacatggactttcctcttggctttgctaacctaataaaaaggggtaaggtatgtagattaaggaagtccttgtatagagcttggttttgtatatttactcaagctatgaaagagtatggatatcatcaaggccggtctgattacactctatttctcaaccatgcattcgaagggaacattattgccttgatcatgtatgtggatgatattgtggtgacaggtaatgacagtgaggagaattgtaaactaaaaacatatttggcttcaaaatatgagatcaaagaccttggcattctacgatattttctagatattgaagttgctaggtcgaagttggggatctttgattctattttcgacttacttgatgaaactggaatgttggcttgtaaacctgttgatactcccattgaattaaatcataaattaggtgaaagtttataggatgcactagtagacaaagagtgataccaaagattagttgggaagttaatgtacttggctcatactcgcctcgatatagattttgcaatgagtgtggtaagctagttcatgcatgctccttttgaaatacacatgttggttgtacatagaattctcaggtatttaaaatctactcctagtaaaggtttgatattttgtaaacatggccatttggaagtagaaggatgtagagatgctgattgggcatgatctgtagtgggcaaaagatcaacttcaggatattgcacatttgtgagaagtaatttagtcaaatggtgtagcaagaaacaatctgttgtggctagataaagtggtgaagtagaatttagagttatgactcatggtatatgtaagatgttatggttgaagtccttattaaaggagttgggctttaattttgagggtccaatgaagatttcctgtaatgacaaagctgccattagtattgcccacaatctagttgagcatgatcttacctaacatgttgaagtggatagacactttatcaaggaaaagttgactcaaggattaatttgtactccttttgtaaagaccgagaattagcttgcatatattttaacaaaaggagtatcaaaaggtactttcaagtaatacttgacaagctaggcattcaagacatctagctctaatgtgagggggagtgttgattgttgacaagtatattcaaagatctccacatttaagatttgattctatttaagatttgattctagttgaccctttcttttagggattgattatttcaatttccataagcaaggagcgtatttgtagctatcatatttagctccttgattataagaatttgattattattatggctgcaagatgggaacagattatagggatttgttttagattatttctcgtatagctttttaatccttgtatagctttttcttctctcttataaatattgtacaatttgtgaagtaagtatacaaaaaatttctctccaaatcagtaagaatgttaccacttaatatttttatctatgatgagttatttgcttctatagctcatttaggaactttaagtctaataattctttactggttcaacacgtaaaattcatcaaatgaatgcaaaatatactttttgaaataaccccttaaaggaagaacttcttatatagcaaccttggacttctttctcttggtctccttgtttgactaataatattgctaatcttttagcaaagagtggagcaatgcatcaggttctttttgtataggattttttacgcccttgaggggtattgagttgcttttccttctatagtttcatgtggtgctctagtgatgtatggctacccttactcttttagagaagttttctctatctcttcttttgatcagttttgtgtagtttggaaggattcttcttctttcattcatacctttaaattcatatcaatgaatatgtttgtttttgataaaaaaaaaaagtagaagatttatgaacacttccaagaaaataaatttagtaagtttcttcatcagcataaaccctctcttaggtgaataaaatggtgttatgttgcatgtttgttagtttatgaacgatttaatctttgtaaacaacaatctagagatttttaatgagtttaagaaagcactgactcattagattgaaatgatctgcatgaggttcatggtttactgccttagcatggaagtgaagcaactagttttaaggattttcgttttctagcaacataatgtagaagtccttaataaaggtaagatgagcatcgcaagttggtcaacacagttatggaatttgttgtggaaagattggttcaggttcattgttaaaaattaggaagtatcatccatattaagaatattttagattattttattctttagaatattttggaatattttatttaatgaattatttcttgtaaataggttattcccttaaacggatttagaccattgtatttataaatatgattatatgtacatggtagcaatatgaattagaaattcattctcaattcatttttgcgttcatggtatcaaaaccaccctaaaccctgggacggactttatagtgttttggctgactgctcacaaaataaaaaaaaaaaaaaaaaaaattcagcatttatctggtcttttaccagatttttggttcttttctcaatctggttgtgtaccagattcttttctttttctattccttaaacgattttgctacaatgtcttagagtattttctgatgaaacctcaggggactcctccaacatttagacttctcagaatggtcagatttcatcgattggagctgctgaaagtccaatcttgcagatcattacttgtcgattgaatggacagaatttcttattgtgatcacaatctgtgaagctgttcattagaggaaggggtaagatcgactatttgaatggtacaaaacaagccccaaaatttgatgatcctacgtaccatgtttgggatgtagagaattctatgattttatcatggctcgttaactctatggaatcgaagatcggccaaacatatatgtatctcaaaactaccaaactaccatggaatgtagtgagcaagacatactcagatttgggcaattcctcgcaagtttatgatttgaaaacgaatataaaaatacattacaggggaatatgtttgtaacaagttattacaatatgttgaaaaggttgtgggaggaacttggcctgttctatgaccttgaatggtcatgtgctgaagacagtgctcaatatcaaaggattgtgaagaaggactgtcttatggaatttttagctggtctaaaacgtggattttggatgaagtgagaggttgtgttctagcaagagagccactgccctcaatcagtaaaattattgaggggaaaaaaaacttaccaacagtgagaatttaacacttaatgctactgcatcaacaaataaaattattgcagcaacatacaatcaaaggcctgcaacctaaattcagcacgatggatcaatgatcttggttaaaatatttgcaaacaggcagtgcattcactagctcactaaattcagcaccatggatcatagattctggtgcatctgatcacatgactagtcagtctcacttatttactacttattctccatgttttggttgcttaaaaattcgaattgcaaatgacaatttgtctctagttgcggggaaaggttctagttctcaaatctgttctccatgttcctaatctttcttgcaaccttttgtcagttagcaaaataaccaaagattcttgcaaccttctgtcagttagcaaaatagccaaagattctaactgctttgcaaaattttgtgactctcattgtgaattttaggaccaacatttggggaggatgattggcagtgctaggatgattgatggactctattattttgataacaacctatttaaaggtagacaagctcaagctgcgagtagtggtgtgatttctattcctgttatagatgaaataatggtatggctcaataggttaggtcatcctagtttttcttatttgaaacaactattacaaccctgttaaaaaatttgaatcctttgatgtttcaattcaaagtttgctagttatctaaacataaccatattcatttttcacctcatccttatcaagaatccaaatcattttacctcattcatagtgatgcatgataactttctcaagtcacaaacataatcgaaaccaagtggtttattacatttattgatgtccataccagagttcgttgggtgtatctcttaaaagaaaaatcttatgtcaagggagtgtttaaagagttttgttccaggattgaaactcagtttccatacttgaatacaagtcttcagaactaacaatgggaaggaatatttcaactctatccttggtagattgtttaaagaaaagggcattatccaccaatccacatgttttgataccccacaacaaaatggtatagttgagagaaaaaaccgtcatttaattgaggtggctaggttgctaatgttcactatgggggtcccaaaatacttgtgggatgaggctgttctgatgcctaccaaaatgttgaaatttgccactcatctaaatacattactggccatcttcccacatatttgcatctttacttctctacctttgaaaatctttggttgcactgcatttgtccacatccacaaacaaaatcgttctaaacttgatcctcagttagaaaagtgtgtatttgttaggtattctcttaaatagaaaggttacaaatgctataatcctatttcaaagaaacttgttgtgactataaatgtgacatttttcaaaaaccaaccatacttcaccaaaaatcatcttcagggggagagtattgagagagaagatccttttgggaagagatgagactcttacccatttcattactgagtgatccataaaaatcctactaaaaaatgttacccattgtttagcctttacttaatggaccaagcattatagattctaatgcagggggagaaccattcgaaaagaaactcaaactgagctgcgtgtctactcttgaaggaaaagtgatcagaacacagagtcacaaccaaacataagccaagcaaatcctttgaatgatgaccctctggatgaaatagatatctcttcgccaaacccaagttcaattcctaaaactagtagtttagacaatgcttcacatggccttagtgttctcattgcacttagaaagggagcacattctgcactatgcatcctattgcaaagtatgtctcattccatagactttctcagaacttaggtcacattgaatggaggatgacaatcctgaaagagatgaaagctcttaagaagaataatacctgggaaattgttgaattgctaagagataaaaggaccgtgggctgtaaatgggtgtttatggttaaataccaaatagatggaagcattgataggtataaggcaaggcgggtaaggcttgtagccaaaggattcacccagacttacaaaattgactatcgaaagacctttgctcttgttgcaaaagttaatttgattcgaatactgcgatcccttgagttggttgatgcatcaacttgatgtgaagaatgcttttctaaatggagagttagaggaggaggtcttcatggccctatcaacaggttctggaatcatgattggagttggaaaagtatgtaagttaaagaagtttccctacaaactaaaacaatcacctagagtttggtttgattgattcaccaaggctatcaaaaggtgtggataccgataaagtcaagttgatcacacattattctacaaacactcaactataggtaagatagccatacttattgtatatgagggcgacattatccttatcggtgatgatgtggggggactagaggtcttgaagaagttccttgtaagagaatatgaaattaaagaccttggagccctaagatacttcttgagcatggagtttgcaaggtctaaaaaggcaatatttgtgtcacaaagaaagtatgtacttgacttgcttgaagagattgatttagttagttgcaagttggtagaaaccccagtggagcccaatcttagactacaaccaacaaatgcagataacgtggtgaatcaggagcagtatcaaaggttagttgggagattcatttatatctcatactcaatcaaacattgtgtttgcaatgagtgtagtgagtcaatttatgcactcactagggaaagaacatttcgaagcaacctattgaattcttaagtatttaagagggaaacctggaagaggtttacaactcaagaatcatgaccactcagattgaagcttacaccaatgatgattacacaagaagtgtaatagattgacggtccacattaggctattgtacatttattggaggcaacgtagtgacttggaaaagtaagaagcaaactatggtagcttgaagcagtgcaaaggctaaatttacaactgtagcttatgggatttgcgaacttttatggttgaaaaagttacttgaagacctcaaagtgacaagtcctatgcctatgaagctctattgtggcaataaagcaatggtcaatatagcacataatccggttcaacatgatagaaccaaacacgtagaagttgacgaagacttttatgaaagagagtttagatggtggactgatatgcatgccttatattcctacaatcgaacttgcaagctgggtatgaaagacatttttgagcgagcttaagggggagtgtggaaagattggttcaaattcacttctaaaaattaggaagtatcgtccatattgagaatattttattctttgaattatttcctgtgaataggttattcctttaaatggatttagaccattgtatctataaatatgattatatgtacatagtagcaatatgaattagaaattcattctcaattcatctttgtgttcacttgtcaaagcatgaagaaggaaaaatggtgcactgaccacttctcaagagtttaggagagttgacatgcacaaggtaggatattctcattggagttgggttcattagctaattatagaagcgtcattgggaactcatttgaaggagggcaaaagaattccttgttacatccaagttaaacttcattttgttttactttactcatcctctaccaatttcaaactttttggctatagtgatagttactcaactactgatttgatagaaaatatttgggttctcatccttcattgtatatgatctttcttatcctgtgtaatgcatattacaaaaactaatctagggaagccccatgtgtaaaataatctcaagactagaagttcaatagttagtttaagtaattgacttgtattttggtaataaggtggtagttagaagtatctatggattctatgctaatgggaatgtctgggcactttatactagttcaaattaagattcaagcaaatggtttgtatgtttagtatctctctatattctgctttccttcctgttattttattctcttagttatgtaaatgcatatagccttcttttcaacaaatatatataggaagagttcctcttaaatcaacttgtattactgaaaacgtaaatatttgattaatgctgcagaagtcccttctttggaggcctaaaactagggccataggcctagtgatgatccaaaaatcatttttctatagtgtccttgggtagttttaggttactcaaatgcttttatctttagtcacttatttttttttttacatttaaactgaaaagataaggtcttgtaattatgtgtatgctgtggcacagatttttttcaggccaattccctctcttaagagctaaccttgtgagagtctaggactttgataaggagtctatgccagggcttccctactttccttagaagaatgcaggcaaaaaccttagatcagactgggagctcgatattcagaaagaaggtggtagggtgcttggactgccagtagaaagttgtttcaggcagttctgtcattaaaagtagatgtagatagagatgtgatgataaaacttttcatcctactgcagtcagttacctttctggttactcaatctgtgcttttcatgttactgatatgatgaccatggttttcattttggtgcttttggttagattttaatttgttctggaataagctaattcaatggctaatatttgtgtataaggtgtggatagtcttgaagttttttgtctacctgttggttgtttatacccatcagctatatcctagtaggcagtgttagctattccagaaaatacaaacaatcttgagtttttttatcttctcttaaagttgtgaagcttgcaaaagatttacagatagctcatagtttacaataggatgaagtgcacagaatgcatgtgggaaacaatgcagtcatgtgatggtgtgaatttgtgatggcaccagtgctgttgtaaagtgggaagaagcgaattttcatgaagcagtgatggggttaggttggtgacattgttttggttgagatgtgttaaaataattatatttaggaattagctactggttgaaccacactagaaagtgaagtggaactttcattcctttatttatttatttattttcatgtgcttttggtggtggatggagcaagaatgattttttactactagctgaattgtgccagctaagccagttggaatttagcatatcttacatcagcatgtgatagaatttatacaagctaatatgaacatcatttttcatttttcattttaaagcaaacacttattgtcataataatttcagaagtgtccaggtgttttttagtttgcataggttgatggtatagattttttgtgcatgaagcatttatctctggaaaattaatgaaagcacttctaagtttggaaaaaataattcaagtaccttttgtcctattttactgaatcactaattatccttttatttccacaaggaaattatgctcttgatagctagtggtttgctgtgtaaagtgtgctcagctcatttttgtcaaaccattggtgataactacataatgtactcttcataggtgggagtgtgtgtttatgcaagccaagtttcttaattttgcagttcaattgtgaattttcatttattgtagtgatgatccttaaaagatatcaaacatttgaaaataaaatcgaatgaatccttccagccaccagccaaggccattcgtaaagatctctctctctctctctctctctctctccctccatccttccctccctcttattcttcttttaagaagaaggtagacaataacatgctatcaatcattcataaaaggatacacctatttaacctttatcttcaaaagcttctattgatcctgatgacttttgggataagcacccttttgattattctgtgcaggtccattggttcaaataacttctctggatttctcc

SEQ ID NO: 11934 - DNA, 8585 bp, Vitis vinifera
  Intron number 4 from transcript GSVIVT01007575001 (locus G SVIVG01007575001) derived from phytozome v7.0 (chr-ID chr1 7; pos 11790544 to 11799128)
gggtggctcctagcttccttcgagtcctctgctgctacagacagttgactaaccccgggtgcagcttcttgagaagaacacatatttccatttgtctctcatgtatgttgctgcccattacccgtttgtactctgttaaaactctttgaagtgtttttctgcacctcagaggtggataggtaatgtttgcctccaccccacccctttttttttttttttcttttgtttttttggttttttctggtcatccgaaatgagattcctggtgatcccagagaatgtataaagtcggtagcatttacatagatctttaggcaagcccatgttgcataagttagaattttagatgaagaggagtatgttataatgttggtgtttatgtgcaacatgttggtttaggataacctttccatttcaaaccccagaaaatttgtgttctcttttcatcccaatgatcttcgagcttatatattttgtttaatcaaggtgctcttgaagcattcctccgagctttggggcttatgaagctacgaacacttgctctgccttgcaatctcatcgtggaggtggagttcttaaaacatgaaggaattttggacagaagttggcatgaatgttggtcatctgaggattctcagtgactttatggaatattttgggggttgtgcttcacgttgcatggttgcacaaatcaaactagcattcatatgcataaacaaaaatttgtacaaatttatttctttggttgagtttaaaattttagtatatatccattaaattcacattcattaatatgtttagttgctttggaaatatgattcggaaatcggaactcaaaatttgagttattgataataattttttttccaaccaaaactggtctagaatgatcgtcatgcacgcaactatacttttctaattttgtcaaaagctaaataaataatgagaaattaatactagaatttcctagatcgaatgccctatttgtaattggctagtgaatgtatagtttttaaaaaagagctctttgagagtttgttttgaaaaataagatattttttaaaaacatattttttactattttcaattgttttagctttttttttttttgtgattattgtaaaaaaataattgtataaataagaagaatgattgaaataaagtactacgagacttaagttaagaacattgttagttatcaaacaaaataattttaatattcatttaaattttttgagaaatagataatttttaatgaaaagtaactagaaatgaaagtgggtgtatttagattttacttataaagtgattgtaaaaaaaaaaaaacctttgataaatgtgtcatataaaagaaaaaaaaaggcgattttacttataaagtgattgtcataaatcattttaagcgattatctagatttttaaaagtggattttcaaaattttttcaaaaccctaattttttttattatgagcactttaaaaaatccctcctaaataggctcttagtaaagtgaataagtacataaagcaaatgataagggcattttaggaaaaaatgagttgatactatttataaacacacacagtatgaggtggggaacgaccttcaataacttcctgagggtctccaaaggtaaaaatggactatggaaatggagataagtgttccgttagcttaatgattggatgtatcaaattttctcaatgatgtatctagggttccaaagtccatttcggagtagggaacgatctccaatcacttcccaaagatccctaaaggaataaacggaccatgggtaataagataaaggtttcaatagctcaagtatgtaccaaatatttttaaggatttaccaaattttgtaaatgatgtaccaagagtgccaaaattcgttctaatgtggggaatgaccttcaatcactacctaagggtcctcaaaggataatatggaccatgggaagatagataggggtctcgatagccagaggattggatgtaccaaaatttcttaacgatgcaccaaatttccttaaggatgtacttagggttccaaagttcatttcggagtagggaatgacctctaattacttcctaaagatccctaaagaaataaacgaaccacgggaaataatatagaggtcctagtagctcatgaattggatgtacaaaattgttttaaggatgtgccaaattttatgaaatatgtaccaaattttataaatgatgtaccaaattgtctttaggatgtactttgggttccaatgtccgttttagggtggggaataacctttaattctttctcaagggtcctcaaaggaatatatgaaccatgaaaatgaaaataggggttttggttcctctaagaatggatatacctaggatcccaaagttctttttggggtgggcaaagacctccaattacttatcgagggtcccaaaagaatatatacaccatgataagtatgatagcgtttccggttctcctaagcattaattttcctttttttttttttttttaaggatgtacctattgtttttatgaaattaatataaaaggttaaatacaatttttttatgaaaaatatattttcttttatattttattttaattaaaaattaaatattttaagcaaaaaaagttagatccacaatcaatttaaaatcatgagaaaaataataaaagcaccatcacttattgtaattttgatatgataaatttaaaatgaaaattaaaagaaaaataatgtaaataataaaatagtattacaatgatatttttacttttacatgtgatagaatttacaaaataaataaatattttgtttagtaataatataaaaaatcttatatcataaacttctaaataataaaatggaattttcaaatttaaacattaatttataaaatgtattattataattaatatttaaaatcatagaatatattatttgtgggataatatttttatttttgtccattatatatatattttttatttaattttttatattaactatttattatatattatcattttaagtttaatatgtcaaaaaaataattaaaatcaataaacatggtaaaattagagagtaaaaaaaaattaaaattaaagaagttttatgagaaaatgcacaagcatattaaaaagaatataaaggaaacaaagaaaaataataataaaaactataatatacgacaatggattatggtggcaggagaggaaaaaaaaagaaaaaagaaaaaagtggaaacgtgacaagtggtaaaggagatatattgatgtgagaaaaataataaaaataaatggcatatatatttgttaacatgtggtattaaattggtgtatactttgtcttttacttttagagggtaattgtggaacaaatttgaaagcactattggagtgcatgaatagacaatattttttcccattttacaccaaaattaaaaagaaaaaagtaaagttccaaaatctcgtattttttgtagttggtgtatggttagatgatttccccctccccccgtcccttttttttttttcctttgtttgcctaatttaatttagagaaaattatgtaaggaagagttagaagcatattaaaagaaaaagagactccaaaagttaaacttcaaaataaataaataaataaataaaataaaaaatgatctcctataactaataaaaaataaaagaccaaaattcctcttaataatctaccaactacttcttaacgaggatgatctattagtaatatgatataatatttggtgagagcattagtgtatataatgactatatatttaataagacttatggagagttatgattgaaagactatcgagttgtcatgattgctttaagttgctatgttgcatgagttctcaacattaagagaatattgcactagtgttgatgttattagtgattttgacctacgagtgagatcttagagtagtcttctctcctcaactgcttcaaatcactaattcaagtatgaattttacatgctacttttatatacgatttatgacttgagatagagttggtcctaatggatttgtatgatttaggtgttaataattttttgtgcacttaattttacgtgccattgattttttttaatttttttttaaatgttaataggcataagatttacatggcatttttgtgtagaatgaggaagaggatttatttggtggaaattcagatgaggaagatgatccattggggcagattaatgttttcattcctcgaagtagtggaatgctagagtgggtaagtcatcataatatgggatgtgaagtaagaatagagtagccaatgaattggtatgaagataacatcttcttgggatttgctttattcttccatcttcttcttccacttgatgatgatgatgaattggtgaatagacatatcattactcaagaatgtaaagtaatgatatccaaccatcatcatcattactcaagaacctttaaagtggaaagttatgggatacatcttatatctacccaacatcatcatcaacaaaatcaaaaccaatggccttagccattgagaaaaagtactaattcaagccatgatgatgcataggatccccacaacataaaagatgaaggcatctctggtttctcctccctccatcagggtctttgctcttttttcatttagttatttcaaacaatatttctaaaaattattaaaagtttttagtcgaaagtttttgttattttgttattcttttgaaaatattatttaactttttgttgtttttttaaataaagttttaattttttatatatctatttttgttgttttacttgatacattaataacggtagggagacggattttatttttgtccacttattaattgccatatgccaacaattgactaataatatattgacatgtcatataaaataatttgataaaaaaatcaatcaaatcaaataaacattataattatcatagattaattgtgataattaaaattaatgatagttatcataataaataaaatttatctaattatcctagtaactaattgtgataattaaaataaatgataattatcatactaaataagactattatctctaaaaaaatcaacagataatatcaaaataaaatttcaaaccctataaatatagggttcctttcattccaaaaggttgactttgagggaaaagcaaagaaaatttgaagagctcttggagactttaaaagaatttgaagatttcttgaagaatagaagaggatttgaagatttcttaaagaatcgaagatttcttttcatttgaagacttcatgatccattgtttattaagaaaactcttcattcaaaattgaacattaaattacttaaaatggtgtttttgtcattgtaaggagaattagagggcatatgggagattggtcattcattttaaatttacaatcttttttcaatcctagtttaaaatttcataaacctaagacccaataattattttgtttggtgagcattttttatagacgtgttgtaaaatatttatagggtcatttttatcctttttattactttttacttggtgcacctattccatatcattaacaaaatagaagatttatctaataatgaaaggaatataaataaattatatataaatataactacatttgaatacttgatttgaggaatgaggaatgtttatagggctctactttcattgatgaataaattctttagttgtaggataacttaccaaaacaaagattaatatgtaaacctatcatttttgtaaatgttataggtcatgttattaaacaaactccccaaacgttttttttttctaggggtgtcaatgtgtttggttttattttagattttatacttattattggaaaaatatagtattaaataagaaataataagaaaatcaatgaaaattaattatatgctaagcaaccaagggtttgtttagaaattgttttttataacatgtttttgttctctagaacaaaaaacacataaaacacaaccaaaaattattttttgtttgtaattcttaagaataaaaaacagagtatttttagagaacattttttagtttttatttatttatttatttatttattgttttcacttgttctctaagggttattttaagaaataattatacaaatatgaagaatgattaagaatacaacactggatataaaaattatttttaaaacatattttaaaatattaaaaacatgttaaaaatattttaggtttctaaacaaacttttgttctaaaaaaatcggaaaacaatttttaaaaaccatttccaaaaactattttttagaattattttcaaaaatagttttcaaataggccacaacttttttaaaagcttaaacttttaagattttggctcatgatgtatatcaaacattctatcagctttcctcaaatgcagtctcatacccacacctagagagacacacatgcccataagcaaacaactacaatcaacctcttttaggcttacttaataaattgaggatattaatatatggtagtggggttctaacacatggcctctttattgttagaatgaaacaatcccactcttaagcttggtgaatgggtcacacaaatgatgggggttgaatgtcattagacaccaattggtttccaaatgagatggtcaaaagtttgatccaacaattggtattagagttgttgtcataacaaataacacaataaaaacataagagaagggttttatcccaagctttgcaagcaaggttgcttcagaagagcccatcttgtcattgttttcaaacttttcttggagatatacttggagggattatatggatccgtagtgtgattttttttactggattttaagtttagtttaggagtttgtgtttttagtgagtcattttgtttagtttttagtgtttttttagtgtattaggtttggtcttgattttttattgcatgttttcagattagatgaactttggtttattatttgattttgattgtatgattgatatttttatttgagtacatgattgatttttgatattttgagtgcatgattgattttgaatgcttgagtgattttaattttgagttcacttttgattcttgatttggatgtgtgcatgattttaattttgagttcatatttgattttttattgtgattgaatgtgatcttaattttttagttcataattgatttgttttttattttattacatgattgattttaatttttagtgcaccttaatttagttcatttagttacattttaagtttagttcacttagttatattcttaatttagcttccttagtcacattttagattcaatttacttagttgcattcttaatctagctcacttcgttgcatgttagggttagttcacttaatttcactttaaatctagctcacttagttgcattttaggtttagttcacttagttacattttaagtttaacttatttaattacattttaggtttagtttacttaaattcattttagtttgtttaggtgcactttagtataatgtgcactttaagataattcatctaggtgcatttttagtttattcattaggtgcactttaggatagtctctaatatcattttaggaatatatatatatatatttttagttgtactttagggtagaatttcatatcaccttgcatggcatgtgcatgggggttgtttaggagaatttgaaggcttgagagaagactttgagagggcacatgactaccatatgaaaagaggataaggaaggaaggaagggagatttgggaaaatgtgggctgcatgacattggaaacattgaattttttttttgggaaactttgagattgagaggactctctctaaggtaggcaaaacattgagcttttttggagacttggatggaaaagactctttaggattgttcacagcatgaggagactttgatggaaatgactctctaaggtcgacacaaagtagagataccaagtgatgcaaggtcttatctcatgtgatatcaaagaggcttaaacaagtgaaagaaaatataagaaaaacaatatgtgaaatagattttaagcataaacaatcaatcatcttcaacaaccatccaatcaatgaataccaacaatctatgtagcctatacttccacaccaaacaatgataagtcccatatcaaagcaagatggaaggaaaagatagagatagagagatgatcatggtcaagatatgctgaaaattaaaaagaacatacctcttttccgaaaagatgaaaacttgattctctttcttgcttctctatatcgtgtcccaccttcttgcctcccaagacttcgacttttcttctcaattatgtaatagttgtcttctaatcctaatgcatgaatctctctttccaaactctccttgtcatgcacgttccaaaaaagagtccctttcaatttataaatctttcaatggcctctccccaagaattctcttccatctaaaaatttctaatgtcgtgtaagggagagtcatctttccaaaaaagtcgtccttcctaaaatcc

SEQ ID NO: 11935 - DNA, 3832 bp, Vitis vinifera
  Intron number 4 from transcript GSVIVT01018079001 (locus G SVIVG01018079001) derived from phytozome v7.0 (chr-ID chr5 ; pos 6293624 to 6297455)
ctcaaaagctatattgctgcaagatctcgtgataggtaagcatataggtttcatacatgcactcatttttttataaaaacaatgttattctctctcctaatggactttttgaagacatgatgtatcaatgcccttgactttggaaaatgattgtaagatatgccattacatctttttgaagtaacaagttgaagagtccatttggagagtatcattttcttgaggataaagttataatttatttatttgtttaccaatgtatttatttgttttgtgatacaaaaagccaaaaggcatttaacggaaactacaagaaggataatggaatattctcattgtttcatggattatttatcattgctttttaatagataatttatttcattaacgaaaatgagtatcaccctagtacactatacaaggtcttcagggtctaaatcaagggagcataaacttcaacaaggccataaataagctctatggaccttattttacttcaaacctgaaaaggcaatacattttttagcttaaaagggggtcgttgaaggtcttcaaaagtccatccatgcctctctttctatactcaccgttgaaccaagaagagcttttgtatcaacataagcttaatcccttcaggaactggctaaaaatattcatgatacttcctgaaaccccaaagcataagaatcttcatgctttgagcataccagtcacctccaccatccattgcacttctttgaaaatctccatgaccattttctcaaatgattcatgaggcatagccatgttttagcccactcaaatgtcctaccttccaagtagaatatatgaatcaacaaactagatgatattgaactcctctaccactcctctcctacaagggatgtttttctaatacccataggtagacctcttatcattaagggattaatattttcattcttctcctttatatccataaattttttagtttggtagttttggtttggttgatcttctttcagtttgtattttgtgttactgtatcagtcatcaactaggctgaattgcttcctagtttccagaaaatggaaaaatcatttcaatagcttgacccaagtgttttgcctagactggttttcaatcacactgaaaaattgtggctgaaagaggaagagttcaaagacctgattagaaattagtgggtgagttacactgtaaggggttcgtctagctacatcttggcaaccaagttgaaagctctgaaataggatctaaaagcttggaataaagaggtatttgggaatattgctaccaataaaattttagctctgaattagattggtttcttgaatgtaaaggaaagggaaactgttctttcgagggtggagaatgaggctaggaggcaatcaatggaggagtattgtgaatgggcagcaatggaagaagttttgtggagataaaaatttagagaattatggctttaaggagataaaactacgaagttcttccatgacatggtaaatgctcattggaagaggaataatttggctaaaataagggtgaatagtgaaatgttgtctgaggatgcaaacataaaagagggggtggtaaacacttttcatagccttatttctaagttggtagattagagaccgagtattagtggaatgatttttgaaacattgggtagaggtgaatcaaggcgtttgaagacttcgttttctgaggaggaggtcttttaaactctttctagtttgtgtgggataaagccttagggttggatgacttctcttttgccttttggtaattcaattgagaacttgtgaaaagtaaagggcttttttagtgaattctacgagctaggatcttttgagagaagcttaaatgtcacttttataatgctaatccaaaaaaataaaaaataaaaatggttcaaatgatttaagaaatttcagaccgatcattttttttttcttttagggggtggaggaggggagggaagaggaagggtttgggttgacttcttattagcagttttggaaaaaatgggatctagtcaaaagtggataagttggattgaatggtgtatttctatggctcggttctttgtattggctaatagagtattcttttagagttctagaagcttgaaaacaaggtgatcctttgtccctatatcttctcattttgttgatgtaggcactctccattatcttaagtagagcaaagggagggagcttcatcacaattttcttacttagtggaagagaatagggaatgaaggtcccacttgttatttgttgatgatattcttgttctttgtgatgccacaaaggagcaaatggaatagttaagttggacattcatgtggtttgaggcaatctcacgcctaaacatcaatttggagaaaagtatgttgattgatttcgattgggagagttgccaatgtggaagttctagccaaggttctaggctgtagcgtgggaactatttccattagatatttaggccttcctttgggagctcttttcaaatcattaaggaaagcttttagaaatgatttgttaagtgtaagagacaatacctaaaggaggaaggcagactctgatgcaaaacaccctttctagcttgccaatttaccttatgtctccttttgtcatcctagggaaggttagtttaaggttgaaggccccttgagagaaatctgcatttgatgaattggttgatagtttgaatggataagagaagtgggggcttgggtattagaagtttgtctatccttaacaaaattttgctcggaaaatagcattggagatggggctctagaggagtgagggaaaaatatggggtgggagtatggaaggctatcaaaatcagatgtgagagctttaagagtagaatggtttttagggtgggaaattggtggagtgtgaagttttggatggattggtggtgtggtgatgaatccttgggtgtagttttccttgcattatccttaatagcattactaaaggtgtatggctagccaaagtgagggagcaagaaggggaggttggatgttggaaccctaagttcactagacagatccatgattgggaactaaaaggggtggaagcctttttttagaagattgtaaacatagacaatttgtagtgatagaggataatatggtttggctgaactcaaaatcttccaatttctcaattaaatctctttgttcctcgttattttggaccattgggaaggaaaaaaatataagactcttgataacaatgaaaaagtggattaagctatcaaataatcctttatgtatagtttttttggagtagattagagtgtgcttaggagattgctttttgttatgtgatggactttattgattgattgaactctaagtaaggtgagagaattgttttttttttatccctttgctttgattggccttttggtggtgcctttgaatacactgtgtatgcttttgtgcacccttttgttggcactgttaatatatattatttttgcctaggaataaaattgtgttattataggatcagtagttaactatttaaaaaatttagcaatatttgcaatttagctttgagttactgaccaataagtatttcttgttataccaaaaaaaagatatgctacctagagttgagttaccggcttgagcatcatcccctttcttgcatgtattgcattttcatagctcattttgtttccagtagggttcacatgcatcatctttttatgaacttccaggttgtgttttcttaattttgaatggagtttattttgatgtgatgatgcagtgacattgctgttattgcaaaaatagagagcattg

SEQ ID NO: 11936 - DNA, 5395 bp, Vitis vinifera
  Intron number 1 from transcript GSVIVT01037259001 (locus G SVIVG01037259001) derived from phytozome v7.0 (chr-ID chr6 ; pos 16830187 to 16835581)
gcaggactggcgcggccgaaagggacacagagcaggtaatgcttcattgttgctttttggaacttcaatttatttcggaattttttaatgataagtggcaaattcagaaaatttaggttggggtcttttgcgaataactgtgtagaaagtagtgtaaaggttgttagtcgagtgtggaatgttggtgggacactttgttggatcagtaactgcaaatatatgtgtttgttctgtaacttggattatgtcttggtagcttttcagtgtaagaaagtgacattttgtttgataatattgggattatatttagaattggattggaagtgatgggttttctgggcaattacaagaccttttgagcggactgattaaagtagccatgaatagattccgagttcttacttcaatgggctataggatggttggtcactagtgactctggaaatcatttgtcttttattctgggtcagttggaccttattcctccatcacttggtaaaccatggtttctttggactttattcaattggcaagtttggggatatcgatttctctcccaatccttttgcaatccagtttttgaggcatgggcggataaatggaagagatagaagtctaagttttgcactacacgataaaattggctgctcttagcttaaaaatgatatgatttcttgaaatttactattgaaattttgtaatctagctgcacaacttgtattctttgaaaaatacatacgaagatccaattgtttatgaaactttttctacttaagctctttccatttcgttctttgtgtaggccatttgcttgctacttgcaactctgaaatatatactcagctaaggtcatgcagattaatgttttcttatttattttttattattgagcttagaaaaggccatatcttctattaactcagaagctaccatgtctttcctcactgcatcaacctgtgttctttgttggccttccttgcattcctgtaattgtactgacttttacatcaacaaagttactacttccaattagtcatccctccaagtcacacaggctcaaaccaccttattgaaatatctcctcttccatcaattttttctaccagtaacttctcatgaataaataattatgtcgttttcttgcctttttattgtccatcataggttactcatttatcatggtttaaacccattgataacttcatctatgcttctcagaataacccacaaaatactgcctcatccaacaaatagaaaaccctctgcacaaatttaaagaatagggtggaattaccaaaaaaatccacagcaagtaagaacctatttgggaaccgttttaaagatattttttaactcttaaaaaaggaaaattgtttttaaactcaaaatcaagtttggtaatttcttgacagaaaatagtttcttgagaacttgttttttttttatgacattttaattgtttttacttgttttctagaaattgtttagaaaataattgtacaaatatggagaatgagtgaaaataaagtagtacagataaaatttattttaaaaatatttgaaaatatagaaaataagttaagaagactccatgttttcaaacaaacttttgttctagaaaacatcataaaattgtttttaaaaaactgttctaaaaaattattttttgaactgttttcaaaatcggaaaacacgtttggtaattttttgacaaaaatggttttttgagaacatgttctgaaagcaatgttttttgagaacatattttaattgttttcacttgtttttaaagaattgtttaaaaaaaataattgttgaaatatgaggaattattgaaaataaaaccccattagtaaaattcatttttaagaaatatttgggaatatagaagataggttgaaaacattccaagttcccaaatggacttttgttctagaaaacatcaaataacttttgttgaaaactttcccaaatagggcctaaggttttgtgtgaaagagtaacccatagcttttggaaaggtccacaatatgcaaccaatgatcttgtctttcctgcccaattcctagtgtaggataattgtgaaatctttctttttcaaaagtttagaaagccccattgtaggttccttttttaggccttctgagaggattcatgtggcaaccaaagactagtagggttcctatgatcccctcctgccaaaagcttttccttttgattttcacccctagggtactttatttggctaatttaagcctttctcatcaataaattgtaattttatcttctcctcttaacacctaaaaatgcaagccctagcctactgtttcctgcttatagacactgtaagggtctgcatcggctggaaggttgtaaaacgataaaatatatgggcaggaagaacatgaatggacctattgagtaaatatcttaaagcaaatagagtgaagctattgccaaagctctatgtaagaaggctaatgggttggtgtacaagatttagggacagtgctaggttgatgaggatggattatgaaacctagctcttaatgggttgagtcaaatttgacttgattgataattgattagatctaggcttggagttaggtatatttgatctaagtagaagttaatcttattactgttatatataatagttttgatgtatatcattatatcatatatacatatatatggacaaggtggggagataagagtcattccacctttggttggagacaaagagtgggaactttttgtattgggtctctgtactctaacctggaggtgaggagatcaaagttgttcccctcaggtattgtgtggaatgcttgggttccacctaaggtaagctttttcgcttgagaggcgacttgaggaaaaactgactcttgatcagttacaacggagaggttggtcttctgccaatagatgtttcctgtgtcacactcacaaggagtcaattgaccacatcttttgcattgtagcaagacgagggtgttgtggcaacttttgttctctctttttggtatttcatggtgattcattcctttgttagagagactcttttaggttggcatgacacttttgttgggaggaaaaggaaagaggtttggagagttgctcctttatgccttttttggataatttggaaggagagaaacacaagattgtttgaaaatgtggagctctctgatcatagattgaaagtcttgtttttgtgcagcttgttttctttgtctaagttgtttatatgagaaagattactgtctttatttgatttcattgattagatgggttcagcttgagggagggagtattttttgtttttttgtcccttttttggcggttattgtatacatcgtgtgtactttggtgcacccttttttttgtgcttttcaatactatgtctatctatatatatatatattatggcaataatttgataattttttaacatagatcaggaagtgtaatatcttattcaggattaagtgacttatttatgctctgtcaaatttggatttgaagttggagtttcaatataataattggatttgaacatggatactgccatatttgcattgtggttggcccaccttctgcctattaagtactttctggtgtcattttccaagtcaagcaaatatcttgataaggagtcctaggcttttgtaccaagctatgatgaggtatggaaatgaggttctatgcaggaaacaggaccatcttcgtataccttttgttcccttgtactgaatacttcctatctttgattatcttaattatgagcatataggcaattaatggggcaatctaggttcaaaatcttggccaagacgggtatgacggagacgggttgtatccgtctcgatcatgcctggtattggactgataatcgagttagtgttttgctgactcgtgaatcgactctgctgaattggagattaatcaatagtctagatgcaaattgcataacaactctgagatgattccaaaattaggctaatatttatttgggtgatgggtgatgggtgatggagaagacaatgatatgggggagaaaaacggtggaaaagataaaaaaaaaagccatgaaaatgaagaactttggaaggagattttggagccttggtttgcatcttcatccttcagacttgagcttttgcgtccttgtatgactgatttctctttagtttaaagccttcaaacttaagagatgtaagaagttgttagttgagaggtgaaattggtatattgcagagaaatgggtattgtgcacaatgtgtagggaaatgaaacggatgtttacctaagtatgtgggtttaaaaatggtgataggtatttgggttatttgacaacatgtgtatttaaatggataattgggattttataaaatgaataataaatatttatgtttatatgaaataaatagcttataaatactaatataaaaattgaaaattaatgtatagaagtattaaaaaatatatttatttttaaaatttatttattcaaataaaaataaaaataataaaaactgttgtgttttataattgttttatttagaatatatttgatagtaaaaataatctttatattgtaaaagatgattcatggaggtaatctacatccataatggtagaatcttcgtgattctttgaagtatcagagccatattagttatgttaatggtaactgcaagtaatttgttgccattactaattcatcgagaaaagagaaaggagcaggaatgaccctcttcaatgggatttcactgccgcattattttcccagaatcttacctaatgttaaatattagtcctcagcacatttgtcctgttgcttaaagttattgttccatcaagaaaagagaaaggagcaggaatgaccctcttcaatgggatttcactgccgcattattttcccagaatcttacctaatgttaaatattagtcctcagcacatttgtcctgttgcttaaagttattgttccatcaagaaaagagaaaggagcaggaatgaccctcttcaatgggatttcactgccgcattattttcccggaatcttacctaatgttcaatattagtcctcagcacatttttcctgttgcttaaagttattgttccatcaatcctagaaagttaatatttgaaattccttatgttcctgccactactgtgatcccctttgtattcatcttagtctttcagatatacaaatttgttgtcctctttagaatttctcaaacacaattgtttttctaaattttgaatgttgaagctagattattttctatttcacctgcaaatgtgctgaatatgttttaatttaggttcttggctaatcttacaacaggcccttactgctcttaagaaaggggcatatttact

SEQ ID NO: 11937 - DNA, 7175 bp, Vitis vinifera
  Intron number 2 from transcript GSVIVT01010682001 (locus G SVIVG01010682001) derived from phytozome v7.0 (chr-ID chr1 3; pos 11615764 to 11622938)
gcaaaaaggtattaccttctgattcctctatgtttactgttttaacatgaaatattcagttacattctttcatgtgtgtcagacctttcatttgattcactgaaactgagcattgggctctgaaaggggcagttgaatgccatctaatcttcaaatctctcttatttatttgggtatatatagagaggtctatgaaaactaaatggttatgttgcagcaccccaagttgtaccggtgttttaaaaggctattgaggcttatatacatcaaggctcacctcaaggcgaggctttgtgaattagtcttgaggctatagcctcatttagcttaattaaggcttataactgtgaggctatagccttaaggctattaaggcttgagcctccaatattgaaagggttttagtcggcttccaacctttgtgggtttatgctataatattttataagaggtttaagcctcaatattcaatgagttttaattgttgctatgtttttgtgggcttttggcatagattttataggttttgtattgggtcctggttttggttaaactttataaattaagggctcatttgacttccaattaactttttaaatggaggagaaaaagaggtattaagaagaaggtgtcctagtagctgagcccatataattattatcttattattgatggataaggaaaaatacgatcggaattgatggataaagaggaagaatgagtggatattaacattgatgatgataataatatatagcaagtgaatattaacattgacgaagttgagcagtccaatcaagctattaaatctgtttttatgtatacttttgtgaattaggtctagggtatatatagagggctacacgttgtttatgttagattttgtagattggttgagctccaagtaagaaaaaggttttgttgctcctttctttttcacctttattgggctttggttgtatactttgtgtgttcttgctacgccaccttttaggcacttttaatacatgccctctttttgcctatatgaaaaaaaaaacatagcaattgaatatgattattttcttgggaggatcctgcttgtgagagtgataatagtgttgaaaattatttgatgaagtcttgagagagttaaatcttagaaaagagaaaaatgaactaaattacaaactattaacaatggaaaaaaaataattacttttattatgatgaagtttatgcattattatcattcaattttcttgtgattttattagtatttttttaattttttgagatttttaatttatttaaattgatgcttacgccttgcctcattttagcaaaacacatcaaagctgcctttggccttttacaactttgtcttgtacaccacaaaaatgttgcatatgcaacaataacacttagtattactttactattcattaaaagaatattttgcttctagtccataagtaactgttaatgttctgttttacaactatcatgtcatgtatattattattttgtttttgataggcaccatgatttaacttcagcttatctaccttaaatgaaatttttaatgattgtgcattttgttctgattctatcatatctggaaattgcattagtttccttgttggttttctcaatcaagtaaaacgttgtgtgtgatgatggtattatcctactaatttacttaagatgggtccacaagtgtatttccttttgctatggacctttttcaggaggttgagtgattgggcaaagtaatccttctctagatctttattgcaaattttttactgaccttaggtcatgttatgtggactcaccaaagtatatgaagcaatcaagtcttgtgcatatctccaacatgcctattgatctgatatatgcatactcatgaggtgtgtatagcaaaagaaatgaaactcaatagtttgttttataggaataaccttagactgaagatagacagtctgtattagttatataattcaatctggcctagtctatagaaatgagaaaaaaatggaaactaggcaatttagtcatgtgtctgtgtcctgtgatatgaggttaaataaatttgacacttaggcacatgccaaaaccttatgcttcttgtgtccatggaatgtagactaggttgaagagtgatgtcccagaatggttatgtaatatgaacctaaagaaggattattcttttttgttggatgtggtgtaggggattatctatagatggcagtattggattcggtggagtgtttccctttattagaggtatattttggaggttgagggatcaggcaaaatgattcttatttttgctttcattttgtgtttttagggaaaccattagtcaagttatgacaagggaaagaggggaaaggaggtcggattagaaggtagtttctttgaggatctacaagtgcttctggttttgcacatccaatgtgtgcattttatgttgcttttttgtcatcccatgctctcaagcctttgttatgtgcacttagtggtggccagtttttgagcaaagtcagagtgattagggttgatgatattattgatattgatgagttagctgcagacttttggagtttgggtggattcgtttcctttgacctgtggcagtaatttcaacactaggttagttcagagaatgtcagaagggaatggcttcatggaaatcatgtcgcctgttggagggaggtaagtttaatcatccctaatgcttttgacctttggcaactctctctacttttcaggtgtcttcagtcatgacagaatttagaaaattcttttgaggctggaaaaagttaaatgtcatttggtgagttgggacttgtagttttagtggatcacatacagtagccagtcttctctcaattgattaacctgactgattggattgagcctctttcagtagtataatgaatataatattattatatttgtggtgagaaatcgtatgtaaaaacaaaatgttttaggtgtttcttatgtcatgtgtccaggaaacctttagaattgggcagcagatgtaatgtagttgctgtttaaatgaccaaatgctcataatgttgcataataggaaaagttggattgacagacctccaagtgtacctcatttgtactcctttatgtggctgttctgctgtttccagccaaaatatgtttagatcgtggatgatccatctaagtggctatttatttataaggaagacatattagaagccccaaagcaggtgacactagtactgggggagcatgcatgggaaagcccaggaaggcaaaagaaaaataatacaggggaagaaaaagagaaaccactagtgatctagaaggaaaaccagaaaactggtggatataactgtactcatgctgcatgaatcatcattgaagttcacaaaggtacatcaatgggttttcccattgttaaggtctaaagcattaagggtttaatcaggatatgtctttcagcttcaggattgtacatttttctccctcaaaagattcttctgctatgctcccttcaaaggcaccaacaggtacgatggagcagatcctactgttccctcttgtgcttttgacaaatttcctatgcctactagcgagaaatccttaactgactcaagaacagtcatgatgctaaagaatgaagattaagatttgattctcactagtcatcagaaaatggatgaaaatgtgcttggctgaactctaattcctttttacacaggctgcgaagatttcctagggagaaaactctcttctttagctgttctatctcaagtggttttcttctcttggactacgatgttccacaaaaatatagcccctgatagataaacatgtagaagctgattgcaattttaaactgctataccatgtcttaggataaaaagagatcacctgtcactgcatgacaagtttgccttggcaatgctgtctcacttttatctaggcttggcatattttatgtaatgtgttatttatttatttatttttaaatcattttaccagttaagagtttagagggcaaagtgctgcagctggaagctttggaacttgtattatgaatagagtttgcaatggctttttttagagccaatgttttagaaagctgttgagacttatgccctgaggtttgcatcaaggcaaggcactatgaattagccttgagcctatagcttaaatatcgggtaactaaagacctaagcttcatactaataaggcttccaaccttgaggctatagcttcgagattattgagacttaagccattaatattcaataaatttgaaccactgtgggattttctatctattctacgcttaggccacggtatgcccatgtccatgggtataggtgtcaagtgtgggtctatgtctaggtgttgaatcctttagagctagtgtcttagaaagctattgagacttatgccctgaggtttgcatcaaggcaaggcactgtgaattagccttaagcctagatattgggtaactaaggcttaagcttcatactaataaggcttacaaccttgaggctatagctttgagattattgagacttaagccataaatattcaataaattttaattcttgtgggattttctatctattttatgattaggcctcaatatgcccatgtccatgggtatgggtgtcaagtgtgggtctatgtctaggtgtcggatcctttgcatcccaaaatcttaggacacaaggattcgattgaaaatgatctcaattaggggtgtaggtacttggatacaacattgattattatatattttctattttaattgaatgtttaaagattattgaaaatttccatttatctctagatttttaatatattaattttgatatttcttttttatttttattatattaattattatatttatctttaaattttatatattgttaattatcatatatttttattttaattgaatattaatattattgaaaattttcataaatgtgaaacatagttatgataaatgttttattttaataggatgttgagagaatttttaggaaattaaattgaaatttatttattattttccataaacattgataacttgtaaaaaaatgtataattgactttgagtcaacctctattagttgaaatgttccaaaatttatatttttaattatttaaattgaagctaattaatttttaaattctatactaattaagttttattatttcgatattgatatagttcaactttactatatatctctatgtaaatatattttttaaatcttgttattttaagttgataaaattagtttaactttaatatttaaaaaaaaatgaaaatagataattgttattatctattataatttaatatacaacatttgcactcatgttgtatcattgaacacaggtattttggttgaaattaaagtatttgtgtatcacaacaatatgcaatagggttttgtgcttttgcggggttttggtgtagattttttaagtcttctatcttagattcaatcatcggatcaaaccttttataaaataaagatttcgttggcttccatttaaccctttaagaggaggggaaaatttttgaagtggttagcttcatatgtcagtcattatttaattattggtggatcaaggaaaaaaagccactgcaattgatggatgatgaagaagaatgattggatagttacatttgtgagaggatgatagaacaattgattatgatgatgattccttgaaggatcctactaatgatagtgatgtgatgttgaagattatttgatggaggcttgagtgagtgtaggattttagaagagagagaagcattaaatttaaaactattaaaaatgacaaataattactttttatgaattctttgtttttctttattcaatttttatgtgattatataagtatctttgtgatttttgggattgttgttttcttttttattgatgttgctattgttgttgttattattattattattattattatcattatcttcttcttcttcttcgttgttttttttttttttttttttttctgttgttttatttttgaagctgaggcttagccttgttctgcctcaaggcttatgcctcactacattttggcaaaattctcttcttctttttctttattttttatttttttatttttttgttttcattcttgttttttttttttgaagttgaggcttagccttgttctgcctcaaggcttatgcctcactgcattttggcaaaatgcttcaagactactttaaccttttacggcattgtctggggagggggtgtgtctcttcagttcttttgcttttgttcctttgtgagtgcatttgctttgatttcagatgttgcatttccttatgaattttgggcttgcgatcattttcttccctctagtgtatattattttaactgatggaatattaaagcatttgccaaaaattggtgaataacttgggcattgtaaaattttgttatatgaatatatgaaattggggaaatgttaagtttgacttagaacattctttctaagaaatacataatcagttccgtgttgcttaaaaaactaaaaaaaaaaaaatatttattctgaggtgtgcatcacaagtaaaattttggctaaataacattttggaaatcagcctgtgtcacttctagttcactcatcttaaaaaataaattctatgggaaaattatttcattaaagatatttaacgtcatatgaccatagaatattaagctgccaattttagtggttagtgccttttcccttttcccctttatttcttttttttttttttctttttaaaggaatgccccacttatggctgtggttgagcttagatctgcaaaggtatggtatcctggtttggttggttcagcaatttggtctgtccactttttgtaagttgctaattatagaaaatcacaaacttaaatattattgtcagagttcatgatagatcacctaattggtatgtttaatggatgagtggttagacatctattgaatgaagttgtctaattgaaagttagtgttatccttgtttgatagaattccattctgttatattccacctactacttaggtaaattaagatttattttctatatagaatttctaaacatttatcaattttcaaacagggaaagacctacactggt

SEQ ID NO: 11938 - DNA, 8237 bp, Vitis vinifera
  Intron number 3 from transcript GSVIVT01031653001 (locus G SVIVG01031653001) derived from phytozome v7.0 (chr-ID chr5 ; pos 19621788 to 19630024)
aaaaattcaagttgtctaaagtggctgacataaaggtatgcttcttgtttattcagtttctggtaaaattgtttgtattattcactatttaaaaaaaaatataggcaaaattacagatagaaaagcaagcatgctataagattgaacgcataagaactttctgaaatagagcaaacttttctaatatctcagtagccgattccttttatggaagatgtgattaatattcggtatatcattgttagatatatagttattttctcctgttcttgaacttgagttggttttcacttatttattccaactgcatcactttgggacaacttagttttcagcattttttatcccatcttctagatttctggtttgtggtgttcaagttgattgaaatatctagttcctttttctaatttatttttaaatctttttaagggaacaacatccatttcctgtttaaacctgccaatcatccttgtaattttctttgtcattaacggctgtctagtttgtaaccctcagaaggataattactttatgtttctgttcctatgttattggttttgattgttttccatattcacaagctcatgggtatagatgcacaaattttcaccaaagatggaggctaaaatcatgacattcattcgtatcaacttcaatatctcattatagtgattcttttcagtaatgattttatgattctgtctgttgctttgttattgctttaattgagatattagtgattcttttcagtaatgattttaagtttctgttcctttgttattgctttgattgttttgcatgttcacaatttagtgaatatatgtgcacaagtttttatataaatgaagactaaaagcacaacattcatctgtatctgcttaatatctcattatttattgtccaaattttccttaagttcatgtacaaagtgctgcaaaaccagaaactttaatctgattattgttagaggcttagtggaactgtttggagtagggaacttgcttctgcttcaccattcctatttgaaaggctacataaactcttgaagggtgctttggtgaaagtttcatagtgaaaatatccatcccatttttttcttatgtacatctatacttagcaaatccctgcctacctataacatttttcattatttcatgtactcacaaggtggagtgcaaaaatagccctaccttcttgctctttccttatccttttccacggttataattcattctctcctacatattgcactgtgaacccacgaagaagaatataaatcttgaacaatgtttccttctaaatgaaaaaataaaatcttgaacaaatttgttatttttcagtgttgcatcttgccctccctttctgcttcccatgctgctagcatcaggtaacagctaaaacataaccacaaatattaatggcttcttgcagagttagtacgctcaaaaattaatgagctgttggagaaaagatgactaatggtttttgacagagtgacaattgttgtttatgtttttcctgcttatggacacaattgttttatattttttgggaatcttatcatgacagttaaaaaaatgggatatgacctaatttttcaagatcattattagagtagtatgcaagttgaggagcagtatcaatcttgttcctggatattgctttttcagaatagtagagaaatatagatttggaggaaggaatgaactggtacatgcagctctaagttagtgccaatggcgtatgattttgcaaaaggtacatacttttgatggaagagatgaatggttaatgtcctttaaaagatgaattttatcggatcctagtagaatctcaactcgctacaaggataaagcaaagaagatgtaaggtttacagggttgtatcaaaaggaggtgtggatgcataagaaaggacaatactattagatgttcataacaggaaataaagagagaggataatcctcgaggatgaggtcaacattagaagataaaattcagttccttttgaacataaaatataaggaaaaaggaatttgagagaaagaaattgattctatatggaataggaaaaaaaaaaaaaagcaaacaattgggaaagagatatttagataatagtgagagaaaggccactttgtaatgaaactaggaggtggaatagcattcaaatggttattggtcatgacctcaaaaagcagtagtaggaaagagttatatagacactaagaggtctgagtacgataacctatattaaatttgaagtgtacgatgacttctatggtggactaggtacaagggatggtaagaaagatttccagaaactcgacagtgccaggaaaagaagatatagcatttattaaatgcatcagcagtggataccaagacatttgctgaatgaccaggaaattaaaagatctggatgatttagtttaaagaattgttgaaacaaaagcccatcattatctcatcatatatttgggataatgatctgaagtttagcagcttttggatagatgaagttggggcactctcaagaatgaatagttttgcagcatgaggatgggaaagtgtcaagagtgaaagcctttgtaatttgagattttttaatgcattcttgactagattgtttgtgaaaatcacaagtacatataaaagcaattgaattggggaaaggcattccaatgcttatgtggatagaataattacatgcataccagttcctaagttccatttctgtgagcttttgcagtttagctccatgtgcttgcagagaaaatttagggaataagaaagaaaattgattagacttaaaagttctcattatttaggggccaataaaaccaaaaactcttcagcaaagctaaagacaatgatttggctagttaaaattgacttctatcattttcatgaaagaaagacaacataaacacattagttgaaatttttatttattctcttctccattttctcataaacaaatggggggttgaggaagacctagagttatcaatgaggttgcattgagatgcacaaaatcgttggggtttatacggctcatggaatcttgtttcagaagctataaatccttgtagttattcaaaatagtatctcaatttccagtatcatagatcatggaatcatcagtaataaccctacctaaatgactttcataactgtccaatatttgatatttcttattttgcctgaaaaattagttggctcatcatagagatgcagtaatcacttctttacatttttgtatgaattacaatgaaagaagagaaaatccaattatctgatggatatataaacttcgaaaacagcagcttccaaagaagtgtttgatgtctgcaatcgtgttttaatggaccacttccaagcagactaggaaaactcacactcccagactatactgacatattcaatccaatttttatctgtgttcataagaaaacttagatggaattttcagacctctgtaaattaactctgcttttccatttgtattcaattcataatagaattatcagatgaattcctgtctcacattcttgggtttaaggatcatatggtttgggctactccaagccttagaaaactgtcaaaatatttgggtgagggaatgctattcaagaatttcttcaaagcatgagtgtttaagggggaaaatggaaatgcagaagcatacatcatacattgtttcaagtccatcacaacaaacatgattactctgaggttccattctttctgattgtccttatcagcacactagcttcccatttggctgctgataaaaccaaggaaaaagaaaggaaaaagtgaatttggaactatgttctatgtcatcttgtttctgaaaagaatcaaatactcagctccaagtcaaccagatagttgtacttgtatcgagctcagttaaatagaggtcctagttttttcatgttccaagccgtggaataaaagatataaatcttaatttttttattcctacattccctccttggtgcatccaagatgcaaccatcatcctccccactatttttggtttggagaaagaaagtgtagaaaaggaaagaaaattacatgatttatttcctttttcatgttggaagaaagtgtagaaaaggaaagaaaattacatgatttatttcctttttcatgttggctaagtaaggacagaagagaaaatggaaggaaaaaaaaagtctgtgcttgtgttgaggcactgatgaaaacatagtgcatttgatgctcccatttgcagcagcaccaatattgcagttgtgacaatgggatcttaggagttgttgcaatgtgctagctgcgttgtagctaggggtgcagtgtggggttagttgtggtgccatttctggatgctgcaatggtgatgcctaggaggtggagggacactagtggtgatggtcatcccaagattctgtaggtgccaatatttgtttaagatggatttcttaacaggtttttgttgattttcatccaaatcttacctgtttagtgtcaaacagaataaggatgttttgcaaaaatgtcatgtaaatgtgcctcataggattcccacaatgagttgatctgtgagccagcccaggtggacagtgccagttgcaatgtgttggctggagtagcattagtggtgatgagggtgattcataacttcataaatgcagaggcctaagttatgaactttcgctttcatactgtaccacgcttctttcttgattactttctgtcaaaaaccaaatgtaggaatatgctttagcatttttgttctttatcctagctatcatgcattgctttctaaaattaagtgaaagttttaccagttatgatatggatcttctctccaccaagcctttcttttgttctttattaagcacatccaagaaagaaaattaaaccctttttgagagagctttttaaatgctaaaagcagcgtcgacttcaaatgcaacttttaagagtgttagaacaaaggtctcaatcgtaggccccacatttcctaacataatttatccacctctagaagcaaggagactcatgcttttccataaatgcaatacaagaaatagatttttatttaattaaaatctttaaaaatatcaaaattatccatatttttaatagcagcattcttaaagtacaattcctgaacataaaattcaatcacatagctaacacaactatgtcaatttccacttccactctaaatgcaaaagtcaaatgctatcccaaataggcttttagtggtagacaccttcagcagtgaataaataaactcctggtacctgcgcatcaaaccttgctttttaagcgaagttactgttctggaatagttatttgtgttgttttttgttttagaaaattcatttcatgattatgaatttctgtttgatgaatctttgcatgtatcaatgagctggggtgatttgaaattgctaggaattgcttgtgaaagagttttgaacacttcttaaagaattcagactaaccagatcgtctgattaaaccagactcagtctaaaccacctgtttttcatagataatgacattgtttatacacactttcagcttgccgaattgtttcttaaccgactaacaaattagaaaaatgaaaaaaaataaaaaataaactaactacttactctttcagatttcttttaactggtttctactttgatgcgttcccaatgtttaaggttttcgttttctttggtctgggattcttttgaattttcacataatgatattggcactagcttaatgttattgaatttttatatggattgttttagttttttttttttttttttcaaaatacactcaaagccttgccacatttgatcatatctttcaagactacaattctgaattgttattttggtggaagaatatcattttaaattcaaagtcataaaaatatctcggcaggcttggtgaaaataaatatcaatactgtgtgtaagcttgattactctttttgtcttctaaatctttttcatacttgctttcaatataaacctattcctttctgatcaaaaaaacataaacctatctcttccaaaaataaaacatgatgggatacttcttgttttgtttcttagaagactataaagaaagatgcactttttttaaaagaaaattttcctcttttttttgttcataaaactagctagaaaatgttttgtatgatgtcagctatacatttgttacagtctagatagtacgatttcatccagctttagagtgaattttgaaatgcttggatccttgtgtacatgtaacatgctctatcatctcctgacttaaatttactcttgttgttttgttcatgttcttttgcttttactgtagttatttcatcatcatcatttctgtcattttatgtgacagcagaaagacagaggccattttccaatgttcatgttgcattgtgagatttttactttgaaaataggaattacaatgataaactaggaactgcattattgtattgctgtcatctattcaagttcatccttaggttgtcgttcaactggataatacatgaagttcaaatcaacacctctatcacctagcctatgccatgtatgttttaagtatcatcaagatgatgtaaaatatcccgaaaaatatttgtagaggcaaaaatgcgccataaaaaatctttttaaagaacggagaaaaaaaaatttattatctaataaatttgaaggccttcacaatgtcagcagaacttttgaattagagatgagataaattataaatatcaagattgatgaagccaaaagaacccgaagcatactgaagattcaacatgaaactcatttaaaggtttatcatatgatattttactacataggtgtggtagaagaatgtggttatgttatatgaacatgggtatcaatacctttagtaaacttataaattgaaagtgaactgaaaattgaaaactaaaaatagtaacaaagcaaagcaaataaaaaacagtggaagctgatggatacataggatagatcttgtttatatccttcttaatttttgtatgaaaaaataatggaatttttattgtaggaaaatgttttttcctggattcataagacttcatcaactatagttagttacaaaaactaaatcggcttaaatcttcaaatgttcatatgtcaaataatctttagttggacaatttaaagaaactaacttgtcatttagtacatggactagtgtggattaaaatttaagggacaaagttgttaagagcattgacagtttaagctttaggaaaattcgtaattcaacgaagtatcaggtaattaattaaactggaagtctggctaacatgatcacaaatttgtgttcaacaaaattgatgcctttatccgagatagattttttctttttgctagatcttcttttaagaacctactgtaaaattgtttatcccctcttaaggcaagcattagagtttacaatgtatgtctccattactacatatattgcctttcttttgatgcaaatgaggttgttattatattgatcagtatcctattagctttaatattctatcaatgcagcagccaaacacatggaatagtatatgtcctttgaccttctcatcagaaaacgaattagtaatgaaggtaggtaaaacttttttatgacatttgacatcaccatcatttgagtaagtcctcctcgggtttaagaggacatttgatgcacaccccaacaatccatccttgataccaatgcttgaattgaaatttgaccaactcatctgaaagtcaattggagtccaatgaagattagccaaaccttttatggcattcaatatcacaatcatttgtgtgacctctcgtgcagcttatgagttgcattgttgcaccctaacaagatttatttaatatatattatcagacattaatggtatatttccacctacggtgaacatcatattactacctaacatcattatttattaggaaaatttatactatggaaaaggtacaacaaattctaatatagtcatactcaaaaaggctacccttctagcctttataacggacagttgaaacttgcagctcagatcattgaaaagctcaaagctgaacatggttgaagctatcttcatacatggtttgatttggatcattcttaatctaacaaaataattgttcttgtacgacaggatccaggaagctcagcagccaaatctacagcgaa

SEQ ID NO: 11939 - DNA, 7114 bp, Vitis vinifera
  Intron number 16 from transcript GSVIVT01013666001 (locus GSVIVG01013666001) derived from phytozome v7.0 (chr-ID chr 18_random; pos 2224626 to 2231739)
tcagaattgatcgtctagagtctttgctatcagaggtaagattttcttctctttctttttattttcttctattatttattctcatgtttatgttcaaattgagttgttcatgcttcaaacatataccctcattgcttcctttatttctcaaatctataccactaatcaattgtgataatttgatgcatgacatagttcttgtttgtcttaactcacatctgtgttcccaacctaaggatggatgactaccaacctggtttgcacatcctttctgcatggagcatccttttcatggtaggcatggatctaaatccttgataatgggggtgagcatattggatgtctaattttacacacataccatatgttcagtttgtaacatgtaggcatcatggtgatctagctaacaaatgttttttttatcagaaacaacaattcattgatagggaattgaaagaacatgtgaaggataaggaatcctttcccctagatacaatactctaggcaaccaaagcaagtggataaatcccctgaagtacaaaacaaggcctataccttaatatatcggccaaaagcaatatacacgaaaaagctactctactctttatagattgaagctttgctcaaagctcaactatttttactcttatgattcacacatagaatcctaattgagcttaattacattgagaggagtccccttgaaagctacaattgttgaggcccaaaaagaaaaataaagataaattaggtctcatatggcttctgtagttctttacatatcctagaaaatccttacatgtttttccttccatgctatctgtggaaattcaaaaagtacagttgtgcatacaactgtaccgctagctataccgcatacagttgtttcctactctaattttatttcctgattttttgagatactcactcctaaaatcaaggattagatttctttttttaaggtagatgacctcagtcattcatgtataaacattgatgcaataatcaatttgaatagtgtgagaaaaataatagttcttttttcttcttcctcaaatttcttcatggtatcagagataattctgaaccattcaatccgtccatgaccaaatatggaatggccactaagaaagactcctcaacctcaaaagtgcgttgagaagaaagtagaaagaaagtcatgttgggggcacaaaccaaccaacctatcaccgagtgttcagccctagcggctcgaggtcctcccaatccttctaacaacaatcaaccaagaaaaataagaccttggtgtgatcactgccaaaaaccaggtcataccaaggacacgtgctggaaaatccatgggaaaccagcgaattggaagtcgtcatgtcctcaaaatgataaagaaagtctaggacaccatgtcactgttgaggacaacccagtaccacctaattccaatctgttcaacaaagagcaattggaactattacaaaaaatatttaaccaaccccaaaagtggcaaattccttcaattctatcatcggatccagatccttagctcaaaaaggtaattttcttgttgccctaaaagtaaaaaagaaaatttaagtcattggttgttttgactcaggagcttttgatcacatgactagagatgccacaatttttcaaaattatacgctttattatgggaattatacttttcatatagctgatggttctctctcaaaggtggctcgtacaggttctattgtcgtctctaaggacctaactcttgactttgttcttttggttccaaacttggattgtagtttttttccattagtaaactcactcaagaaaagaactatgttactaaaattttcccaaaccattgttttttcaagatttgaattcgaggaagacgattggcaatgctaaggtgtattcaagacgctatattttcaaagtgactaattatattgaaagacaatctcaactgatagttggtgaaaaaaggtctgtctttagttctaataaagataatgatgttatgttatgacattattatttacgacatcctagtttcttgtatttcaaaaaactctttccatcattattcactaaaagtccatatagttttcaatgtgaaatttatcaattatgtaagcatgttcacaagccttatccaattcaaccatacaaaccatatcaccctttttccacgatatatagtgatgtttggggatcatctaagataaaaaaaaataactgggactagatggtttgtgtcctttgtagataatcatactagcatttcttggatattcttgatgaaagaaaaatccaaagtaggacaaattttcgaaaatttttataacatgatccaaatccagttttatgccaaaattctagcgttaaaaactaaaaatgcaagatattatttaaaagaaggtatagttcatcaaagtttttgcattaatactcaacaaaatgggatagctaagagaaagaatagacacttgttagaagttgcaagggcacttatgctctcctcccatgttccaaaaatttttggggagaagctatacttactacagcctatttcatcaatagaatatttacccatgtcctgagtttttaaacactgtgcaaagtctttctcaaatcataccctaggactcggctcatttcctctattcgctcagcctttgttcatattccccaacaacattgaagtaagcttgatcctagggccactaagtgtatttttctaagatactctccaaaccagaaaggttataagtgttactctcccatcacaaaaaggttctacacctccatagatgtgacattctttgaaaatcagtcctattactccaaaatcgatattcaaggggagattagaattcaagaatactagttttgggaaacaaaaactatgaccaaacctcaaacacttgagtctattattgttcacaactctaaccctatctttcctactctaagtgtcccactccaaactattgaatttgtaggcactgagccaaatactccttttcacccaaatcaatctcaaactgtcaatagcaatgagttcattgtctactcaaggaaaaagaagaagtctcaaggagatatagaacaacaaatacatctcggactagtacatgaaagcgaaccgaattcagtcctagaagaggcacactgaggtaacattgattctaatcttaatgagtcaaaagatgatgagctcaatttgctaattgtcaaaacgaaaggagtaagatcttgcacaaatcatctaatttttaactttatctcctataaaattttgtcaccaggttatcgggcttttgttaccagttttacggatattgaaattcccaacaatatctaggaagccctacaaatgcctaaatggaaggcaaccatcaaggaagagacctgagctcttgaaaaggatgggacatgggagcttgttgaactttcaaaatgaaagaatccgttcgggagtaattggatcttcacaatcaagtacaaagtagatgggagtgttgacatgtacaaagctcggctagttgataagagatttacacagtcctatggaattgactaatgagaaacctttgctccaattgccaaattaaacacaattcatattctgttgttgttagctgttaactaagattaacctcttcattaactggacatcaagaatgtcttcctcaatggtgacttagaagaaaaagtgtacatggaaattccttcaggtcttgagattgaaacaaacattggcatagtttgtagactaaaaaaatctttatatggtctcaagcaatctccgaacttggtttgatcgtttcaccaaagctataaagaggtttggttactccctgtgtcaatctgaccacacactatttgtaaagcacagtactaaaggaagaattgtcattatcactgtttatgtggatgacataatcctaactggagatcatgtagaaaaaataggcaagctcaagagttttctttcccatgagttcaaaattaaagacttgggaaatcttaaatattttcttatgatggaaattgttagatcaaaaatgggtattgtagtctcccaacataagtatatcctagatttgctaaaggaaactaggatgcttggttgtaaacctgcaaacacacttatggactacactactaaactaggaatggtcaaaggaagtgctctagtggataaagggagatatcaaagacttgtggagaaactcgtctatctctctcatacaagactagacattactttttcggtcaacataattagtcaattcatgaacaatccagttaaggaacatatgaaaatggtatatcatattctaagatatctcaaaataactccaagaaagggagtttatttcaaaagaacacagaagagaaatattgaaattttttcaaatgcaaactgggttagctccataattgactgaagatcaacctcaagatactacacctatgtttgggggaatttggttacttggtgaagcaagaaacaatttgttgtagctcggagtaatgcagaagcaggatctagagctattacacatgaaatttgtgaaggaatgtggttaaagagactcttaaacaaactgaaaattctagtagaagattccatgaagatgttctatgacaatcaagctgccataagtatcactaggaacctggttcatcataattggacaaagaatgtggagataaatcgtcattttattaaggagaagatggaagaagggatgatttcattggtttacactccaacaactctctagacaacaagcattcttacaaccaactttgaagacttgagatccaagcttggaatgatcaacatttacaacccagcttaagggggagagtggaaattcggtaagtacaactgtgcatacagttgtaccgcctagctgtactaccaactataccacatacaatggtttcctattctaattttatttcatgattttttgagatactttctcctaaaatcaaatattagatttctttttttaaggaaaatgaccttagtcattcatgtataaatatcgatacaattattaatttaaatagtgtgagaaaaataaaagaagttttttttttccttcttcctcaaatttttttactatgcaaattagggtgaaacaagcactttgctaaaaacttttacaggatagtagtcgtcatgtcatctatgctcctaagagaaacccaatcgagactagctagtttgaagagtctgctccaaagccacaaagtcatagcgcaatgtaagaacagatggtcaatcgatcctcactctccatacacattgtgcaatggtcaagactaagagttttgtacaatcttctcacctatagcaagttattagtattcaccttcttgttggccattagccatgcaaaggccatagtcttggatggggttgtagattttcaaatgaattttgctaaagggaaatgggcaagatttgaaaggttggacaaggttaaaaagaaagattttactgaaaataggccttgatctatctaacatatagcaccacttgtcttaggatttggtgtcatgcaaccacaatggttttctactagcaagagactaggtggttttttttcacctttggatgaatatgccatgtggccccttcatactttctcacatgctcactaaaattctttccaagctgcaaagaggcctattttcaaatagatacctaagttggatattcatgaaatatagatgttgatggaatgtaaatgaccacctgtgacagatgactaataggttctcctacttcacttcttggtggaaccaatgctatttgggcctaaaggaagtgattgcttcatttttttttccagaaaaagcttcatattcttctaagataatgaacatataataatcttctatactctcttgaagttaacctatttaacattacattcttatgctaatagatctttgcaagttgggattagagaccatggagtcctatgtagacttagtaccctttagtgatgagactagcctctccccactaattaatttggaatttttttgagaatcttggtttgattattagagttagacgctcaccaaaccaaaattgacatgcattaaagctcattgggtgcaggacactcatgttactagaagcttccatgttggtaattgacattggagttaactttttacagtatcataggaggctccatttcctacaacagataaaacttgttagagggcatgatatatgttgtgagcccaaatacttaagcttaagcttttaggaaaattggtagttcaacaaaactaaaagacatgctctcctagatcctctggattctttttgagtttttgatacaagaacattacttgactctccaacccactcttgtctaccctcaaatttagacacctcatcatcccacatggctgacctcctccagataaatatactacataaacattgatggtcttggttttcaagcatatgaagatgaagaggaaacaaataggtaaaaaggaactggttatttgcagaacctggattgactattgatctggaaaggactctgggttagttcattcttgttctatgccatttgataatattatgcttaaaataaaatttagttactgatatgaataaggttcaatctggttcaagttgaatcacccaggctgtcttttttactgaaccaaccaggtttccggatcaattcagcaaataggtgtaatccagttagctaaggtaggattactcgttcaaattaaaccaactggttggtctgggttttaaaataatggtgatagttacttgctccaatagtgaaatgcttcctgtctttctacatctgcaagctggcccacttaattggtgcttagcaccatctaaagggattgcatcagccactatcttaatcttgtgtgtgtttactataagtgacaaagtattgtcaaagttttgagtctccatatttcttttctaatttttattttgtaattttttatttcatccagataattttgttaattcagaaactcaaatgcttttgtgacagtctcttcgtgccagaacagagagggccttggttac

SEQ ID NO: 11940 - DNA, 4619 bp, Vitis vinifera
  Intron number 1 from transcript GSVIVT01008321001 (locus G SVIVG01008321001) derived from phytozome v7.0 (chr-ID chr1 7; pos 3275038 to 3279656 reverse strand)
cacttgggcaggtccttagttttcaaaagttgctcattatattgaaagatacttttttttttaatttttaatttttaatttttaatttttattttgaatgattattcaatcgccacattttatgtggggacgacaaaatttgatatgatttattaacatgacataaatctaatacgctttttgggggtttaaattgagcaaaattagtttgggtcaaattttgtgtcaagttatataatctgcttaataaataggtatttttttgggttaacctatataatacaaatttgacttaaattgatcaatttaataatccatttattaacctaattatatttttataccatttaacccatatttgatttattttaaatctgtctttaaataaataggtcaattaggttataaacatgttgagttaaaacattaatcatttagatatatgtaagatctaatttaacctgattattaaataagatgacttaataattaaataagtaataattatttaatatctgaatttatatttttgatacaattattatttgcatggggttatggttgagttatatagtagaatatttagtttatgacacgacacgaacaatccacaaacacaaattgccacgcctcattctatgtatttcactatttatttccttttaattttatttgtgtatttggattgataagaaaggttgtatgatgcaaatcaatgataaaaattaacaaaagaaaaaacatataattaccaaattgtatataaaagaaaaaagtaaggcaacatgaaattacgatttatttatttatttaaaaaataataaaagaaaaattaatatttgaagagaattgaactaacatttataatgattattgaatttctaactacaatttcattcactgtgttgaaaaagattgaatatgaaaccacattttgagcaagaacaaatataaaaaaatgtatgcgaaaaaataaaattggaaaaagaaagaatggaaggtaagaattgtcaaaatgacaagtttgactattttaatttatttttgtttgtttattgatttatttatttttggtttttctatttatttattctattattagtcttaattcgattttatttatgttgttgtagaccccttttgtgggggacccgggagagagtattttttttagttatttgcatttctttttgaaataaggagggggggacccctttttctgctggagggaagccggattggacgggcagcaaaagagcaaggaggccatgctgctgatggaagaagccatgctgctgatgggtgaacagcagagctggtgatggcttgtcaaagaagagagagggggggcttgaactggaaggggaaaagccaaagctgggggagaggaaaacgggtgagaggctggtgagttcttggagcagctgggagattggaggggtttttggggtagaaaagaaaatttggtggaagaaaaataggggaagggagaaaggctgcggcagagaagaaaatgagaggaaagagaattagagttggctggattttggggcgagtctcattgatggggaggtagtttccaggcatgattattaggtctctcattttccattattttcagatctttatttatttttatttttatttatttttatttttttattttttattttcagacattatttgctacttgatgtttttgttggttttttttttttgaatatcattagttgattaatgtttgaaggagccatgttttagcttttgcttaagttcattctgaagtatttaaccgttgttccgagcattgatttgttgattggtatagatatgaagggctatttgattgttttggcttaatccaatttttttgtatacataccctgttttgggttttctttgttttcccccctgcacaagaccaatgcatggattcattcatttattcattctaaacttaatatataagaggcatgttttctggtcatcgtggttttattggccccgccatagttcgcaagttcccacagctcggatttgtaaatctccccctcaaaacccacttgcagaactctatgaacccagttcaaaaggcctctcaaaattgttgaaaatggagagggtttttttttcttttttttttaataagttgtaacctttgcacccggcccactctttcatggccacttttgacatggaaaactcaattaaatgatgggtcccaccactatcatctcattttccattcttcctattatcccatgcagccaccaaacccaatttaattctatttacgcgtgcaacccacatttctattttaatttttttatatatatacatatcaaagttcaattttccaaaattcccacttttaaatttagtcttcaaataattttccaaaattttaatttccaaatttaaaattttttaaaaaaactttcatttttaaataatttttcaaaattcaaatttccgaatttaatttttataaaaatttcattctagagtaattgtccaaaattccgattctcaactaattttttttttaaaaactccaattcctcaatttaattctcaaatttccaattcaaatttaatttccaaaattccaactcttaaatttaattttcacatttcctaaatttaatttttaaaaactccaatttctttcaaatttaatttccaaaatttcattttttttattcaatacccaaaatcaaatttcttataaatttaatatccaaaattttgatgcttaaatttaattttcaaaactccgattttcaagtgatcttcgagactccaatttttcaaataaattttaaaaatccaattttctctcaaatagttttaattccactctggttttcaaacaatcttctgctcctcttgattttaataagcatgaatgtaattttcataattccagattaatggactttgtgggattaattcatgcaaaataaacgggttttggtgggagccccacatatgtgactgatcgatcgattaacagatagatcgattggattatgatacatggttgatttatcctgctctatgacatgctcaaaattattccttaattgtgcactaacctcactttttgatagcgcttcatggatcactgcccaggtacgcatccacatccgctctggtcattttcggtatgcatgtttagattctcacgtgtgcatgatcactttgtgtattcattgatttcctcatcaattgccatgattgcttcattttattagtagagacccaactttagggacttagaggggtgctatggtattttaccgtaccttcccgacaagtaacctgacccccgagcccgatccggtttttcgtagatcaccttttccaaaataaggagtcgcacttagggtttttctttcttattttgtttaccctttaaaaataaaacaaaaataagtggcgactccaagtcatttctttttaaccaattaaatcaatttttcaaatcaaaatcgagctcgcccatcgagtgggaaacgcatgagccgaaatgcggggtccacagttgttcataataattagtatattttttttttgttgaaatttgatacaaatatatgaagggtaaaaaaaatgagatggtgtatagtaatgtgaagttattattatttaaatagtaatgaggtggagccatttttatgaatatgtaactatttataagaggaaaaagattgctttacctcttttcaaattgttgtggtgtaataatcactttttagctttgaagatatgttactctaatgatgatttgtacaacaaattcgtatgaagtgatattaaatatcgtaaaaggtttaatctattttattcaacattaattagtttttaaatgaaatgatcaaaatttaatttaaaatttgatttaacaagagatattagagttataggtcatgggtttaagtcaagtaataattcgactcttaagcctcatgatgaatcatttaaatcatggttcttaaaataaacccttaagatatgattttaaatgctattggaataatccaacacaaatattataaaaaacattacttaatactagttttaaacaatttcaagcaaagcacaaactaacttttatgcgaagatatcataaagcccatgattttagttttagtaattgatgagaataatagccattaattcaaaactttcaatataattaggatattatgttgcattgggtacatagaaaaataaataatagtagaaacaagaataatcatcatgtgtaagtttgacacactgtattatgaaagttttccaagccatgaatagaatagtttgacatggtatgggtggcattatttcttgactatatatatatatatatatatggcttcttcaagcccacaataattaatccacctgtacatatccctcccaaaaaccattcttctctagaaatcgacattcttcatctttccttactccaaacgatgaagaatggaaaagaagaaagcccagcaccctcaagtgccaagatcttcaacaccccaacacccctctttaatctaatgtcctattttcttttctttggcttaggtttagccattggactaatcattagtttctccctc

SEQ ID NO: 11941 - DNA, 18228 bp, Vitis vinifera
  Intron number 8 from transcript GSVIVT01034738001 (locus G SVIVG01034738001) derived from phytozome v7.0 (chr-ID chr1 3; pos 8731775 to 8750002)
gtggaagaggtaacgttgtttttcctgttcttttgaaatgtttgggtttcataatttctttcaatagtctttgatgtctgttccactcgctgtgtttgtttgaagattgctgttgatctgtgtgtaattttaaatgggtgcattgttatgtttgcagcaaataatacctggttttactaagcaagtacaactttgctcctttgttttgacctgccgttgaataagattaatttattagaaatagaattggtgaaagagaactctaatggaagggggatgcatgttttttggctttttacaatttgtcattttgaatttgagttgtttaactgatcactaagtccataagatgtgcctatattacctattctttgtcttactggttcaagattataatcgaaatttgtactcttgcacatgttccatacatgcctttagacgatatcaatggatgacatagaactgtgcaacgtggttcgttttacagtaaactgctctctcttctgcattagagctccattctttattttactggaatgtggtaataaagtcttccttgaattcccttttgagcttgagcatttgggcctttttatgttttaggccaaaagaatctgtgtagatttttccctctttaaattttaattcttttgagtaaactttctaatgctctaagaacttggtctaatcaaaggtatatttttaggtttgagttttagtaggaaatgctttttcttataagcaaggaaatgaattaaagatgtcaagggggacaaccttagtgcatgagcgtggagattctgaccaaaagaaaaaaaagaaaggaaagacagaaaagccaacaacaaccaagatttagctccaaggacaacacatgttgtatatgacctttggtagagaagaaaatctacatactgaaattcttgttggattaaatctttaactttcaatactgaaatctctaacttgtgaaaggtacttatattatacttcctccaaatgaaccaagatgcataaaggggaatggtctgccaaaatttataaaaattaaggtgatgaggatgtctctttaaagtttaatcatgaaatgaagaaaagacgatgtgaagtcaaatttaggagaaattagttcaaatcataacagaatttataaaattaggttaatggttttgtttaagttttattagtcaagagatatagtggtcttagaatcctagtaggttaaatggagtcttaataggtcttgagtttcctaaatcctataaataaggctattgatgtaaaccaagacaaatggtgaattgaattggtctttatgcaactttgcttgtgatgataaaaatccattatccatttcttctaggtgagatccctagaacttatggtgaaattctttggttttatctcttcgtttctatcatttctctctttctctagtttttttttttttaatttcttttttcctccattgctacaacctttgaccacgtttcctctccttacatcctaaaaatgtgaaatcctaccccgcctatttgattgtagacaaccattctaggttgtcatacatcacaaggtccttacaaaaaccattacttgattttgtttccaagaacctttttcctaacaaccattttctcttaacattgccctatatttcttagattgttcgtttgattataggatcacatggagaaggggagttttccttttagattctattgatagatggggagtgacctaaggcttgtattttgatcccccatagacctttctttttggctgttccctttgttctttagatgatcctggttttgtctaatagaatctatattggcctataaaaaatttatatttcatagtaattatttctttttgtccctaaggcttggcttaggtggtaaggattgggttatggaaatgaagggctttgagactgaagaatttctgaactcctttattgatcatgaatcggtacacaccatacacatatatatacacaaatgactgaataagaaacaatcaatctagcttaattctctcctaaaattaggaaactaaatcataaggaaatatcctaaatgatctctccttttttattcctaaattaaagtcctaactttggcattatttcaacactccccctcaagctggagaatatatatcatataatcccagcttgcaagttaagtcttcgaagttaggcctaggtaaagctttggtgaggatgtctgcggtttggtgcttggtaggaacatagtttaatttgaccgtctcactagtcaccttctctgtgataaagtgtctgtcaatctcaacatgcttggtcctgtcatgatgcacggggttctttgctatgcttatagctgcctgattatcacacatcatcagaattggagatgaactcgtttgtcccagttcactaagaaccctttttatccaaatcccttcacagattccctgtgcaagagctctgtactcagcttctgcactacttctggctacaactgattgcttcttactcctccaggtaacaagatttccccagacaaaagaacaatatccggaagtggaccgcctgtcaatgatgtttcctgcccaatccgcatctgagtatacttcagtgtcacggttctctgtctttctgaagaataggcctttccctggtgtcatttttaaatatctaagaatcctgtagactgcttccatgtgttcctcagtggggctgtgcatgaattgacttacagcactcattgcaaagccaatatctggccgagtgtgtgagagataaatcaagcgcccgacaagccgctgatatctccccctgtctaccggtgtactttctttctcgataccaagtttcttctgactatccataggagtatcaattggtttgcatccaagcataccggtctccttaagaagatcgagtatgtattttctttgagagactacgattcctttccttgatctagccacttccataccaaggaaatatttcaaatttccaaggtctttaacttcaaactcttctgacaaatacttcttcaaattctgtaactcccccatatcatttccagatagaataatatcatcgacatagactatcaatatggccaatttcccggcatgagatttcttgacaaatagagtatgatcagcctgaccttgtttgtagcccagcttcaggactgcttttgtgaatctatcaaaccaggctcgaggagattgtttaaggccgtacaatgatttttggagtttgcaaacctgattctttgccatactttcttcgaaaccaggtggtatttccatgtagacttcctcttctaggtccccatttagaaacgcattttttatgtccagttgttgcaagcaccaatcttgattgacagccaatgagagaaggatcctgatagtgttcagttttgcaacaggagcaaaagtctcctgatagtctatcccataggattgtgtaaaccctctagctaccaaacgagccttgaatctttcgactgatccatctgctttgtattttatggtgaaaatccacttgcaccccacaggcctcttcccaaccggcaaatctgtgatagtccacgtcccattcttctcaagtgcatcaatctcatcttgtactgccttcttccattctgaaatttttaatgcctcttgtattgtgttgggaacctgagtatcatcaagagaagtagcaaatgctctgtaagatggtgataacccttcatacgtaacataattcccaattggatgatctgtacatctcctaacacccttcctcaatgcaattggcaaagtagaatcatcaatgctgggaattaacacctctccagccctatcctcacctatgttctcttcaggaagacttgaattggagtcaatatattggccacatgttgactgtgatccgtgctctaattcctgtcttttcctcctcctgatgtaaacttgtaagttctcattagcaagttgtggggctataggttgaataggcatgggagactggatggtcacgggagaaggaacatttgtgtgctgggctggctgaactgatggcggcatgggtgtggacaactcagtgggcgcgaattgggaaggatttggtgactctgagtgaaaagaaggtacaccatcaagaaaagactcccaaacttgatgttcattcatgctctccccctgaacatgagatttgggatagaagaagacatgttcaaagaaagagacgtccatggtggtgtaaaatcttttgttggttggagaatagcatttgtaccctttttgggttggagaataccctagaaaaatgcacttatttgctcgaggagcaaatttgctacgattttgaggatacacatgaacgaatgccgtacaaccaaatactttgagtggtaaatcagaagaggcggcatgggtgtgaggaaactgttttaagaaaagttgacgtggggattgaaaggtaagcactctggatggcatacggttaatcaaataggtagctgtgagaatagcttccccccagaaatagtttggaacattagaggaaaacataaggcaccgggcaacctccaagagatgtctattcttgcgttcggccaccccattttgttgtggggtgtcaacgcaagaacttatgtggataatgccatgattttgaagataagtactgagactactagtaaagtattcctttgcattatctgacttgaggacttgtattttggaattgaattgattttgaaccatacgattgaaggtttgaaaaatgtgcccgacctctgacttttctttcataaggaaaacccatgttacccgagtatgatcatcaacgaatgtcacaaaccatcgagtgccagaaatattttttatccgggagggaccccacacatcactatgtactagagagaaaacagtcgaaggtttgtatgggatttgaggatatactgttcgagtatgctttgcaaactgacaaatttcacagtgataagatgctggatttttattgataaataatttgggaaacaattttgcaaggtaaacaaagctaggatgaccaaggcgatagtgtaacattataatctcactatctttattgaccttagaatttgacacagaattgaaagactctgacatactctgagactgtacgcaacttgcttgagagacttggttggagaattggccacatgaaaggaggtagagcccggaacacagttcagcactgccaatcatcttccccgatttcaagtcctgaaaaacacacaagtttggatagaatttagtaacacattggagatcatgagccaatttgctaatggacaaaagattgcaatccaagtttggaacatggaggacagagtcaagatataagtctttagtaagttttatagaacctgtcccggcaatttttgactttgaaccatcagcaatatggacggatgaatgaccattacttggcttgtaattttgaagaatggcagcatctcctgtcatgtgatcagaagcacctgtgtctactatccacggcctcattcctcctcgattagcagtgaaggctacaccggtagtactgccactgccaacttggcttaataatttctgtagtatctccatctgctctttgttgaatggactcggctcgggaacagaggtgctctcagagttggcagccacgtgtgctctgccatctctgtcaaaccgtggctttggtttccaatcagcaggtttgccatgaagcttccagcaagtctccttataatggcctggtttcttacaataatcacaccaaggcctatcccgtttctgacgatctccaccactactattaaatgaccgagccgcaagggcagaggcatccaatgttggggcaggttgctcttttgatcccatcatcactttctttctactttcttcacgtctaacctctgaaaaagcctccctgagacttggcaggggtttaatgcccatgattcggcctctaacatcatccaattccctgtttagtcctaggaagaacttgaacagtctcttttgttccacaatttgcctgtatgttgctgcatcatccgaacatttccatgagtgagtctcaaataagtcaagttgctgccaataccttgtgagtgtgttgtaatactgagtaactgactgctctccttggcggaagtcatgtagagctgattcaacctgaaacagttctgaagtattttcagaacttgagtaagtttctttggctgcatcccatatgtcctttgcagtcccaaacagcaagaaattttcgcctatgtcattgttcatggaattgataagccatgacatgatcatgctgttttcaatcttccacttcctgaaacccggttctgtagtttctggcatgactgcttctccagtgaggtactcatcctttcctttaccgcaaatgaacagcaacacagattgtgaccactgtaaatagttatggccatttaatttgtgtcctgtgatgagaataggagaggaatcattgccaccaaggtttggaatttcagatctgccccctgattctggtgacgtgacgctggatacttgtgatgatgcctttccgtattttgtcatggaccggaaaggtagaagaacacttttcaaggcacgtgcagggactggagttgagaaaaaatagccgaaggacgccggaaaatctgatcagagggcccgcggaagcaaaagaaccccaaaagaggcacgtgcagggctcggattgcacaaacaggtaggaagggtggctggtcggcgtcaggcgagcctggaggaggaagcgcgttgccggaaagtggctcacgcgccctcacgcgccggcgcgtgagatgcagtcgccggccggaaaaacgcgcgtgggcggcgcgtggatgggtttctggttccgatgctttgggacaaattggagatctcctccaggcgctccttgcggtgtagaaaaaaaccgtcgccggaaagttcgccggaaagtttgccggaaaagttcgccggaaaagttgccggcggtgagtgttttctgacgactattcgactgactggaaagtgttttctcccttggctctgagaacagggactgatggccggaatgagagagagagagagagagatgatcggattgagatatggccagaaagatttggccggaatgagtgatggcctgaataagaggtggccagaagggattagggtttcagaaaactggctctgataccatgaagaatttctgaactcctttattgatcatgaatcggtacacaccatacacatatatatacacaaatgactgaataagaaacaatcaatctagcttaattctctcctaaaattaggaaactaaatcataaggaaatatcctaaatgatctctccttttttattcctaaattaaagtcctaactttggcattatttcaacagagaccaactgcatgtagctcccgcacgcgcacacgcacacgcacacgcacacgtacacgtgtatgtttatttattttttgggaatgaagggttgtaagaccaaaaacatgtagtgcgtgcgcgcacccacgtgtgtgtttatttatagataaaaatatgtttatttatttttatttcttttatctaacaaaacacatataaacattttattttattacaacttgaatataaaaaattcaactttccatcaagaaaatgcaattcatttatataaatagataaatgcgcatggacatgcatttgtatttccttttcaaatgtttgggtctatatagggtttgtatacctagttctattaaatgtcatgagataaaacaacattgagcataagagatttcaaagaaaatgggcggtttaagattaaccccttgcatgagagatttcgatgcctttatcaaagaaagtgagttgatcccccacttagaaatgctttgtttacttagtccaatttacaagaatcccctatctgtaagaggctggatagattcatattttcaaatgattgattgcaaaactttccataaagtctccaagaagcattacctaggttcacttctgaccattgcccaattgtgttggataccaacccattcaaatggggcttagctccttttaggtttgaaaacatgtggttgcttcccccaaactttagggatagtttttgcttatggtggaaagagtttcagggcgaagggtgggaatgccataaattcatgaaatgagtacgatatgtcaaatcaaagttgaaagagtggaacatggatgcttttggagacataaaggagaggaaaaagattattcttagagatatggccaacattgatgtttgtaagcaagaaggtaatttgtctttagagcttctagttctcagggcttgaaagaaaggagatttaaaggatttgttgttgaaggaagaggtttattgaaggcaaaaggctagggtaagataggtaaaagaaggggattgtaattcaaattttttccatagggtgtctgatggaaggagaaacatgaagttcattaaatctctagagaatgaggatgaggctagtttagacaatttggaaagtatttttgaagagatagtgggattttccgaaaaattatatgctagcccccttggagattcatggaggctagaagatctagattggtctcttatttcagaagagggtgcaaattggttggaccatccttttaccaaagaggaagtttgtaaggctatatttcagttagataaggaaaatgccttggggttagatggtttttccatagcaatgtttcaagagtgttgggatgtgataaaagaggatattttaaaggtgtttatggagttccataatagtggggtaattaaccaaagtaccgatgcaacctttatagatctaatgctgaaaaagagttaaaccgtcaaaatatcgtacttctagcctatcaacttggtcactagcttgcataagatcttagctaaagttctttcaggtcgcatccaaagaatccttcatgaaactatccatgttgcccaaggtgcttttgtggaggggagacaaatcctagacatagttctaatagccattgaaatggtggatgagaagagaagattaggggaggaaagtgttggttttcaaaaggcctatgaccatgtggattggggttttttagtccatactcttgatagaaagggttttagtactagatggagatcatggataaggggatgtttatcctcaacaagtttcacagtttttgtgaatggaaatgccaagggatggtttaaagcaaccaaaatcttaaggtaagcagatcctctttttcctttgcttttcaccattgcaatagatgttttaagtagaatactggtaggagtagaggattgtggtattttagaaggctttctagtggggagaagtagaactagggtgtctcatttgcaatttgcagacgacactattttcttttctaatgctagagctgaagagtttcaaaatcttaagatcattttgttgatttttggccacattttaggtcttaagatcaatctagacaataacactctattaggaattcatgagtcaagattaggttgctaggttggcttctatgttagaacgtaaaatttccaattggcctttaacctatttacgtcttccactaggggggaatcctaaggctcgagtcttttgggacttagtcatagacaaaatttcaaagatattggatggatggaaaaaaaccttttttgtctttaggtggaagaataactttaatttagttttgcttatctcacatccctatctatttcctcttgttgtacaagattcttccttagtggcagcaaagattgagaaaatgcatagagatttctttggttagggtttgggtggggggaggtgacggctaagggagatcatctcatcagctggatccaagtgtgcaagcctaaggaaggagagttggggtctgggagcatttctttgagaaataaggcccttttagggaagtggctatggcgacttcctagggaatgcattgctctttggcacaaggttatcttgagcatctatggaatgcattcaaacggttaggacacaaacatttttgttaggtggttgcatcgttgcccttggaacgccatatctcaggttttccttgatttctctaatcatacccgatttttgatgggaaatgggaccataatccatttttgggaagatttgtgaaaggggattcagcctttagctttgcaatttctgggtctttatagagtttcatcagtttgcaattttcgtacttcatctatcattggactctctccccttgtttcttggaatttcaactttcggtgatatctcattgatttagagatagaggataatgaaagactcgtgtccattctcagtagtgttaacctatcaccatcatgcccagatgtgagagctttgtcttcttcatcttcctacttaatttcaataaaatattttttcttagccttatcaaagcaatcaacttcaattcccttctctcctactaatttcatttggaaatcaaaagcccatcaaaggtcaacgtttgcttggttagcggctaacaagaaggttaataccaatgatgtgtttcaagtaagaagatctttcaagtgtttgtttgtttttcagtgtatttttctatagtttagctttctttggcgggaggattcctcatccttcttttgtacttatttttatctatcaataaatctttgtgtcgtttccaataaaaaaaagaaaaaagtaagatctttcaaggcccttagtccagatttttacaccctatgtatgggtagtggagaatcgatagatcacctatttatacactattcgatgattatggagttatgacataagctttttagactgaccaacctgttttgggttcctcctagaagtgtatgtgacatgttgaccatttcttttagtgggttaggggagcacaaataggggcaaagtcctataacaaatcgattgtgttactctgatttgaataatatgacgggaaaaaaatgcaaggatctttgaggacaagtggaggataaccgaaatgttatggaatctagtctatttttgttcatcattttgggcatcgactttcaagggcattcctctcagccttattcaacttgattgggtttcaacatatagttcaaaagtgtcaaaatagtaaagttgagatgttttgatgtcttttggttcttttttattttcctcttttttattttttacttttcttgatttgatttgtatttagagaaggatttctcatccttctcagtttttctatgctaataaaatcatttctgtttttgatagaattttttttttatttatttaaaaaacataacaacattcagcattttcaaaaaatgttttttatttgtgggtaggaaatgaagaaaagttttgaaggatggctccattgtgtttgtttaggaccactggtaggatagaaactgaagggcttttgaaggctaggagcagaagattttaagtgttaaaaggacctttttgtctagactctttttctctggtttagatcttacttgggagtggattgtttgtccaggttaatttctgttctggtagtgtggtcatggttaattttttttattttattcttccctttcagcaccttttgtatactttctgtgtacttggggactgcccattttttacgggtgttttcaataataaatgtttctcatctgcccattaaataattcttctttggagcaaattgtgaattgcattaaagttctggcttcccaatgggcatcagtgagccaggagttctttggggttctgttggttgatacttttagattttggaattagccagcccttccttcggtaatgacttatttccaattattgataaactctccttgttgagggaatcatgaaaagcttttcaacagattctgtaggtcattttgggcatctgagagatgatggtttgagcagagatcagaggatgaaacgttatcatcttttagggactggctgtgttgcagtagtatgcttacctcggagaatcattggcttatgcttgggtattttgatgaagtgattaataaaagtctatggaatatggtctattgttgtagaaagagagtgagacagtgaaatcattgggactgggttagtttgtaagcagttaggcagccttggagtcatctctgggcacttcaattgtaacttctcatggttttgggcgcttcaatctgcaagttttggtcagatttccatatcaaggaagggctaactgcaccttgtcacaggtagcttttattgatgttttctgctctgtttgcttgttcaattattttaataatcagaggaaacttcacaccttcctgtttcctcttgacagatttatttcttaccatacaaaaaaggggtggccactagtgtaatacccaggtttttaaggacacgttagattctaggagcataaagtctttaataaaattgtgggtcaaatggtcaaaaagagtggtgaagatccacgtgttagtatctaattaggagagattttggaaaagttggtcaaaagtcaatagtttgaaaattttgccacgtcagatgtaaggagtgggaatttcagaaataaaattttgatttggagaaaaaaaatttaaccatcaaataattgagattaggttttgaaaatttgaatattaagtatgttacgagaattaatttaattattatcaggtaattataaaaaaaaaaaatcgtagtaagaaaaacttggtaaaaatttatattatatcaaattgttataatcaataattaaaaagaaattgaatttaattttataacgaatcaatttgatttttataattggaattaaactttatagaattacagaacattaaacggagttgaattgaaattaaattaagattaaattatgataagtgaatttagaaaagatatacaaaaggggtaaattaattaaatgtgaattttatgaatttaacttttgaaattttgatgcaattgaataatttgacaaatgaagtaaattaaataaaagttataccaaagggttgagaatttgctttttataaattgaatgattgattaatttatggaattaagttttagaatattacttaaatttttgttggtaaataaatattggtaaaattaacgggttaacggttattacaaatttcaacttcttagttgctgaaaaattattgtgtttttaatatttttatggaattgaattttgttaatagttaattatatcatgttttaagtgaattttagagttaaaaaaaaattgtttcaggtaattatagtcaaattatacttttcgaagagctgagttgtagtaaattaaattatgaatacaatagcatttttcgtgaggtgaaaaatcataagttgggtataattcataattacgaaaggtgaatttaagaataatggttttaatttattaagggacgtgtatggtattttaggatttgttttaatagtattataatatatataaagtgaaattggcgtgggagtttaaaaggagaagaaagaaaaaaggatgtagagggagagttgcaagggagttgtcggtagagagtgggaaaaatgggtcgccaactttgggacgccggtggacctaccaaatgacgtccgtttcacataaaattctggaaggatattctattcaatgcgagaaacactcctatggtgtccgattttagtttcaacagttagattttttagatttaaggtagggtggtttaaccctaaaactttgatttaatattttctttgaaattttttaaatattgtgttgttgaaagataatagatgttatttgtaatatttgaagtgtgattattgttgtgaataattttatttcgtgatttacaaatttttttcttagaattttggtaatgtttgagaagattaaatatgaaaaaaagaaaaaaaaaatagttgtattgactattgagtactacgaattattgatgttgctggagatgagaaaaattaaggtataattgtgttttgttaatatatgaattattattgatgtttgtgtaggaaggacctctcatccttcccttggtttcttctctttcttttgtatcttttatttctcctgtatcttttcttctattaatatatttttctccgtttctgataaaaaaaaatatatatatatgaattattggaaaattttcccggaatgttgtggtggcttaattgtgggaaattgttgtattggttattaaaattattaatatttttagaaatgaataaaatgatgatataaattgggtttttgttaatatttgaattattgaaaatttttccccgaatgttggggtggcttaattgtggaaaattgttgtattgggtgttaatattattgagattattggagaataataaattatgacataaattgcgtttttgttgatatttgtattagggagaattttcttggatatgtgtggttgtttaattgaagaaaaaaaaaatcactatgttggttgttgggaattattaatcatgtcgggaataaatagaatttatgtggctacggtttaaaactatgttttgatactatacaattaattgtgaattttctttgatatttgtggtcattaaagtgaagaaaaatcattgtgtcgattattggaaattatgagacataatgagagtaaatagaattgtcttggaaaattatgggtgttgaaatatgatgtgattgcacttcatatgcatcatgtttgtgtgaagaaaaagaaagattaaagaaatggttgtatgaaatggaaatgagaattaaaaaacccctaaaagggcaaaaattaaaaggaaaaaaaaaatgaaatgaccccagagggggcaaattaagaaggggggtgagatccctacagtgaaagacctaaaagtttacctcgggaagactccaaatgaggagtgtatttgggtatggaagtgtatccttcggtgaaaacccgagaacgacggtgcattgcgtgattgcatgtaagcatttgcatcatggttgcatttggaagaaggatttgtattatttatcaagtatatatttggatatattattcaagtatatatttggatatattattcaagactaaaatgacttgtttattttgtaaatttagaattgttgatatactagacgtatgattgaataaggaaaatgataattttgattgttttaagtttgtatggttggggtttcttttagtgtgtataatgtaaaggtaatattatattttggcatatagttgtgttttattgacttagaatttctaacccatttgggtataacacaccctactgagcaacgtggaaatgctcacccttttattttctaaaatttttagatgcatatatagtttcagagggaccataggaagtttaggaagtaatccagaaagcaaaagaaccataataatagttgtttttaaatttctattaccctttttacatgtaccaatttgagttatatgggccttttgtatgttaaattatattttgttagattgtaaaacatttttggaaatatttttttttgacttagagattattgtgaatatttgagcttttggtcatgaagatgactggtggatttattatacttgtgaacaggagatagtgtgatggttggttttggaaaagtaaaataatatgttataatgaatcttagcttaataaatttatataagattagacgttttgcaaaaaaaaaaaaaaaattcaaggtgttttgattgattgccagcgtggataagagtaacttttagggtcaaacccttgacttggggtcacgattcgagttatgggttgcccaaaatttggggtgtgacaactagttattgatttctagttggtatagagtcttcagatagtagtttctgaattgtatgatacacatttaaatggtgcatgaagatgtataagaaagaaagaaaaaaggtaatgtatttttcatacaggctaaattctctgccatgtggtaggttttttaccttctcttttttaatccttctgaccaatcattctatagttttaaaatccagatttctgtggaagtcctgaaatctctctatgcaattttttttttctttttttaccaaatagtattatccaaatctaagatgaatagtaagaattgatgaagctctgattaagtttaaattagggctgcaacatgggtgggttagtcgggttgatggctaatccaagcccaaaccaaattaagaaacaatcaacctaaactcaacccaacccaacctcatctttctaaatttgggttgaacttgagttggtcgagttaaactcaagttgattggattagactcaggttggtcggttgattaggttgcatgattcaaaatccattcatagttgtttttaattttttttttctgtatatttataccaaaatttaaataaaaaataacacaaaacttcaagataacaataaaaaagtaaaaataatcttatatatcttttaaaaaaatgaaaaagtatatgatataattataatttgatatatattttttttaaatctaaaaagaaaatgcatattatcatataggataatatacattataaaaatattaaatcgggttcgggttaagcttgggttgttcaaaccttggtttgagcccaaccaaattgagcttgggttgagaaaacttaactcaagctcaaccagagtaatgaaaatgttttcccaagcctgtccaaatattgggttaggttcaagttgggtcgggccaaaccgtccaaattacacccctagtttaaattaaaactaatgtgagtgtgagtgtgtgtttatgaattcagggttgcctatgtctttatcttgtatatcgattgttatgaaatatttttttatttttatgcaatatgcatctcttttttacatcaattgatttgtttttcttttaacttttctgtttcctttttgttttgctttttactattgaaagtagatttcttgtcaagtgaactatgctgcttttacattctagtcctttgtttttttggatgagtgatcccaatcccaaatagctagggaaaaccttggatgatcttaatgattggccatgccaaaatgacaattttattatgagaaataaactccataaagctgccacattatgtgaactcttaacatcattaatttttctagttgtgagttaaataatgttgcagagtgtagtttacaattttgtaaaaaaaatattttggaagttgagattggtgtgcacttccaaagggtttaagataagggatgacatttgagctgaatcattcttggtgattagttggctaaaagtgcatgcatatggccatataatatatgctcatcctataagggaatttatgatagatctagggtgttggacatggagtgtagatgggtaatggggtgtctttgaataaggaggcatacattctaaatattaagaggccttcactctagaattttttaggtttctaacccttgtgtcagactattattattattattattctctatatctgcattcaattgcaatttctcctctaaaatcttcaatcatttttaattttgatgcttacttttaatttattattagtgagaattactttgcaatttattgttagtgtgaaacctaatatttcaatctggtaagacagaaggaaatttataatgatagggcaattggtgtgcttgccaagaacgcaagtcctgtgaatgaaacaaatttaattttgactcttcagtggaggtgtactcaattcatgctatatattaatttttcccctaaatttggactttgcattagccaaatgagtatttgattcttttatgtactgcttataaaatcaagatttcctacccttggttttattgtaaagacccagggttgttgaagttctcaactcgcattatctatactgtaatgaagttagatgttatgcatgcatggattaatcattgtgtttattttcttggcatatctggaataatcatgattaaattcctttgtttaagattctttgatacctaaaagaatatagctgacattgatgaattttgtttgctagctaccgatatactcgtgcaatgcatatccatttaagtgacctttagttaacgtgagtgatttgtaaactttgataggaggtggtgggcctata

SEQ ID NO: 11942 - DNA, 4852 bp, Vitis vinifera
  Intron number 1 from transcript GSVIVT01009256001 (locus G SVIVG01009256001) derived from phytozome v7.0 (chr-ID chr1 8; pos 6723771 to 6728622)
caccaggaaacttctgtgtgagggcgtcgcccggcccatggtcctcccaatgattcaatatttgtctaaagtattatctaggccaatgtaatatatgtgagagtttggtaagtaaatttttaatttattattttaagttaattttgaatttaaataatattttaaaattattttagcagatgtacttaatatatttaatttaatggtttaaattaacttgttatatcagttccctaacgccccttaattgtgttctgaaaccaactaatgggttgggctgggtttaagtaatttgagcttggaaaattgaaccgctgtctctagctcacacttcaatggggaaattgggtttggtttaagaacctagacagattaactggaagcccattatgaaacctactgtcactaagggtgtaaagcagagcctttctgcagaggccagtgaaccgggctttgagaattcttgaagctccgagaggcctcaaagcagtgttgggggaggtttcaaatcttgggcccatttttaggcctcagctcctagtaacccacaatttctttcaagatgataggcagatctgaatatattccaaggtaaggcaaatcagtagtctattttctttgggttgagtgaatacaagtagaactccttgcagttacaaagccaaggaagtaattgacaaatccaagtgtccataaagcaaaccgtgtgttcagatcctttatatttggtaaaacccgcttagaataacttccggtgatgagcacgtcatccacatatactagtagcaaaacaacttggtcaccagtttaatgtacatacaatgaggcatcaacttgagttaatcaaacctctctggaagcttgttttaggccatagagggcctcattcagcttacaaacatgggttgatttagtaggatcttcaaatccttctgctcgagccatatacataataacctctcgcaattcacaattcaacaaggcattgtttatatcaattggttgcatatctcaatttgaagtaacagctagcgtgaaaatcactttaatggtagatgatttgaccattagacgaaaagtctccaagtagttaacccttgctgtttactgaaatcccttagccattccttgccttgatatatatatatatatatctttggattgaggcatcagggttgtatttgaatctctacacccatttgtttccaagtaaactcatctcagaggcttgtggtacaagaatccatgtatgattatgtataaaagcttgatacttttcctccatgacagtttcccatttaggaatggccagagcctcagtagcacctaaaggttctgttgtcacaaattctccaatattggtttgtgatttaatggtttaagctgaaaaggctgaaggttttctgataccagctttaggtctctatcatgggatgaatgtttaggggattattaggtggcaagagaggttgatcaatgtgtgagtcaactgaatgaggtgaatcagtcaacagtataggtaataaaaagttaatctgctgagaattgatgctcaaaaaagtaacaactctaagagaactagttgccacattatgttgagaattgatgctcaaatcaggaacaattataggagaactagttactgtattgggtacttgtagatgattcatgtcagatttatcagacacattttggttaggaagaggtaatgggtatggaaggaacaaaccatttagaagtgttatacagagaggatgaatttgaagcaaaatctaaagcaggactagcaacagatttggtacttggaaagccatgttcaaaaggaaattcaaattcattgatgttgttaacagaactaacaatgtgaattcttctatctggatccaaacacctataagctttatgatttagactagtccagaaagagaagcacaaccaaagggttattttacaaaccgataatcaggtttatggccagaaagtttctcaaaaggtgacaaatgttcaagtagagatgttggaagtctatttaccaaataaactgcagttgtaaatgaatcccaccaaaatttgaaaggtagttatggattgagctaggagggaaagaccattttcaatattgtctatgctttctctcaggttttccattttgttgatgggtgtatggacaaggatgtctaaaagtcatacaagtttaattaaagaaagggaatacgaactatatactctcttccccaatcagtgtgcgaggttttgattttttttcttttgtcaaacattctctcaactagagcttgaaactgaaggaaaacatttatggattcagatttggctttcaagggatacatcaaagtgtaattgcctagttggtataatcatccacaaaatgaatataatatctatagcatgaagttgatagcaaaggtgcaggtccctatttgtcagaaaatatagattcaagaggatatttggatttgctagatgtagtaggaaactgtgagtgtttagttaggttgccaattttggatcctaactcgatttttccaatccttctacggactacttggctaatggatatcaatttgttgaatttgtcaagagaccaaggtttgtagttgagtttggaggaggatggatttgaatcaacctttgtatttaaatgttgttttttcttgaaatttttttttaaggagttaggaaggtttaggaagcatttttttactaagtgttcaaaatgctttcttcgaggattgatccagctttaggttggatcaatccaacttacactttttttttatgaaatctcttatattggattaagggtttccttcatttaaaaacctgaaacttgtttcctgtgttgtagagagagacataacaacactcatcccttttgattttcttctcatttcccattttagggtgttttgttgcaaaaaaaatccaactttcctattgtttttcaaaattgttttcaatggattttcttgaggaaaaaatgggttgattcatttcttcattcatctctcaatttctaatcatttggatttgagtaaaaactcattttcttcttatgtggattcaagaagaagtcgagatcgagtttggtgtggactttaagtgtgctccagaggaagatgagaagatgaaagtgaaaagtactagtaaagtggttcaggaagaattggtagacttgatttaggtaaaacctagtattcaatttttattcttcatagtggatgttttcgatcgactgtaggctcgtggttttttttttttttaatctctttaaaggtttttcacgttaaaattttgtgttattatctctttctctcattttgtactctttgatttatttttagtttatgatatgttaaataaaagaaaaatgagttgaaataggtgtaattatccattgaatatcttgaataatttttctattcattttggttaatgatattttgtaggaattagaaatgagctaaaaagagaattattcttatgaattaattttgaggagtgttaaaacatttacatgtgaattgcatttataaattgttgggagagtgttattgcgttcacacttacttataaattggaagagaagtttattgacttctaagattaggtaatttttgttgaaagattttaaaaaattgttcaacaacgcctattcaaccccgccacccaagagtttaacatttgtctaatcacttgaattgaaaagatgcccatttgtgccacaaatcaggtcaactgaatcataagtagaagaggtaatagaataagcattctttttgtaaccaaaagaatcagaattaaaacaactcatatttattttattccagactaacttgactaagttgatatgaacttaaaagcatcaattatcttttatatggaagtgaaatgagtttaaaataatttttaaaaataatttattgttctaaatctagtttttattttattttttcacttttcattttcttctatttttttttttttaacttcttttcctcgtattttcttttaaatcttccaaaagccaaacataacttaagccaatcttgaaaattttgggcaacagagaatattttttaggtataatttttatggtgattgtgccttatatgtgaatgtttagaattaatcacaacaataccaacaggtgctatccaattttgtaggaacaatttttctagcatattccaaaacctcaaaagaactcgaacaattcagtgcatgcccatacatggattctgaaattgaattcaacaaccaactgtcaaatccaacctgtatactgtagactccgcacattgccagtatcgagttttcatcaataatatttgaatcgattagtcaaactggacaggtcttttaattcccggcaacaaatcttcaaggtcatgagctctaactgcaggcaacacttgtgacctttagaaaccataattgttttgatctagtttgattgagatggagcctcttgaggcagcatatctgctgatggaagccattgacgattagtcaagaagctcataccaacagagaaatcaagtgattggattgactatcagtttctggtgatggaagccattaacaattctacacttgatttacaatgtgaaactcatccccttctcaaaagtaactaagataacaagataaggtcctgagatgccactaggccaataggagttgtcttctttgtttccactttgaatatgccctttccattgaaatcgcatattatcatcaattctttgaacaactctctctctctctctctctccctccctccctctctattatagatataaaagaaagttttaatagtaggatctccacc

SEQ ID NO: 11943 - DNA, 3486 bp, Vitis vinifera
  Intron number 3 from transcript GSVIVT01011500001 (locus G SVIVG01011500001) derived from phytozome v7.0 (chr-ID chr1 4; pos 30059247 to 30062732 reverse strand)
ttacgggcagtacgtttcatattaccacagcacatattatattttgtttatctttttggatgaggtttgtcctgaaagttagtgtctttgtttaatggcttatactttatggtataatttaaaattctgctaacagtgttgcctatcagaaaaaaaagttctgctagcagtgttgtcatcatttgagatatagtgagagtgttgaatgaggcactaaatttaatttattgtcttggataaaaactggaagttacctttctcagaatatgttaagccctattcataatttgtcttagcacatttaagaattctattgggagaatttatattatttgttttcttaaaagaaaaaaggaatttgtgttatttggattacaagttatcattaatgatatccacatttgtttcctttacaaagtcaaattagatttcatagaagcataaaggccaaagtaaagaagcttaggatgttcacttcctctcactgccccctattaatgagcagcagtttgatttttaccaccaaggttttaacaagcataggttctgtagttttctattcaaagaatgctatcctagccctacactatgggtggattggcaatcaaactttctgtaggtgaacatgatcaattgaggatgggttagtgtgattcatctgcttatttcagttaaacttgatcaagtgaggcagggtctgcctatcatatccacttatttcaattagatacgctcttttcctctcaccctctctttccaaacaaacctaagagtactaagaggagccactttcctctttttcatgataaaagagtgcatataaaaatgctcatctcacattgctgtggattgtgtggtgagagagatgctaagacctttgaggataagtggaggacttcagagatgtcatgggatctacttcacttctatacctccttttgggcctcttgtaccaacgcttttaatagcattcctctcaatgtcattcagctcaaatgatatttggtgtgtagattaaaagggattggtcaaaaaggagaggagcttagtttggatttgagtagatgacatccatgtacagttttatgtggtctattccattttgtattgttctcttggtatagtggaggagttcagttatactttgataaatttttggatttgtgggaatgatttctcatcctttcataagatttttattcataattaatacatcttttatttctgataaaaaaaaaagagtgcatatagaaaggtacaaacagtggacagccctatttgaaaaagaaaaaataaataaaaaaggaaaataagaacgaagatgaaggagaataaatcacaggcatcactccatttattattatcatgtggcttccactgctccccctcttgaatccaccaaccacaaaagattttcttaatggtctgattccctacaaagaaaatgagtatgtgtgtattgcttcataatgcaagtttgaatccattcctggttgcatgtaactggtatgcattatgcttttgaaggattcagtgcctaggcaaagtgttatatatatatatataaacagttgcaaagataataaagctgtaattcctttttatcttcgaacttgtttgttctgaaatgtttcttaaaacataagattcattttaaaagataagattcatgaaacatcatggactattactcctccagtgtatcttgctgttttggacaaagtggcacatcttcagtttcacactgttttagcatttcatgagctatgccaaaattcctttattttgacaatactttcttggaacttggatgaccagttttgtgtggtcccgcagcacttacagttccctggttatataggttccactttatattggagagttatagacaatacttcttagctattccttgtaaattgggtaccaattgctaattctatctaggatcaaagcttttagtttaaagactctcaagaaggaattctataagatctatactaaggctgtacttcaaatggcatgctttctcttgcatttgcactggaccattaattgggttcttagtttgtagtctgttgtgcttttgcttcagtgatacgtgattcctctttttatcctccttattgtgcatggtcattaccaaggactaccaataaggaattccataagatctatacaaagtcaaaacttcaagtgacattttaattcgtttctaagtttgtagttgattttagtaattggattgaaatgtggatggctgtttatttcagtaatctggatgagcttggggttatagcgttagtgatggcctggtgggtgcttaactgtttctagtctctaggtcagagcaggggcaattggccaaattttcagaagctgaagtcaagggctccactctggtcattttgaggagtggtttagctaaagctataaagtggggaaatatctcttctattggctggtggagataccattatgtaattggagtgattcttggttaatcttcctccatgagcttggatatttagctagaaagggtgccttgatctttgggtgtttttcaagtatgtcgttttgtggtttgttctcatcatttttttttaacaaagtgattggttctcatcttcctcatgtagcacttttctttttgtttttactgtttgtgtgttgtgccatttctttctttctcatataaaccaccttgttttatccttttgtccacatttttcaaatttctaataaatgaatcttctgctcttaagaaatatgcatagatatattccatatgaaacctagtagtatcagtacacttctcaccattagtgactggcatgtcaatcaacatgacacttgtttggatggccactaaagccacctttatttactcgaaattgtgcataagaacaactctattttgcgcttctagttatggtgcttgttatgtagttattacttgctttattattctatactctgaaacttttattaactcactgaaaacagataatagaacattatcaaaaaagaaaaagaaaatatacatgttctatatagtaagtactttataaagtacttctatatcccaaaggtctaaccattttttacctatcaaaaaaaaaaaaaaaaatagtaagtactttatctcacacatatgggcatgcccccagatgtcttgtttttgacttgaataagttattatgtctaatgctttgtgttcatattaaaaacatgacacgtgtatctgtctgcatagattttagcatgcaatcagattgttgtgtccttgggtgctacaatgatgcaatcatattagtgatagtgctggatattcagtcacattttgatgattttctttttatccctccaggaaggaggaaagttatataccagagattttttttaaccatttcctaaaagatcttagagcctaacccaactctggttttaattaatatgtttgtttctctctctctctctctggctcag

SEQ ID NO: 11944 - DNA, 9297 bp, Vitis vinifera
  Intron number 3 from transcript GSVIVT01021561001 (locus G SVIVG01021561001) derived from phytozome v7.0 (chr-ID chr1 0; pos 7081769 to 7091065)
ttatagagtttttaaagagctgctagagtactaaagtaattccctcctctctctctctctctctgcctcactcttcatgcatgtactcttcttgttgtaatgcattcggaattatttcatcctacctaaattaataaagtgacaactactcacagctggaacgttcttcttagcttcttgaagtttaatttatttgttttatttacaaaattagatagatgtttgagatgtttcctttctgtccatctcttatggaagatacctttatattttttggttttgaagcaatcttgcacttaaaaccgtggcatcttctagtgtaatttctgatgatatataatctaagaatgggagcatatacgtcaaaactgagcttgtgtaggcctacaatgaaactcaaccagattaccaccgtgacccatttatatccgtatatattgttgattcaccaaacaatggcctaaacttttggttctataaatcgcttaatacaatgatgctaaactcaaccatatatatcaagagaaattattatattatagaaattgcattcatgaaatgaatagtactccatgaatgggaagatggtaactgtgtgaagatgttgagaaattgctggaaatctggttgtggagcttctagtctctcaagaattgggaatccacacatggaaattaattttttccctttcgtgattctccacccctcctttgtagtgccaatacttctttttcatgtatttttgcttttcacaatgataacatttaactttcttcttaccttggcattttgacctcttttggttgtgacacccactagaaccacattctcttggtcttcctttagatataattagagcttgaatatgttgagaaaatgatattttgtcttccttggtttttgcccttactttcttcctcaagcgtagtatccacaacattattaaatattaacatcgtctttaaagcaccattagccacatttatgatgagataattatatgaatggggtagactttggagcaaaagttcaacatgtccttcccttttatgttatgttctatagactcttcatgtttgatgtgcttagtcatcaaagttgattttgacatccaaaggatatagagtgttctttttaagaagatttttttatacaatgacttgacttcatatagttttgccaaagtatcgccgactatattattaactacctctaaatgcaagcttgaaatgacatccctattcattttttgtcttttaacattttctagtctttcaccggttacttctaagcaatcttattttctgatctttcactaattacttctaagcaattttcttccctcgagatgactttcattttcattttccacaactcaaaatttttttatatgctcaagtaagcgatgcttgaagcgaagtgtcatcctttccacaaggctcatggattaaatgtgttcgagtatatgtccaaggatccaaggtcgagccgaaagttcaacgagggtatgacaagtagctccaaaattgtattggacatggtgttgaaggcatataggtgtggttttgaggagatgaaagaggttatgaacgtagggggcgacattggaacttcaattgagaagttggtttctgtttatccacacattcgtggaatataaacttcgatttgccacatgttgtcgatgcacctcaccaaccatgttgctggagatatgtttgagtcattaccaaatgtagaaacaattttattgaaggttacaccattgaaatgattctaacacagtctagtctttttaaaatttaaaaattattattttaaataaatttttttgtttctttaactttaatttttttaaagcttagttaaattaatatataattttaattataatataaaaataaatttaaatttaaaatttacacttttttataattttatttaatgttttaattatagaatatttttaatctttataatgacatatagatacaaattttctcagttagttatttaattttcttaattatatgatatttatgaataaaaatattattctgcaattttctttataatttttaaatttataaaatgaataaatttgtaagtgttacacatattataaatgacttggatcataaacatatcattttgatacgattaatttaatatatcattttaacacaaacaaatagataggataaacaaatcaaacaatcaagtccaaatacaatcgacttattaaaagaatgatatggattaatataattacgaaatggataccattataatcatgcccttattaataacaacttgttaatacttattaatgttattagttaactattgtaattataatataataacccatgttgcatctggcgtgggattatccaactttgactaaaataatccacaaacaatgttagtcggttgtgatcttagttcaaatgagacaacttttaaaacatatataaaatttctcaattacaaaagatgtaggctttagcataatggctagccacgacactttttgggggacaaacattaggcctgaggtttgattccctttgggtcatgtctggattggcatggtgtacattgggtcaaggtctaaatttcattcttcttttttagatgttttcatgcaatatacccaaaaacccaatatttactttttcttttgccttttttttcctttttatttttatttttattttaaattttttaaatttttaaatttttaattttttggtttttttcttcgtcaaaatgcaatggcttttaatataagtctctctattttgcctttggagatttccgcacaaattcaaatgtgatgcaagtagttgaattgcaatattcttacccataaaatcatggtcaagagaattcaaatctagttatgtaaacatttgtgggccagtctgggcaggagtgggctcactctaggatagtaatttttgggttgggccagagtaggcccagttcgacttcacttagacttgaaatgtgcaattggttaggccgaagttaagaaaaaattttaagatgatttaaagcacttttgataaatcaacttattaatgtaatatgtgttccaataacatatatatgatatgatttatgtaatataaaaaactcaaatcatttggtttaactcaaattgacactaagaccctaattaggaatttgacatatattttaagcttaatttaaggtttaagggaggaaaatgatacaagttggaaaaataattctcaatcaaaatagactaagggatcaattatgcctaaatagagattcagcactagtgagacatgagaaggatccatgcaaggggaaaacaaagaatttatgaatattaaatatgataacttaatgttatggatggaggtagaggaaaagcaaccatgagaaaggaggttggaagtaaatgtaatcaagcttaaaatggaatttggagcttaaaattggcaataacacatatcttaattttaacatgatttttgaagcactttccatgatctttttggggcaaaccatatatagttttgaagttcaaaaagtcaaaagtccaatgttttaaatagtgtgtaaattggagctaaaatgaagaagttatgatcatttgaaaataactaggtagagtagaaggatcattttgaaataattttgaaaattcaacttatgattttgaaattcattttgaaattaccccgatttcaaaatcacacactgccacttctagatttcacctcttcgagcttgataattgtgtcttgggcactccatcaaccttaagtgagccccacatgattgaaaatcaagattctagcctttttttttttttttttagttatcttttggtaattattttaggaaataagtggtcaattggtgcatgtcacgtgtgtttttgtttttttaagaggagaattctctacgattcttaggggaaaggaagatcttgaaggtttttcttggtttgttttctttctctttgtattagtgaataaattattgtttttaattttttgaaattaagaatagttctttcttgttcttttatgacctatgtatgtaagaacacatccataaaaggttaaaaagttatcttagggtgaaacatgaaaacctagtgttagatagaaagggatataatgagttaaatcatattaataatgaaatgaatgaaaggttaagacgctaatattaagatcaaaatgccctctaaagttagtttgacttgggagatgacacaattgcacattctttgatattgtggattcttggtaattctttatcttagtcatatgaggtttggtcattgttatctaccccaaagcaaacccatgaagagtggtgaaaacctaaaaatattatacctaaacttatatttcatcttcattcgtctattaggtaatttaaaatggaataaaatattaaaagttaagacatagttcaaactttgagatatgaaacttaggttgatctcgttagaacatatattttgattaccctaatactaattaaattatatacccttgtttcgtctaaaagtttataccctaagttagattatggaaccctaatattgattaattgaattgaaaatcaataatcatttttcaatttaaataggtttattttaggaaatctttatttatattttattttgatttatttacattagttttttttaacctttagcaaataattaatctttctaatctaaaaataattgaaccattagaatggatcctagaggacgacaacccaaaatatcacaaagtcgtggtaactgaccctatctctagtttttcttggtcagggttatcatatattttagtattttaattacattaaaaatttgcagttactctactacttgttaataagttttatcttatctctttctaaagcactctaactccttcacttcaatagggttttcttatgaaaacaaaattctaaaagataatagagagaaaagagagacacaaacacaatgatatattgtggaagatatatatatatatatatataactacatgtcaatcacaaatgcaacatccacaataaataaataaaaaataaaaattgagtacaacattttacctaacccaagaccttcaatctctctctctctctcatattgcttatctagtattttagaaaactcaacatctaactatcttcatataaaacctatgtagaatcacctccaaacactatttttatctcttcctgatactcacatgagaagatatttaagttttatcctacaatatgatgaaagagtgtagagatggagagcaacaattaaacaacccattttaaaggaaaatttttcattagaaagagattttttagcttaaagacccacaaactttccctagtaacaaacacctcccaaattttggcaaagaatttgaagcttaaggagccaatcaactctcatatttatgaatccctaatttgaaaatgagttaaattagtaggaacttagacctaatccaatagctcaattgatttagaaagaaatgaaattttatatgttgtgatcaaatttggttgatcgcatataaatactaaaacattttggattataattgttctatcaccctttagtgggatttttagaacttaaatcaattgatttaaaacaaagtcttttataccttttaataaagcataacaatttgaaacttggtcaatcaatttttgaatccatccatcacctcaaatcactcaccattttctctatcttcaatcataactatttttaaaatgataagagtctaaaccatcaaagctaagggtgcacgatggaaattttatcccaaaattgcctatgtataaaggtactcacaatctctcccttggaaattctaagataaaccctttacaaccttatatatataccctacatactctcatacaaggtacacacactcactcaatctcataacttcgttagatactacaatatatgcaaccaaaacttaataaagagtaagtagcacttgtatactaatgataaaataataagagcaatcaacttgtagaaatttctcctctttttaatcttagaaagagacaaagggaaatatgaaaatcttttcaaagacaaataaattcataatagacacaaatagtgaacctaaaaacaaactcaaatagagcaccatacaactatatatatataaggaaattaagcaagaagctatgaagtagagctctataaaaataaccttctagaaatatgaaaaaactaaaattaagcaatagatttttgttatctcatgggttctcctaattactttatgatgataacaaaataatattaaatatactaacatgtataatcatgtgaagattttaggtttaatcattaaatttaaaacaaagctcaagtatgctaattatagatttaaatagtttgaagaaatggatttttttaagactcaaaatatctaggaacttatggaagatgaatcttacgggtgtactaattaggataaaatattttttttatgcacttttaaatggttttcattcataaatatgtgctttacttcaaaaccttaggcttagttgtttaaaaattgacttataaaggtttttaaatgaaatattcaagtaacggaagaacaaaacttgaaaccaaagttttctaggctattttttgtgcaactagtcaagcccactagggaattggttcaaccaattatgctattttttttaaacttgggttgaggtttaaggatggtatggagtattgccttgtcccaccttatatatgatattaaataaaaaattatttaatttattttattttcacatttttaagcatatataaaataaaaaattacatttcataacaataaagtataaaaatgtgatatttatttataaactacgtttgttttaaatataatttaataaataaatggaactaattttctatattatgtgagttttatatatatatatatatatatatatatatatatatatatatatatatttatgataatgagaataaatataaataaatgaataatattgagataggtgatctcacccaaagtggtcctattatcatctttattctaaggtacgtaaatggttaacactaatctaatttcccaaaacataaaatccaattctaatttttcaatgcaaattttaatttttatcaaaaacactttatcataatacatcgaatcaccaaaaatataagaaagaaaaaaaaaatgttaaaagggtattaaaagtgattcctcattttactttttatttacacttttttttttacctttttttaatgtaatggaatgtagattttaaaatgtataaatttcatttttggtagttatcatatttaatttttcttttgtatatgttcatccaattaaatggatctaaataaaatcgtatttctgttttatttaaatcatcaaataatgtttttaataattaatttatcaaatattttgcaacaaaggctccatgattattaaataataagttgaaaatccatccctgtcacctttgtgggatagggatggatgtctgggatatttgtcaataattttttttactttttaataaaataataatttaaaaaatataaaaatcattttatttaaaatacaagtcacaattatttcaaattattttaaaaaaacataatagttttggctttaaatcatttctggtagatattgtctaaaggcaaagggcataacttggtgccatgtggcccgtggctttatacagttgtaatatgagcaagttgcgcaaggaaactttggagaggacaaagtgaaaggtggcgatggggccacgtcatcactacagaccaaactgatagtttgattaaagacagtgggtcccagcgtttcagccctctctctatctccaactatcagtctcctcattgaccacttgtcggcatcaggatagcacatgtggcagcttgtttcaaaagagtgtctgaaacttatgggtcccacaagttctaagccgttgatctcgctgctggtctgtcggcagagctggtagagcgacgcgtgtccccaccctaaaagcagattttggcttcttttccagccacggatcagacacgaagagttctgtgggaaggtgagccacgcggtggagttaggtggatttatgtactcgcgagatttagcaatacgcgacaccgaagtttggccgtgtgtaacgcgtgtacaactggttgggcgagtattatgatgtgatctagtgaggatgtaccttgcaggtgaggggaatgcggaaaaaaatcaagtgtaggtcaggcccaggtcagaatcacagccgcttaacgtgatggagcctttgcggataaggtaccttccttttcagaatgacgaaactaccctgcattaagtttaacggtcggttctcggacttgcgtggcaaaaataataaatatatatttttgaaattcttttataaatctaaatatctactcaaaatttcgttcaaataggaattctctgccacgtaagagtttggaataagagattaaaaggtacaaaaatacgtgaaattacaaatttaacctctcatggatttttatttaaaaaacctcattttaaataaaaatactcttaatttttttaataaaaataatattttcttttaaaatacatatctaaatattataaatatttaaagatatttatataaaaaaatgagttatttttcaagtgccaaaataggaaatgttaagatttttttcttcattttaattatttaatcttcttaaaatcataattaatgactataattttaattttttaaaaaaatattatagatgtatatatatacatgtaaaaaaaaaaccaaatacaacaatgttgatataataagaaaatattaatttgatgaatatttaaaaaaaaaatctaggtttaaattttattctattttatttttaaaaaatattaatttcatgtcaaactctttgtcttaaatggtggtgtaagaaattttgagaaaagaaaatagaataataggaaacaaggtatgtaatttgactagggtctaattaatcgtgatctttattacattaattcaatttaactgtaaaaatagattgaaattaattaaatttgatgtaggttaaatataatataaataaaataaaataaaaaacccaacaactttagcttaaagaaaattaaaagacttttaaagacatacattaatgaatcatgatgccagatccgagaacggaaaaaaacatctataaattaa

SEQ ID NO: 11945 - DNA, 6755 bp, Vitis vinifera
  Intron number 7 from transcript GSVIVT01004722001 (locus G SVIVG01004722001) derived from phytozome v7.0 (chr-ID chrU n; pos 15514848 to 15521602 reverse strand)
aagaacttgacgctgggccaattattggacaagtgagtattgttctgtttgcttctgtaatctcacctgtatttaatccttggctacctattttggaaatctaactcaactgtatttaatctttggctacctgttttggagttctaacaagttaggttcagcatactcaatagtgattattctcttgttcattgatagctgaagtttacttccatatgttgttgaccactactgaaaatgtaagatactagactttggaataaaaagcatagaatcaaggtagggtgaatgagtgagaagatggaacaacaattccttctgtttcatggtgcctttggaacctgcgggaaaatgtgataattcttattattcaaaagagaataattggtataacctttatatatggaataaatgggctaacttaggaaactttgactattctattaatctccgtgaatccctatcaatccatatatatcagggattattatattttgaataggaaagtactctattttgaatttacagttttatacagatttcctaaggttaagaaaatcttagattttccaacactctctctcaagttggttaataaatatcacccattcccagcttgcttctgattgcctgaaacgggggattgagtaatctcttagttaagatatttgcaaattgtccatttgttgaaacatatggtgtgcatatcggtccaccatccaacttttcttttatgaagtgtatatccacttctacatgtttggtttgataatttggacccgagttatgagcaatgttgataacaaacttgttatcacaatagagttcattggtccttgccacttgattatgagatctttacgaatgatttttagccataaaaattcacaaaattccatgtgtgatggctttgaattcagttttggcacttgatcttgccatgactgttttcttcttgtttctccaagtcactatgtttcctcccagcaaagtgtagtaacttggggtcgaccgtttgtccataggagatccccccaatctacatctgtaaaagcttctaaacctagctctgaattcgtttttaacattattccattccctggggtagattcaagatagtgcaggattctgtaaactgtttaaagatgtgtttgaattgggcataaactgagttactacactatggtataggcaatatttggccatgcatgtgatagataaatcagttttccaactaacctctggtaccttcctcgatttattgttgcatccttatccatttgactaagcttatggtttggctcaataggtgtatcaaccagtttacatctcaatattcctgtctctttgagaagatcaaccacatacttgtgttttaatacaaaaattcccgcttttgaatgcgccacttcgatttctaagaagtacttgagtttcccaagttcctttatctcaaattccttagctagttgtttttaaagcaagtcttgcttttctagattattgcttgtcacaattatgtcatcgacacacaccattaagattgtaactccccttatggtcaagtgttttttgaatagggtatgacctccttgactttgcttatacctatctctaatatgaccttagtaaatcttccaaaccatgctctaggagattgtttttgcccatacaatgtcttttttaacctacacaatttattcttatcaaaatctgatggagccttcatgtatacctcttcttctaagttatggtgcaaacatgtgttcttaacatcaaattggtacaaacactaatcaagtttggttgccaaagacagcaaaacacacatagtattcatttttgccatggggccaaaggtttgttgataatccactccataagtttgaatatacttacctaccaactctgcatgatatctctctgaggatccatcaactttatatttaactatagagatccatttacactgactggtctttttcctctttgaagatcaacaacttcccatgtttgttttttatttagtgcctttatctcctcactcatggcctttttctagttcttatctctaagtgcctcatgtagggtttggggaatgttaagggagttcaacttagtaagaaaattactgtgtgttggggataatttttccaaggagatgaagtgatatataggatagtgagtgcacttcttggttccttttctaatggcaatgggtaggtctaggtcattaacaacaagagaagaagaaagaagaaggtcagtgcctagtgttggcctagattcttagaccatcatagtttcaagaatgggtacttttctcctggagtaaacttgaagtggctaggcagtaatgggaccagactcatccagaatcacaactgtaggaacaacaattgaagactcggattcattggaaacacagttggaatttctaaggcagttgctagaataatgatagtggcttcatgctctggtgtagaagaacttattggaaagtcaagtaggaacaagtccttatcttccatagatattgatggctccacctaaaggtaaggatcctgaaataaagattgtttttcaacagcaatgatatccatgggatacaaagaacttccttgaaggtggatgataagacttgtaacctttttttgtagcaaagtaacccataaagacacactttaaagcccttggcaagacttcttgttaaggtggtagtcgagggaggagaggacaaggtgtgttagttggagacaaagagtggaaccttctttgttaggtccctttactctagcctgaatgtggggagattagagccgttcctaataggtattgtgtggaatgcttgggtttcacctcaggtgagcttttttgcttgggaggtgacttagggaaaaactttctcttgatcagttacagtagagaggttggcctctggtcaatagatgtttctcgtgtcacactcacgaggagtcaattgaccacattcttttgcattgtagcaaggcgagggtgttgtagcaacttttgttctatctttttggtatttcatgggtgatgtatcctctgttagagagccttgttaggttgatatagcccttttgtagggaagaagcagaaaaaggtttggtgagctgctattttatgcctttttttggataatttggaaggagtgacatagaagatcatttgagaatgtgaagctctctgatcataaactgaaagtcttgttctgtgtagcttgttttcttcgtctaagctgtttataggataaagatagcccttatttgattttattgattggatgggtgtggtttaagggagggagtattttttgtttttccatccctttttttggcgctttttagcggttgttatatacatcgtgtgtactttggtgcacccctttttctagcacttttcattactattgctttgtatctatcagaaaaagaaatatacaaatgataagcatccaaagatcttaggaggaagcttgcaaaaaacattgaaataagggaaaaattcatagaacactttgataggactcttgaatcgtaaaatttcagaaggtatctgatttattaagaaagttgttgtcaacgcaatttcaccctaatatgatttgggaacatttttttttgaatgaggagctaagttaacttctagcaaatgcctgcttttaagttccaataccccattttgttgtggggtatccacacaagatggttggtgaatgataccttcttttcggagatttgaaaaggtgacaagatctgattgaaataatccttgtattgttagatctgacatagggaaaacattggtcacttatgatttttgttttaaaagaaaaatccagattactctagttcaatcatcaatgaatgagacaaaccatttcacactcggaatattaggaaccttatatggaccccaaatatgtgaatgaactaatgcaaatggagtagatgatcatgtattatttaaaaaaatgaaactcgatgttttgcaaacttgcaaacatcacaatttgttaactattaacatcaacatttttaaacaaccaagggaaccatgttttgaagtaaattaaaaggtggatgtccaagacgaaaataatgaagccaaatttcatctttatttcatgtgaaattttttgatagataagaaagtagaaattggtcacaattgctacttcttgttcaagaaaatagagcctttccttctccttagcatgtcaagtcatcctcatcataatttgattttgaaatatatgataaatagggaagaaagttacattacagtttaagttcttggtaatttgatgaatagacaaaagattgatggatggtttaagaacatgtaaaacattctttaatgaaagagagggagtaaagagtgattgccccttgaacaacaacagttgctagagaatcatcaacagctttaatcttcttatttccaggacatggattatatgtaacaaattggtgtgaggggtgagtcatgtaattagtcacccttgattcgatgacccaagaactagagaatgacgtgtttgaggcactaagagcataaggtataggacacttacctgcctggccaacaagcatgatcatgctgctatcttaagagtgataaggaggtttctcagtctttcaatcccctctttgttaagttcccagatttttgtaccattgagacttggtttctcatgagagtgatcttccacatttgttaggcttgcttgactttgtttttatccactcttgaagccaccattctgaccaatatcttgtggtttccaagaagtctcttttgtatgatgcagtttttgcaataagtgcaccacactccacggttagatggcctagaaaatttattcttcccaccttctgtgttactgttttgtccctcactattaagtttgaatctcccatcatctggctttgtggaaattagaacagagccatccatagaccaagagtcaagcatgacaatttttcaaccttcttctgctcgaattattaagaaaacatctttcaaagaaggtaaagactcctttcccataacttgcactcagacttgatcaaactccacattgaatctttcaagaaattaaaaaatccttcgctttctacaaattttcgtaacatcatagcatactcactacactttattttaaaattttgataatagtctaattgaagccataatcctttcataatattttaatactcaataactgagagtgcactttatttggtggctgatattttagtcttaacttcataaatctgggttgcgtattgcacattggactaggtttattgaactgtctctcaaatctctttcgcagttgtaagaaacatgcaaattccactaatttcatgttgcatagaattccaaagtgggacataatcattgaatcttcctcatcccatacaataaacttcagatcatctaggtttggtccagtccaatcaaatgaattagcttcccctttcctttttgaaatgtcttcactagttgtgactattgcaggtagttcctaccattcaatacatgacttaaagattttggagttctgtggattggttctggtgagttttagtggttggagtagggagaggtagagaaggttggctattaaggccatatgatttttctaaggaatttcagcaatgaaggctgtagaattatcagagtaagttcccagtgtgctccgataccatgtgggaaaatatgatcattcttattattcaaagaaaataattgatacaacctttatatccttaggaactttgacaattctatcaatccctttcaatccccataaatcagggatcattctattttgaataggaaactacagtcttttgaatttatagtcgcacacagatttcctaagattcagaaaatcttacattttctaacagaacccatgatagttctattcatacaagttatcctttcgaatggtcattacgtgcagctcattttagcatagcactgtaaagttgtgacatttcatggcaagtttgtcctgtgtagaacagttggttgtggccaaagataatgtatgagctttactggggctcaaaggtgaatgcttgatcaaggaacagaaacatattgagaaatgttgagagagcaggatcaaggagaatggtttaacataaacatttgattttggaaaattgctaacaatgccatgcatttttttaaattttggaaaatatataagatttgtgaagccaatttctattgactgaaaaaaataaaaaaagaaatgtaaacctgatttttggtgtgacaattgttatagctcataatttttcctgttctgaaatattttaagtgctttaatctgaatggaggatcctatctggacagaccatgatatattcttctgtattgtgcggtacaaagtaatattattgtggaaatataacaaaataggatagagctctaaagtggttgttcttatcttaaactgctgatttaaggcttccgttaccgctatttcaagcttacattgagaggagtttgatcagacatgcttacatgttacattatttgatttttaatgttttctgtacgtgcaaaacagttttctaagatttatcatttcaacgtgtaccaataaaaatagtagggtggtgctcccctctatgaatgatacattaaaacatgtttagttccattttgcaggttgagagagtttgccatagagataacttgaagag

SEQ ID NO: 11946 - DNA, 2001 bp, Vitis vinifera
  Intron number 2 from transcript GSVIVT01020501001 (locus G SVIVG01020501001) derived from phytozome v7.0 (chr-ID chr1 9; pos 18335814 to 18337814 reverse strand)
cccttcttccgatattttaaggtatgtggcaattaatgttggctcaaagttgatgaatcattgaacaatctaaaaatttgtctatgatttcttgtttttggatggagaatctattgatggttgcttatttgaaatgctgtccgattaccattttgtaagttatatataagtggttgaggtagcttacttttgtgttatatatagaatgcactgcaagttgaattggaaattggggttttcttggagattttttgtgactggtatcttgtgacatactttgtgaaaagaagggtttggatccctagggataagtgtaccactattttgtctctctgtgtttgtgttttaccactaaacctcattgcttaaggggaagtggctgatgattattgttcataggcaggaggattcttgtgttcatgcattgagaaaaatgaaagtagcaaagctatgatggattgcaatccctccctaacattaaaaatgagcaatggaccatttgaagagaaaatcttagaacatcaaatcttgggtcctctgcaaagattaggaaaattctttacaattagaccattctgttgcttgttggaaatagattgacttagctgagatgacctgtgaagtgcatttagttcttgcccccccattgagatgaaatttagttaatgggtaaaagatacataaaagatcattaggaagaatttcctatctaaagaaaggcatgaggtcaaagcggcaaatacaaagccttactatcaggtaaagacagaacacagaagagaaattatagattcaccaaactaagaatgaggaacctttgttggaaacctagtttcaacacttctcttttggcagtggaggcttctgatcttatttatatataagatgaagacagcatgcactggacacaaagttttggcatacctccaatgaacatagatactttgcaacttctcttattggttctggcagagtctatgaaatcctgaacatggtttcttaaggccaatagtaactgcctggagcttttcttgtgatcctcagcattgatgtttatgttcacagaataatcccacattttgtagtgaactatcatttttctgtattttttgggatttgggaatgggaatgggaagtgtggaattcaattagagatggcaataatccagctctttaacaattagaaataagagtaggattttcttcatctgttcaatgaagacctacaacaattgctttataaaccttatgttttgaacaatgctaacaaacttttcttgaatgaacttctattggttcttcccaaataagccctttggttgtgtgtacacaaatcctgtgaaactaaatagaagagatcctttttgcataatttgatacagtgtccactacatgaactcttctttggctttagtgagtttgagataagtcattacaaattggtatggttaacaattttgtacattattgtttctttccttgtcatctctctctctctctctatggataggcttacactttcatagttaaaaatgggcctaaggattctcttttctctgacacaccctctactcttcaattgaacatctcaccaaggtggaatatcggttccttttagatgagcactctggttcctgctattgttgctgaggattaggaattctttgtgtcttaaatcataatgaccaattaatagtgattgaaagcaaaaaaataaaaataaaaataaaaaaaagtctcaggacagtaaaaaactggcaattacttcatttatgtatcttcaaatccttgttaattttgcatcagagacaactttaggaagagaactaatcaaggatttctatccacattcacaaagaaaaagcaaaattcaaatgttattttatctatatatcttctttgtttggaatgctttatcacttgtttccgagttccttggagcctgatgttcttgttcctaaggcaggttaagctgtggtgtaactgccctttttggcctga

SEQ ID NO: 11947 - DNA, 24286 bp, Vitis vinifera
  Intron number 2 from transcript GSVIVT01019217001 (locus G SVIVG01019217001) derived from phytozome v7.0 (chr-ID chr1 5; pos 3216894 to 3241179 reverse strand)
gtgttggtgttgaaggttgattcccagaccgttaccgttggaagtaggcatggttgtgaaaccaatagatagtaacagtgaggccactgagcaaaggagcgcaagcaacccaaataaatagaagaaataaccagggtctccgagggaccaacgttgtagcactaccctttagagaaataccctttttctcctttttggaggaatgtttgtaggaggcataggaggtctcatttggcaaaagagaggaatcccagtggtgtctttttgatcttttggaaaagggtttttctatgggacccacaatctttaactaagacaaaacctgcttctttttggatattcgttggaaaaagggtttgctatgggcctcatagcaatagtgaaacacaatcagcggggaagatgtgacaccctatcggcgggaaaacctgtacacccctttctctttttttttctttaattcattaaccatttggatggtctggattgaaaatctttcatgctaatggtctgaaacttttggaggtagggtcccgaaggaagaactctcgatcggaaaaggatgagttttttatggagtctgacactgggagatatgtgcatggccttttgtgtgcttttctgggttttttattttttgctttcgtggggtggggggcggaatcatattgtagacttggagctaataaaggggtcaagatccattgtgcacgcatgggcccggacatgacaaagcgataaaaactgattagaaagatattatcattgaatgatcactaaattggaaatccaaaaccccacgtgatgacataaaaactgaaatccttaaatttgttttctgaagcctgaaaaatcccacattgaagccctaacttcgacctccggacattgtacgtttcgtctttgcttcacattacccatcagtgactactgatagggttgatacgtggctgaagtaattattacccctacaatccctcattttaattcgtagaaagtgaaaatctggtggaaaaatttgtcactgcatcaatatttctaagctttcggtttgttgacgaggcttcacaaaaagcaagacccaaatcgtgattttatcttttatattctcctattttctcagtgaccaaacaggttttatttagtttttttccaaaaagaagagaagggactcacctgggtagggatttggagcaacaaaatattcaatgtctatcatgattgatgtcactagtattttgaatggttgctaggaaatttcataaaattttaggagaattttcataaattttctagcctcaatgattgaatgtcgggtgtggggactaattcgaggtttggggattaagataattgttggataagattgaccggacggtgtcctcttgtgtaagccctatttttaatttttttttttcacttttcttttaaatctaatagaaatgagaaattttaatagattaattcaaaatattttaatctttgtctaaatttaaaattaataattttaaataaagtgacaaatggagatattaaattgattccatttgcttataccttggtccatagatttatactattatttaacagcctatatattattatatattttcatcaatttgaatcacgtttagtaaatagcaaaaaaaaaaatagcataatattataatttatcttcattttcaaacataattttcgtatatgataatacaatacaaataccatttggatgatatcattgaacaaatcaatttataataaacattaattctcgttatttttaagaatacaaacaaagacaatattttaatataactttattattttaagaatatgaatttattgacaaataaaattgtgatttattattaatattttaaaaaataaatttattgaagtaatactatactcttaattttaaatatataatttttattattattatttgtggaccccgcacttcagctcatgcgtttcccactcgatggtgagctcgatttttatttaaaaaattgatttgttgattaaaaaatgacttggagtcgtcacttatttttgttttatttttaaagggtaaacaaaataaaaaagaaaaaccttaagtgtgactccttgttttggaaaaggtggtctatgaaaaccggatcggattcgggggtcaggttactcatcgggaaggtacggtaaaaaccgtagcacccctctaagcccctaaagtcgggtctctactaataaaatgaagcaatcatggtaattgataaggaaaacaataaatacccgaaactatcatgcacataggagaatcaaaacatgtatatggaaatatcggaatgggaatagatacgtacttgggtgacgggccacaatgcccttatcaaaaagtgaggttagtgcacaattaaaagataatttcggacatgtcatagagcagaataaaatcaagcacgcatggcaattaaatcaatcaaacaatcaatcaatcatgaggaaaacacgtatgttgggcccccaccaaagcccattcatttttgcatgaattaatatcacagattccattattctggaattatgaaaaattcattcatgcctactaaaatcaagaggagcagaagattgttttgaaaatcagagtagaattaaaactatttgagagaagattgggtttttgaaatttatttgaaaattggatgtggattatttgaaaattggagttttagagattaaatataagaatgagaattttagaaattagattcgaaaggaattggaatttcagagagctaaatttgggaatctgaattttgaaaaattatttaaggacggaattttaataaacaaataagtggataaataaaggaatggaataataataataataatgaaataataaagattaaataaataattgcgaaaatagaaattgaatttatgaatttggcaattatggaaattaattaaggattgaattttgagtaaatgaatgagtgaacaaataaataaattggataaaaaaataataatgattaagtgaatggaggtggaaatttagaaattgagaattgaaaattgaatttggaaattgggaattatgtaaatgaatgtggaaatttagaatttagaaattgaatttagaaattgggaaattgaataattaattaagaatgaaattttaaataaatgaataagtgaataaataaataaattggataaaaaaataataatgattaagtaaataaatgtggaaatttagaaattgaaaattgagaattgaatttggaaattgagaatttgaagaattatgtaaatgaatgtggaaatttagaaattggaaattgaatttagaaattgggaatttgaataattaattaagaatgaaattttaaataaatgaataagtgaataaataaataaattggataaaaaataataatgattaagtaaataaatgtggaaatttagaaattgaaatttgaatttaggaaatttagaaattggaaattgaatttagaaattgggaatttgaatagttaattaaggatagaattttaaaataaatgaatgagtgaataaataaacaaattggataaaaaataataatgattaagtaaataaatgtggaaatttagaaattgaaatttgaatttaggaaatttagaaattggaaattgaatttagaaattgggaatttgaataattaattaagaatgaaattttaaataaatgaataagtgaataaataaataaattggataaaaaaataataatgattaagtaaataaatgtggaaatttagaaattgaaaattgagaattgaatttggaaattgagaatttgaagaattatgtaaatgaatgtggaaatttagaaattggaaattgaatttagaaattgggaatttgaataattaattaagaatgaaattttaaataaatgaataagtgaataaataaataaattggataaaaaataataatgattaagtaaataaatgtagaaatttagaaattgaaatttgaacttaggaaatttagaaattggaaattgaatttagaaattgggaatttgaatagttaattaaggatagaattttaaaataaatcgcctccggcggccagagcagtgccagtcggccagcgcgcagcctgctagagcttctctgccatcagctcctccgcgccgttagctcgcgtcgccgacgccgccagtatcgcgcctccatcgccaagcagttgatagcaaaggaaaaacaaagtgaaatgaacgagagaaagaaaaaaaaaaaaaggccatacctgcgcgaagaagtcctcccaccagctcttgcccccctttcctcttccttcccctttttctcttttttagctttttctttggcttctcccgcaagcctccctgttgcctctcccatcagccgcacttctctgctcgagccaacatcccatcagccgcctgaggaaaaaaagcaaaaaacaaagaaactccccgctgcttcgtagcctcagggggggtctacaaatatgcccctcttcggtagagttcacgagtgcaaagaaaatgagcactagagtgaaaaagaagtgtgaaaagtgagtgaaatgaagtgaactctaccgaagaacaaaggagacccccatagggacaatagtgaaactcaaactcattcaggctagcagacgaacacaaaggctctaatcctaaaagaaaacatatctcaaagcgcctctgaagccacactaaggtctcaatctctctttaagatgtctccaaaagtgacccaagagatcaatgtcaaagatgagtaacggtcgaaccaccctggagtacgagcaagaatgcgcccaaaggggactaccctatgtggactacgagatgaataggcgataagcacaggataacggagtgaggaaaaaccgagggacaatgtaaaaccatgaaggcaagatgcgcaaagccagtggatatgaacgccaggagttgtgactctagatgacaaggccgactctaaacactaaactgagaaaaacgacagctctggaagccaagccaaaaagctaactctaaacgctaaactagaagataacagctctggaagccaaaccaaaaaactaactctaaaagctaaactagaaagtaacagctttggaagccaaaccaaaaggctaactctaaacgctagacggagaaagtaatagctctggaagtcaaccaaaaaaactaactctaaaagctaaactagaaaataacgactctggaagccaatcaaaaactaactctaaaagctaaactagaaaataacagctctgaaagcctaaacaagacgacaacgatggctttggaagcttaaacaagacaacagtgatggctctggaagcctaaacaagacgacagtgatggctctggaagcttaaacaagacgatagtgatggctctggaagcctaaacgagatgacagtgatggctccggaagcctaaacgagatgatagtgatggctctggaagcctaaacgagatgacagtgatggctctggaagcttagacgagatgatagtgatggctctagaagcctaaacgagatgatagtgatggctctggaagcctaaacgagatgatagtgatggctctggaagcctaaacgagatgatagtgatggctctagaagcctaaatgagacgacagtgatggctctggaagcataaacgagacgacagtgatggctctggaagcctaaacgagacgacagtgatggctctggaagcctaaacgagatgacagtgatggctctggaagcctaaacgagatgataatgatggctctggaagcctaaacgagatgacagtgatggctctggaagcctagacgagatgatagtgatggctctggaagcctaaacgagatgacaatgatgactctagaagcctagacgagatgacagtgatggctctggatgacagtgatggctctagaagcctagacgagatgacagtgatggctctggaagcctagacgagatgacagtgatggctctggaagcctaaacgagatgacagtgatggctctggaagcctacacgagatgacagtgatggctttggaagcctaaacgagatgacagtgatggctctggaagcctaaacgagacgatagtgatgactctggaagcctaaacgagacgacagtgatggctctggaagcctaaacgagacgacagtgatggctctggaagcctaaacgagatgataatgatggctctggaagcctaaacgagatgacagtgatggctctggaagcctaaacaagatgacagtgatggctctagaagccaaccaaaaactaactttaaaagttaaactagaaaataatggctctggaagccgaaccgaaaggctagttctaaatgctaaactagaaggcccacaggtgaactaacagtaggggaatgccttaaacaaagtaaacaagggggatgccccaaacaaggcgacaggaaagggggatgccttaaacgaactaaaggtagggggatgccctaaacaaaagcgacagtagggggatgccctaaacaaagtgacgataggggggatgccctaaacgagctaaaagcagggggatgccctaaacaaagtgacgagaacggggaatgccctgaacaaagatgacagtggggggatgccccaaacgtaaatgacagtggggggatgccccaaacgtaaatgacaatggggggatgccccgaacgtaaatgacagtggggggatgccccaaacataatgacagtggggggatgccccaaacgtaaatgacagtgggggatgccccaaacgtaaatgacaatggggggatgccctaaacgaaaatgacagtggggggatgccccaaacgaaaatgacagtggggggttgccccaatagaaaaacgctaaagggggtatgccccagtatgacgactcacaaagatcaagaaatggactgagtagtgagaaagatgtgcaaaacagcagatgtactcaaagacgggggtatcccccagtgtggcatgccactgcaaatctcaatccgctggaaatggctgaaagggactctacgagtctcgaacgacgctccgctgagagctcatatcgatgaagagctcaggaataatggtcagtgaggcgaatataatatatctcgatcgagtgatggaaactgtaacggatatgtgagaaaacgatcacctccagggctaaatgaaggcaatatgccccagtatgacatcagatgtacccgatctgtcctgatgacccgagaataacaccaatgggacgcgtaacagatctgatatgtacccctctgaaatgatgatgcgggaaatccaggcaccagagacaactccatccaggaatcacgactatataaaaaggtatgaatctagctgaatgactcaagagagactcctcagagtatccggacaaaatgaagtcgaacatcgacctggcgcgtatcccataactgtggatgatcatgtaaaccagtggggatctataaatctcgatcaagatggggaatatgccccagtgtggcatcgagaatgtaacatgtcgaaaaatcagatgagctcaggtcatccatgcatggctagatggctctcgataggctccactaaggaatcatcgtgaggatagcgaatatatcatcatctctgcataaatctcgccaaataaggatagacacgcgactccctcatgatctgtaaacctcatccgaaccgaaatatgcccttgtatggcatcgaaatgtatgataggtcggagatcagatagcatgggatcatctatcctcaaacatgtgacctctgcgaagatccataaagatcctccgaaacggaatatgccccagtatggcatcaggtgcgcgacaggtccgaagaacaaatgtcatgaaatcatccatcacgcacctatgacctccatgaagatccgtatatctcatctgaaacggaaatatgccccagtatggcgtcggatgtgtgacaggtcaaaagaacaagtgtcatgaaatcatttgtcatcgaacatgtaacaatggtcgtctgaatccataactgaatcatgcacacatatccaagatgtacctcccagatggagaggcatgatggcatccaagtgtcgagaagtgtggacctggctgggtggatctcagaggctctgtaaggtaacgatcatgtccacgtctcagtgagcatccagtaagtgatgatcgtgcaagtctgtgaggatccatgaacctccaaatgaaatgggatatgctgcaatgtggcaccggaggtatgataggtaaaaaaaatcaggtgacaccaagtcaatcatcgtcaaactcacgatcccggtaatccgaacacaactgaatcagtcctacacatcaaaggggcgactcccagaagaagaagcatgacaatatctaaatatcaaccagattttaatcacctgtccaagtagaggctgccgaaaacgacatttgatctcatggcctcagggtggtcttaagacacaggacgtaacgtaggctgaggtgatagggtaatagaaatgaaaggaaactaagcccaaatacccaatgatcagaactcatgccctcatatatgaaatgcaacatgtatagtgaaccccatgagccatggacctgaggatgcctaacgtgaatgtgatatcgataagaagacaaatgaagcaaaatgaactgacagtgataggtgtaatgatgatgcgaagtgagcattgaacctgagatgggtcactgtaaggagagaataagacgtgaagggaatgagatgaatcacaagcaacgataacaacgatagcgaaacaatgaatatgtgaagaaaggtggcgatcgacccagatcaaacatgaagtgaagtcacatcaataatgaatgtaatgatggaaaggacaatgactcggagtccttaggagaaggtcactcatctctctcacaaatagatatgacgaagcaatacaaataacatgagatctcagagagctcacatacgaactcccaataatgaacatactcgataaaaatgacccccagacatcaatatacatactcaatgatcgagaacactatgcacatacacacatgtgctaataataataataatgtttttttttcttttcttttctttctttttttattttttattattattttttctttctttcctttttttttttttttttttttttttttttttacatatatacaaatacacataccctgaacatgaacaaacaaaccccaaagatgatatcaataacaaatggacacactcccaagtgataaggtaacaaacaaattctctctgacgagatgacattctcaaaccaaggatctctaaaccagtgtccgtgagatagatggtggaaatgatgtgactatcctccatgtgatgaactgaggaggctcaccactcagggtggagagaatatgagacaaacaaatagtagataggataaggaagaagagatgaataacataaccaataagatgagatgaaaatgcagaggtgcagtgataggaaaagataatgagaaaaacatgcccctaggtccaaagctcatgaaactcccaaacaatgcatgcatacattaaaggacccctatcccgatgtgaaaatgtgagcaaggcgataagaaagaaagactataatacgcatgtgaggctcaatgggctagcaacggactatgatgtcaataaaggtaataaaatatgagctaaccgaaatgaaggccacccatcctgcgaccatggtctcaaacatagtacctctttagctgatccacgttggttggctctgagagtcggtttccatctaaatccatcaaccatgcagcgccctctggggtcaactccctgatgaaataaggtccgctccagctgggtctgaacttccctctaggatctctgatcaatcccctgctgactttcagaaccaagtcacctatccgtaatggtctgggcctgacccactttttgaaagcgcgggccatcttcctctgatatgcacgaacatggtctgctgctctcaatctcctctcatctaggagattgagctgatcaaatcgagcctgagcccaatctggctcaggaatctgctgctctagtgctactctcaatgaacccatctcaatctcaacgggtagcatcgcctccatgccatataccaaggaatagggtgtggcgcctgtagaggtgcgaaaagaagtccaataagcccacaatgcaaatgggagcttctctgaccaatcccgagaagtctcgaccatcctccgtaatatcctcttgatattcttattcgcggcctctactgccccattcgtctgcggcctgtacgcagatgatctatgatgccggatgttgtatctctgtactaaggtgtcaacctctactctgaaatgtactcctctatccgaaatcaactcatgagggactccatagcgacagataatgtgtgatctgataaaactagcaactccagatgatgtcaatctcgcatacgaagcggcctccacccacttggtgaagtaatcgatggcaaccaggatgaactcatgaccactggaagatttcggtgaaatcttcccgatgatatcaataccccagacggaaaatggccatggtgaagtcagtgcgtgcagctcggagggcggcatgtgaatgagatctccgtgtatctgacactcgggacacctctgaacaaactggcagcaatctgtctccatggttaaccagaagtatcatgtcctcatgatcttacgtgccaacatatgtcctcccatatgtggtccgcagactcccgcatgaacctctctcatcacccgatcggcagaggcacggtccaaacacaataatagcatcccgtcaggtgatcgcctgtacagtgtctcgccgcaaatcacgaatcgagtggccaactgtctcaatactctcttatctttggccgtggcggcctcaggatatacgccgagtctcaaaaagtgatacatgtcgtgataccatgggaaaccatcatctggctctacatcatcgatcaggcaacagtaagcaggagcagatcttgactcgatcaacaaaggtcgaacagtggcgtcaacgggaatatcgatcatggaagctagagtagctaaagcatcagcaaactggttctgcgctctaggtagatgggtatatctcaaatcatcaaacctcccaaccagtagctccaaatatgcatgataaggcttaagcttcacatctctagtcttccactcgccctgaatctgtctcaataccagattggagtcaccaaacacctccatctgtctaatcccgagctcaagggctgtctttaatcccaagatacaagcctcatactcaacaatgttgttcgtggcaggatgtcgatccgagaatgccaaacgaacagatctgggaatgtgatcaccatgaggggatatcaataggacgcctatcccgtatccggaatggttggctgcaccatcaaagtgcatgcgccaacctgacagactagtcacagcagcaacatcctcgtatgggaagtcgtcatcaatggccctaccatcgggaactggtaaagaagctagatgatctgtgacaacgctccctctaatggacttctgagtgacataatggatgtcaaactcagtcagaagtaccaaccatctcatgaggcaactgaccagggcgggcctatcaaacaaatatctcaaaggatctagacgggatatcaagtgcactgaataatcggtcatgtaatgtctcaatcggcgagtggcccaaaccaatgccaaacaataacgctcaatcatgacatacctcgtctcgtagtctaacatcctcttgctcaaataataaatggctcgatctttgcccgaatcatcgagctgagctaacatgcaacccaaagccacgtccgaaactgataggtataggagtagaggacggcctggtgtaggaggcaccaaaacaggaggtgacaacaagtactctctgatcctctcgaaggcacgttggcactggtcatcccaaagagtaggttgactcttcctcaagagtcgaaatatgggctcgcagatgtctgtcaatctggctatgaatctactgatgtactgaagtctgcccaggaagcctctgacctctctctctgtcctcggcgtaggcatgtcaagaatggctctaatcttgtccagatctacctctatgcctcgctcactgaccatgtatcccaaaagttccccagaagtcactccgaaagtgcacttcttgggattcagtctcaatccgaattgtctgatcctctcaaagaacctctcaagagctgccaagtgatctgatctatctcaggatttcactatcatgtcgtctacgtaaacctcgacatcccgatgcatcatgccatggaagagtgtggtcgctgctctctgatatgtggctcttgcgttcttcaatccgaatggcatgactctatagcaataagtaccccactcggtaatgaaggacgtcttctccatgtcctttggagccatcaagatctgactgtacccagaaaatccgtccataaaggacaacatcgaatgacctaccgtactgtcaactagcatgtcgatgtgtggaagaggaaaatcatccttaggactggccttgttgagatctcggaaatcaacacagactctcaccttgtcgtccttcttgggaacagggacgacattggccagccactccgggtactcgaccactgataagaatcctacactgagctgcttctggatctcctctttcacctgcaagctccaacgagggtgcaatcgtctcaatttctgcttaaccggtctggcatggggcagaagtggcaaacgatgctggacgatagatggatcaaggcctggcatgtcctcataggaccatgcgaaaacatccaagtaggatatgagcagctggatgagactatctctctcatctgtagacaaatccgatctgatcctcaactccctaagctgatctatcgtgccaaagtcaacaatctcggtgtccgctacatcaggtgaaactctctgatcaacggggtctgaatcagaatcgggagatgagtcatcatctgaatcatgctgtgcaatatcatcatctatgtcaaatatctgtgatatgggtggagatggtacaagtaaagcaatatcacgagacgcaggcaaatactcaaacatgctcaaatccatagatggatcatcgaaaacaacgtcagaatgggagacgaaccccgacagaacgtcaaatgaaagaggtgggtccacaaagtcggacgctccctcaacaatgccaacatggctatcaatcaaatcatcaaaagctataaggtcctcagcagactccaaagcaggggcagtcaagctctccccggcaagctcgatggcgaataccccgaagagatcaaatgatgaagcaagcccaggctgaatagtctcctcaatctggctcaggctcggggcgagcatctcgtcgatgtactcgtcatgtggggcggccccgtccactatgtcctcgacctcaacaaaggtcccatgctcatcggtctcgtccgggaagcaaagcgtcataaggctagtgcgatctggagaggaaggagcgatcaacgcagaagtcgaaggaccaggggctccatctctcaatcgtaactgctggacaaggcgctgaagctcggcctcctgggtggtgctaagtcctccgacgatcccgtcagatggtgcgtgtggctccgatgccctcacaaagtaatctgctaggctcctggtgtatggacgcataggataatagaaaggagtatgagtcagccgagccctcactctctccttgcgcaagcgcgccatatagagataatcggcctcagtgaggataaacccgagtccgaatgatacgtcatgatcaggaatggtgatgaactcgctcggtccatgctgacgtcgacccaatcccatgccaggaagataggacatgcctctcatcatatcaagcactacagtgctgccatgctggtcaaaggacatagcgacgaagtctcggcaaaagtcctctagctcaagagtctgtacctcatcaaaagtgaacccggtcagcagtaagtcgtcttcgctatggctgatctggagcacgggctcaacggaaatgaacatgtcccctgccgactgtacgacaactacctggccctcatggatgaacttcactttctgatgaagtgaagaagggatggctccggctcggtgaatccacggttggcccaaaagaaggttaaaggatgtaggaatcctcaaaacctgaaagacagtgataaatgtggtcggacctatcaggagctcaatctccagtgtacccatgacctctctacgagtgctgtcataagctcggacggtctgcgtggatgggccgaaatcgaatggtgcgtatccgagagcgatggcgatggctagaggacatacgtttagggccgagccattgtccagaaagacagatggaactcgacgacctgaacatccaacagatatatagagaggacgcgtgtggccagaaccctctggtggcaagtcgtcatcggaaaagacgatacaagtggctctaccagccgtcatcatatgaatgagtccctcaagagtggtcgtggtatcaactctaatctggctcagagctcgagtcagtgcatcccgatgagtactggaggacgctaaaaggctccagatagaaatacgagcctgagtgctctgcaactgcctcaaaatctcgtcatcctctactctgacctcctcctgggatgatgtaccccctaagggtctagcggcagcggttggaggtggttgtctcaatactctccctccccagaggatatactgaacgtccggagtctgatgatcaacactgtgtggagcctaaaactcctcaacatctgggactaagacgaacggtgtttgaacgctatagcgcggcaagatcaatggctcaacggtggcagcctgcactaacgccgactcgggaactaatcggaatggagcaggcgtccgaggacctagagccacctcgctcatctcataaatcacatatggcatgatgggctctgggtctgaatcatcatcactcagcatgtggatgtggtcatcgatctcatcaaactctaagaaatgaatgtcatcagctggtggagggactgcatgtgtagtgcgagcaggcaacgggttcgtggtcacactcggctgacccaagtgtaccaaaccctagtcgatcaaatcctgaacagcatgcctcaaagcggtgcatcgatcagtctcgtgtccaggcccctgatggtatgcacagtgtagattcatcctgaactgaggtggaatcggctgaggcggcggtcgaggggtgagagtagtcaataacccagcctctgtaagcttccgaagagcctgactcaacggcatgcctatctgtgagaattgcctctgcgtcctcaaagcaaagggagcagaagtctgctgagctctgggtcggggataagaagtagcgggtctcgcagtgaactgagcagcatagcatggctgtcctgtagccgtgtaggaaaccgggggtctctcaatgccctgggaggcataataaggcaaagccaaagtttgcggagtatatgtctgatcataagctagacaaggtgtccgtggcctgtactgatgagatgcataggacgaatgaggctcgggaaactgtgggatcggctgatggcgcctgagaggcctctgactggaagaaccgatagcgctcacatctactggcctcgatcctacgaagggcttcttccccttaatatcactaggggaagaatctgtccataaacctctcgagatgccgtcctcgacatcatacaaagccataactagagacccaaaatccgtgaacggggcccctaccacatgtctggcgatccgcggctgcaggctcctcaaaaccatctgaatcctggtccctctctgatggtctatcgataatctcagctatcttcccgcgccagtgggaaataaaagaagaaacagactcctctgccctctgtctcaaagcctcaagctccctcctcgatacatccatgacagtgctaaacgaaaattgtcgtaggaactcctgggccaagtcgtcccatgtgcggcgcctcgaggcctccaaagatgcaaaccaacgctgggccgccccactcaaagatagtgggaaaagagtaatcatctgaggctcgtccagtccatgagccctcatcacggtgttgtataatcggagatggaggcgtggacaaccaatgccagtatacctctcaatatcaggcatcctgaacttagccggcaagctggctaccggcactccatcaaaaccctcccaagtagtggctctgtctgaagtcctcaactgcctcaaaccctgctcaagcctatccatgcgagcatgtgggtcctctgaggtcggggtgggcacggtgatgggaggcgggacaaccccggtctgactatgcagagtgaacggcatggcctgtggcgctgactgactgggtggaggaggtggtggcactgtagggtcatactgggcaccatcctggagcaggacctgctgggcctactgcccatccatcctccgaccgaggctagatatagcctcctgaattgaagccatggcctcagcaaactgatcgacggtaactacctgtgaatccatatctctttgatctgatctctagtctgactggtccgataccctgatcaatctaccctcaactctgatccaagatggtgtatccaggctgtgaacaaaatccgatcctaacaagactcctcctctactctatcccacgaaggtatatccaaatgaagaacaaaggtccgatcctgagaaagcacgaagaacggaataaggatatggctctgaggatgtacaaaagaaaatgtaatctaagcgggaaccagcaaagcatccaagtgaagatgaacggtctgaccgtactcaaaactagcactaatctctgtgcattctcaactggagactaaagagggagcgtcgaatccaaaatgtgaccacagaggcgccgaaggccctcagatgcacccacgtgtagggagggagtcctaatctgaggatctacggctcaacctacgaggtcaaggtggttctaaatagatatgggtggactttaaaagatccctagcaaaagcgatcgtaccctccggcggtacgcaaccctctgcatgtctccaaagagacggggcgcttccatgcaaggtggtcatcatctccacacatgtactacctcgacatcccaggaggtttcctatggtgaaacctctcaaactctcaacgctcaatggtcaactaaagtgcacagtgaatggtgtgggtgcatccgaaaaccctaagaacctagagcagaagaggaaacacactggtcgcacgactatccatgaaacctagctcggggctatacaggtcttcaatgatcgaactccaattgacatcaaagtgtcgtcctcctcctgaatgctcccgtacatcgatatagcccgtcgctagaccctactcctaatctctatctcggttagagtacaagcacacacaaggcctcacacttgcaaaagtgagaactagaatgaaggaaatgaccgagactagagggtcggagataaagggatagatgtgctacccacatagacaagcgacatacaatcacgcagaggaaggcagtcatgcagcacacaatcaggcaaagctcagatatatcaccatgtacacacaagataagcgagaatacgacaattaagacgaatagtgatacaaacatcatgctcaaagacgatcaaaatagtatacaagtcagagaaacaacatgtcaagctgagtgatgtatagtggtgagtgtatgcatgtgaagtgatcagaacaatcatggcgaaatcggagtcaatatgctaagcaagacaataagatcaatcaatataatcggcatgtcaatatctcaaacgaatatatcaatgaagcacaggagaaaacacggcatcggaatcctcaatcaagacaagtcagtcaacataatcaacatgtcaaaatcccaaatggatataacatctaagcatgcatcaaaaaatccccaatgtacaatcaagagatgggcatccactgatcgtccaatcgaatgccacgtttgcttcactctaagttcaagcttaaccctctaactatccccagtggagtcgccattttgtggaccccgcacttcgactcatgcgtttcccactcgatggtgagctcgatttttatttgaaaaattgatttgttgattaaaaaatgacttggagtcgccacttatttttgttttatttttaaagggtaaacaaaataagaaagaaaaaccctaagtgtgactccttgttttggaaaaggtggtctgtgaaaaccggatcgagttcgggggtcaggttactcatcgggaaggtacggtaaagactgtagcacccctctaagcctctaaagtcgggtctctactaataaaatgaagcaatcatggcaattgatgaggaaaacaatgaatacccggaactatcatgcacataggagaatcaaaacatgtatatggaaatatcggaatgggaatagatacgtacctgggtgacgggccacaatacgcttatcaaaaagtgaggttagtgcacaattaaaggataatttcgggcatgccatagagcagaataaaatcaagcacgcatggcaattaaatcaatcaaacaatcaatcaatcatgaggaaaacacgtatattgggcccccaccaaagcccattcatttttgcatgaattaatatcacagattccattattctggaattatgaaaaattcattcatgcctactaaaatcaagaggagcagtaggtgccttggatttgtttgcagcaaatgcaaagtgaggaccatctgtgttatgaacagagtaattgacatcgagaagattttcatagcccaacaattcagcttgaaagtcttcgaatgtgaagtcagtttcacgggatgcaaaattaaaagaggtgacaaacggtgtgtaggatgattgcaggccaccaagaagaaaggagatcaggtcttgatcatcaacaggcttgccagctgctgccaattgatctgcaagggttttggcactttcaagatacttagaacaggatttggtaccttgagtgaatgtttgaagttgacgtttaagatgagagattcgagaacgcgattgagaagaaaagtgagtctacagggcagtccaatcttgcttagatgtttctaatccatatatagtagaaacaagtttttctgaaagagatgcaaggatccatccaaggagacaaacatctttcttctaccaaacaacataggcaggatttaatgaaccagaggcaatatgttttggaggacaaacttcagtgccatcaatgaagcccattaagtcatgtcctcggaggagattaaggaactgcattttccatgccaaataattgtgggagccatctagcttaacagaaataatggtggtagatggtggtaggatagatacaggggtggaggtgtcatcggtgttggccatttggatgatgcggaagctggagaaaggattgtttgaaaagcgtgagcttatagaattaagctctgataccatataaaaccttaacaactcaacagaaagatgaacacacaatatatctttgacttggctctagcacacaagctgtgtagtttttcattatatttatagttgtacaattgaactgacaagcgtataataaggaacacaagtatgaacaaagataaggaaacaataaaatacacatttgtaggagaaaataatgctaacaactggattattttgaatcagtaacagaatggatagagtgaggaatgggtgcagatgcttctggaatttatgctgaagattctgatagtctaacatgaaaaatatgaagagggtaggataaatgtgaggattcctcacatttttcatcctcctgacattatttgtgttctccccattttttcaatctttttatttgaatttttttctcataatttctagcaattgtaagttaaaaatagtagtaataaattattttagtgttatttgaagtaaaaaatgtaaattttagagggcataaagaatgtgacaattttttttcatttgaattttttttctcataatttctagtaattataagtcaaaatagtagtaataaactattttggtgataactgaagtagtaaaaataaaaaatgtaaaatttggaggatatgaaaaatgtatgaagagtacgaagaatatgaagattcatcacattcattgtaccctcttcaaattttttcatttaaatcttttttctcataatttctagcaattgcaagtgaaaatagtagtgaaaaactattataatggtattttaagtaataaataaataaaaacatcttaaaattaaattaaataaatataaaatttggagggtattgagaatgtgatgagggaatgaagaatctaagaattcctcacattattcgtaccacttcatatcctatataccttccccaatttttcaaattttgttcatttgaaattttttctcataatttctaacaattgtaaatcaaaataatagtaataaactattttagtagtatttgaagtaaaaaaaaaaatttagaattaaaaagaaattgtaaaatttgaagggtaagaaaaatgtaaggagtgtatgaagaatataaattctcacattctttgtaccctcataaatttttcaaattttttttctcataatttttagcaattttaaataaaaatagcagtaataagagttattttagttgtatttgaaataataaaaaatttcttgaaacaaaaaaaaaattaaattttggaggttacaaggaatgcatgtgaaaatataacaaaatggaagtgaaaatatgttgtggaacattttaaatacgagtgaaaatagtactatggatgcaatcatatgtttctcactttattttagtaattactaatgaattttcatttattaagctttctaaatttaattgtatttacaacaatcaactgtacttgtgaagaaattttttcgttaaatgtggtaaaaaattttaaataccatttaattcataggtaattaaataagtagtttggaaaataaaaaacatgtcaaagttgaatgtagaatgcaaaagaagtttgacaatggagtagtgaatggagaaattcgaagaattttgtgatgctgacaacataccaaagttgaaaattttcattattaaggtaagaaaatttatttattaaatcatgttatcttttcaatactagtggaaatctggcatattttgttaaagaataaattttttatcaacatatttgacaaagaacttatcttcttttcttttttattttatttatagaaaaaaaacataattttaaaacaaaaaatagttctaaagtgattatccaataataaaatatcttaaaagagtaattgttatttatttaatgatataaacttataaccctaaaaccatgtcaaaataatcatttatattacaatttctatcaataatttgacgtgaacaatatttcttaaagttaaaaaagtccctatattatggggacatggagaattaatattggtatttatttttaacaatttaatattgttaaaaattagaaattaatagtggtattttatttataatgtagttttggtagtgaaggacacgaagaaagttataacctaatgaccatgtcaaaaaaatcatttttatttttaaaatttattatcaaaatgcatctcaatagtaatcgaaatgaccattataaacttattatattgtcatttcaagtcaagattggggtgtttaaatttaaagtatttaaaatctaactaattgctagggtgccaacaagttaatgtttgttttaagtttaaatttttttttttcaaaacttctattaatagtaactcaaatgattattttattatgatttgaagttaaaaaaaaattcttaaaaataaataagtcattaacttattatcatccatttgtattgtatgccttcaaattgaaaattagaatattttcatgtcttcaaattatgccatacaaatacaaattaatattgtttttatatcattttatgtaattttggtagtggacgacgtggagaaagggaagatcaaagaatttatcattaaccttggagatgaattgaaattcatgaagatgctaatattgatggtagttctaactccgattggtaaattaattatgacaagttgttgcatggtatttcaatcacaaaagtttgaaaattgaaatttaattgtatagatgaagcaaaagcattttacgatatatatgctagagtgactgtatttagtattcaaaaagatgatttgaaacgtaacaagaatgaagaaattatatctcgaaactgggtttgttacaaggaaagacattgattgccaaagtgttttaaaaatgaaaatctacaagggagccaagaccatttactagattgggttatgaacctgcattttgtattggatttagtagaaaattggaaaagtggattgttaaagagtttgaggggaccataatcatcttttggtcaaagtaattgatacacaatttcttttatcttatcaagcaataaacattttggataagacttagcttcatgcaatacataaagttagtgtcaaactagccaaattatggattatatggtacaataattgggaggacatgaaaatattgatttcacatcaaaagatccatacaataatgttgatgcaatgggtagattcaaaatcaaggatacggatgtggaaggggttttggcttatttgtgcaaaaaggcataaaatacctttctttttattataaattcaatgttgatgaaaaaggtcgactatcaaacttgttttgggcaaattctacccctcagttggattatgaatgttttggtgatgtcttggcatttgatacaatataatgaaccaatgcttataagaaaccacttgttttggttggttttaaccatcaccaccaagcagtactagtatttggttatgtgttattcaatgatgaaaccattagtagtattggagacattacttcatgcaatgataaacaagaagtctctctaacaaatgggataaagcaataaaaaaaagttttccccaatgtgcatcatcttttgccaggcacatatttctttgcaaaaatgaggacccatgactatcgaggttggatgcaactccacaaagcctcgaaatctcattggttcttggaacttgcactgccatcggtggaatgggaatctcgacaagaagccgacatcaatttgaagaaaagtgttagcggagaatgagaaaaacgataaaaataaagtgactttttggttgagatttgcaagtgacgtgtgaatcacaaatcttccattctatggagtgtgggggctacgggggagaagaccatagttgatgttgtggtgaagactaatgatcgaagacaagtactcatgagttgagcctcaaagtcctgcttttattttaataatattaataaaaaaatggtttgtagacttgttttgcattacataatgagggaagctgacaacatgatatgggtgtagtggagaaaaccgaactgagttactcgattgttcaaattttcaaatcgaaccaaacattttacaaataaaaacccaaccaaataagtcggtttggtttgatgtgatcgatttttatggtttcacttatacccttatatataattctaatggaattgaaattaaaaatatttacattttattaattaaaaataattattaagcacatatttttaagctcttttactacaattcatgaataattattaacatttacaaaaaataatattcattaatttaccctctaatatgttggagactcattaatttaatattacactatttaatttacaatatcctaaattaatttgaaccaaataaattaaagatttttattaaatatataaaatttctttatttaattatattttaatcattatatcagatatctatatatatgtatatataaggagggtatttctggcaactcacttttcaactcattcatatagaaatagaatatcgatgagaataatgagtcgaatatcttgagaggggagaagcggagagaaaggt

SEQ ID NO: 11948 - DNA, 3185 bp, Vitis vinifera
  Intron number 3 from transcript GSVIVT01015026001 (locus G SVIVG01015026001) derived from phytozome v7.0 (chr-ID chr1 1; pos 548976 to 552160 reverse strand)
gaacagtctggggttttggttaccagagctcccaggtacttccttgtgcctctcttttctcttctttataatgtttctactgttacattttgggattcttgagttctcgacgaaaatttgatactgtttttgagattcttgtgtttgaaaccgtgatctttaatgttttgagtccggatacttcttgtagtcttgtagatgtaacttgcaatttgccgattatgagcaatgctaagtgcaatcttttcattattttctcgagaaagtgacttgctttcacttcttgcattttaattctttctgtcgagtgatcatagtgtataattcttggcacagaattttagagggaggaagggatttagtttaataggtggaattcgacttggctgctatagtttttaacatatatagctcaactcaactaacaatttcttatgcaaattggcttctactacatgaaattcttgtcttgtttttatggtgtggcaagatagttcgttctctgtttgttattttcttttttaactgcagaggaagggatttagtttaataggtggaattcgacttggctgctatagtttttaacatatatagctcaactcaactaacaatttcttatgcaaattggcatctactacatgaaattcttgtcttgtttttatggtgtggcaagagagttcgttctctgtttgttattttcttttttaactgcagaggaaataggtggatgtctgaaaataatgctacaagagttggcaactaatggaaatggcacaagagtccagggagagtagtttttttcttggggtgttcatgaataaatgtttaagatggttgtaaccttttagtcattcttggcgcagcgagtactgcaagagtggggccttcctcagggtctccaggtttggggcttcagccgctaagaatgctgctccaagatgggaggttggtggatcttgcggcaagtgcaacaacagattctttgggaaaggatttggatgccaggactgcagagttggaggccggtaaatctttggagacatgtagcgtttcagatgaggagaaccctgactcttttagtgtctccaaaaagtttgttatgttcagtagctttttgtgcagtggaggggtctgagaagcaaatcccttatgagaaaatgggagtcaagaaaaggtcatggggttaaggtcgtagggggaaagaagaattcgttgttggttacttgtttggtgagagatctccgtgaacttgattgcctggtcaattttaatcgcttggctctctcagccaggggaagaggcagtggggtctcagtgtctccttctgtacgaggttgatttcttggtttccagctgggttgagggggttggaattctgggggtttatggggatctttgctaggcttctgggatcatttttgatttggatagtgcttttagcattgggtggttttagggggtaggtcttttccctcttctctctttctagccttatggcctatattttatactccgtatgtatgttgccatgcctttgtgctagcgctttttaatgtattctttctttttactcatcaaaaaaaaaaaaaaacttttagtcattctgacaatgttacaactgttcctaatcagtgatcattctaaatttatagtgaaggtgcctgtgtggagtttctataatgacatttgtcctattttgccatattctgttcatttttcatattaagcaatttgagaatgttgcaactctcaggtttttacctttgggtcaagtttgttcttcacaatgttcccttcatgttgtcttgcatgaatcataatacaccataaatgttaagagacaaggtgattaaagactttgtggctttttcccttgacttatgtgtctttggtattgcctttgtactcttgtgtgcttttagcactttttaatacattctcttacttaccaaaaaaaaatgtgtctttggtattgcctttagttttggtagtcatatccatgcttgggtaccattgctgcagtgtgtttttgtttctcttaactctgttgttcagtataatgctgtttctttggtgataagagttttggctttgatttgattctcctatttgcaaatgattttagtgcaatatggtgatatacatttgctatttgtgggttttggcatggctttacaccttttgtttcacaaatcttcatttatacgcatatcttggctttatgcatcaattgtaacctgcttcactatggttgttttgatttcttgcactgaggttctgtatgcaatttcatctccatgttttattgacagtctgaaataagttctctctttctaaaattgaattggcaacactaccttcttgggatttcttttcaacatcaataactgggctatgccgtgttgacatgatttcaatctccatgtctgcatgtcggatgtattggatgcattgttgatgtcaatctggggacctttgcgtttattaatttattttttctttgaattgatattggaggttagggtgtggtgacaaccatagtgttagtgttatttgatatgtgtttgctttgatcaatgggccttaagaaggtatggaattgtgaaatgctcaaaatttgattggaaatgactttccagagctatttgtttgcttcaatgttttttacttgaaacatctaggaagctggaatggtatcggttggcatattttgagttcattcaaatgaacatgtaaactgattacgaacatgctaggagaattcagcttcagatgatatttcagaaactgtgttatttgagcagaacctaattaacagtgtgaaaaaatgtgatcttcaaatcatagtgtttagtgaaaacgagcccatgccaacctatcagacaaaataaataaaaaaaatcagtcataccaaattgtgtatgtttaagaaaaactattacgtaatacgtattgccacagggttgtactaaaataaatctcatagtggagttaccactcatgaggagaggaataaccaaatggggcctcctgataaattgccatccacttctgcttttgtattcttgttattttcatctttggaaggtaatggtagaaaaagtgtgttttcaccatcgatgtgtttattacttacaaatgaactgctgttactgtatgtccaattgcaggcaggcggtatcatt

SEQ ID NO: 11949 - DNA, 4840 bp, Vitis vinifera
  Intron number 26 from transcript GSVIVT01008876001 (locus GSVIVG01008876001) derived from phytozome v7.0 (chr-ID chr 18; pos 2966313 to 2971152 reverse strand)
ggtttaattctcagaacaatactcacaaggtgaatttttgcaattttgagcaactagactttattttccttgcatctaattttcattggtagtattgagatctgtgggacttagaagtttaaatcagtacttatggaatctgttttgcttggtgtattgggttttgttttgctttgtttttgtgttttttttttttttttggaatggaatggaatgtaacagatcactctgttattaaaattggtggttcagttttggaatggaaatccattggtattagatcattctagtgttccttttttctttttctttttcttttttgaaataagaatgtattagaaatggataaagtaagtgcatgagaaggatgaacaatcctccccaaatttaaagaagctgataaaaaaatggaagattaaaccttctctactatactaatagaacctatacatccatatagaattatttgagaatattcaatattaaacctttcaaccttccttgaggattaacaattctcctttgaacagaaatcaaaataaatctccactcctccctatccaaatccttatgaattatatactgaatgttgatcaagctaaactgcattgagagaaatactcttaaatgttgtgatagaggtccaaacagatgactagaaatgaattagatcacatagtgtctcagaagtcttccacttgttttcaaaaatattagcatttctttccctccacagaatccatgttagggtgagacaagcaatttgctacaagactttgtctttgatggacctccccaaacccttgtatgagatgatcatcatatcacatatgcttcttgtttgaacccaattcaaacgaactaatttgaatagtttgtgtcaaaggcccaaagtcaacgggcaatgtaaaaacagatggtcaattgtttttctacacctcatgcacaaaatgcaccaattaggattaagagctttataaggtcttcttaattatagcatgtcaattgtatttaccctcttgtatgccactggccaaggaaaggctttgaccttagatgggctttagatttccataaacatttagttgtagagaaaggaaccatgtttgtaggattggacaagtgcacacaagtgagagaggaaatgagtctaagtaatcatcttcaatttattgaggttatgaaagaaaaattcaaattccaaaaaaagggggaagaaaaaccaagaatggttgagatcggaagacttctaactgtggaaagcctaaaaatgcttggatattgagaacataatggttgatcctttcaccaaatattttcccaaaaatgaattcttgccccatgacttgctacaaaatgagtatatttgggaaaaaaattgaaaaacttgtataatggccttccaaggggaatggtgtgacaacctaactagaatgttggtgtcccacccattggggtgttctcatagatgctccaaataacctaatgccaaagagtagagcatttcctaggaaatttgcaaagccacatccttaaaagggtcgattcccctcctccccaactctccccccccaaaaaaaaaaaaaatcctcccaaagcccaaacccccttctatatttggcttgcatactaggtcccaattgatgaggtatctctcttgcatataaggtttaatattatactaggtcccgttaacattgaggctttggcacatgcttttcggtctagccaagatgggttaggttctgcctaggagtatatgtgacatgatgaccatatcattaagaagtttgaggagttccatcataggcaagacccttcagtaaattgcttgtctcactatactttggactatgtggtaatagaagaaatgtaggatctacttcacttctattcttccttgtaggcctcttgtatcgtcaccttgagaggtgttccactcaacgttattcaacttagttggctttctatttgtaattcaaatagggtggataacaatgggaggagttgagtctggttttgaggagatgttaccttggtgtatccttaagcgccctatacctttgtgtgcaattctctttgtataatggagacgtttactcttactttgatcaatatcttgtatttgtagggaagacctctcatccttgtattaaattttttataattaatatatcttttgttttttattaataaaaaaataaaaataaaaaacgtttcatgttgggttgctagtctagtctggtttttaaatcaatggtcatattttgataatctttcctccgctcctctttcgctccctctccgtctccctctctgacttctcttgtgtatcataatagctttcttatttggagatatgtaattccttagatgaatggtggactctatgtgtgcatgtgtgcttgtctatcaaaatggctatcgcatttgaacatacataattacttagaagaataaagaaaggatgactctatagagttgaagcaatttacatattaatcaatatgatttagtagatagaaaaatggttgaggtaatgttcatcaaggtttctgaagtctaggtcttctatatttaatcatacgagcttacaagaaagcacccatttgctgcaccttataaagtcgaaattaccccaattccttgctttgatcccaatgtagattatgttaagcttggtatacattgtgatccaaatcctaacaacttaagcttttaggaaagtaagttggtagcttaatatgggcaacttagtctcggattttcagcatgcttttgtggcggatagacaaattttggatgctattttgatagcaaatgaggccatagattctagaattaaaagcaatatgagaggaatcatttgcaaactaagcattgaaaaggcctatgaccatgcagattggagttttgtcctaactcctacggagaaaatgggttttgaagcgaagtggattagttggatcaaatggtgtatttttacaacatagtttgttgaaatggatccccttcaggtttcttctaaagttctaaagggtttgagacaaggagaccttttgtccccttaccttttcatcttgacaagggagactcttttttgcattcttatcagggtaaaagaaaggggttttattgacggcttcttagtaaggggtagaaatgattcaagggtggaggaatctcatttgttatttgtagacgatacccttatcctttgtgatgctagcaagaagaatctagagcacttgagctagaactttatgtggcttcaagcgatatcagggctaaagattaacttggagaaaagtgagttgatctctgatagggagttctctaacatggaggagtttgttgggttattaggttgggaaagggtgaaagaatgtttttagaaaaggctttctctatggaagagatagtatcttttaaaaaaggaaagacaaactctaataaagaacactttgtgtaatttattgattgatttcatgtccctcttcgccatctcgaagagggtagctatgagattggaaaagattcaaaggaattttctttggtctatcatttacatggaaaaacaaaaagagggcttgggcatcagaagcttatcaatccataataaggctcttttgggaaaatggtcttgaagatttgtgtaggaaaggaaccctctttagaaaagagtaagttttgggaagtacaagtaagaagaaggggggtagtgcactaaagaagagacagagtggtatgtggaaggcaatcagtggtgattgggaggtgctcaaggatagaacaggtttcaagataagctctgacatcaagttcatgttttggacgaacaagtgtggggaaacacttttaagggaatcatttttaggccttcattctatagtcgcttcaaaagatatatgggtggttgatgtttgggacaatggtagttggggtcctaggttcgctagacagttgcatgattaggagttagaggaggttgatgtgtttttaaagagattgtatgaccactccatcgatttaggctctgagggtactatggtatggttgagatcaaagaatggtaacttctcaattaagttctactacactttggctagtaggagagcagagccattccctcatgacattgtatggtgagagttagcttatttgcttgggaagcaacctaggctaggattctaaccctagatcagcttagaataagggattggaggattcctaacatgtgctatatgtgcaaagaaaaaggagaaatgggtgatcatacttttcctacattgcacaaaagcacacactttgtggcaattgattttttgctttattcggtgtatggtgggtgatgcattctttagttagggggtatctcttgttggcattggtcttttgttgggaaaaaaaaaaaaaaaaaagatatggaaggttgctttggtatgcgtgttttggactatctaaagggagagaaataggagagccttcgataattgtgaatgtttggtccaaccaatcaaaaattccttcttgaatattttttgggattggatataaataaagttgtaataagaagggaaaaccaaatcacatgcttcacttaatagaatggtacataaattttagttcccatttgtgtttttatttcattctaaaatgaaaatgtgtttgtttccttttttcaggttagtgatgatattatgaattccatgtcttctaaacttgaatgccacttgttttatatcatcagttatgcttcttaatttgacatgtatttaccaattcaattcctatcttctctgacatgatcaatcgaatttatacattttgtaggtggtat

SEQ ID NO: 11950 - DNA, 3708 bp, Vitis vinifera
  Intron number 2 from transcript GSVIVT01036977001 (locus G SVIVG01036977001) derived from phytozome v7.0 (chr-ID chr3 ; pos 9343327 to 9347034)
gtctgtgctatagaactaactaagaatttggataggtgaaaatgtgtgtgtgtgtgtgtgtgtgtggtggttgtggtctttgtatgatccatctaagcataagattgttgaagtcaccaaaataaatgctatctaggggaaatgaaaactggaggtaagggagtgggggaggagggatggggacaaggggtataaaaacaggggcaagtgactctggtttatccattttggttcccttaaccctcatgtctttaaaatattacacaggaacttgtccctcccaaataatgtgggagatcatagtaccgaagtaacgtgtgatgattaataataatgttagaaagtcttgattttacatcattatcaacaaatttgggttagaggaaggagggtggtgttcgagagtagcaaggggaggctatggtgtgggggtgtggaaagctattagaaaagaatgggagggtattcgttgcagatctcgctttattgttgggaatgggagaaaggtcaagttttggaaggactcgtggtgtaaagaccaaacattgaaagaagcattccctaacctataccggttggcggttaacaaagatgagtgggtgtcaaatgcttgggaggggagtggggagtcgggttgttggaaccctcacttctcaaggcattttaatgattgggaattggaagaggtggagagcttgttatgaaaatttcatcctttggtagtgagaagagaagtggagaatgctttgagttggaaataaagtagggatgacattttctttgttagattcctctaccgctccctcacgagggccaatagtgacccttttccttggggtcttatttggaggtcttaggctcctatgagggtgggtttttttgcttgggaagtgtcttggaagagaatttcgaccatcgactagctaaaaaaaggggggatggaatatgccgaacaggtgctacatgtgtaaagagaaagaggaaactagtgatcatttaatcttgttttgtaaaaaggctacaatgctttgcagattgattttctccctttttggtgtcttcaattaaaaggaatttgcttggcatggtgcttttgtgggtaagaggagtgagaaggcttagagggctgcccctttatgcttaatgtggaccttatggaaggaaagaaatgaaatatcattcaatgatatcgaacgattaaaccaagctttaaaacattcctttttgtatactcttgtaaattgggctagggtgtttatagaggatcatactgtctatgattgactttataaaatggctatatgtctagctaggggaaaggttttttgtcttctttgcctagttcttttggcattctaattgtatactttgtgtatactattttcaccatttctaggcgcttctaatacaacctctacttacctatataaaaaaaaagtcctgattttacatgattctctttggatcattagtaaagttcccatttctgtcttggtggattcctttcacgataacacttagaaaatggaaaacatgatgttccatgtttactattgaactggctatttctatttgaccatggttctcaatgaagcaaccgctgaacattattttgattgttttgctttgttcaaacctatatcctaaaagggtgggctttggttgacccctctctctctctctctctcatacacacatgttaaatcactttttctttctcttttcatgttgctaacctgtcttagtcaagagtaacttcaaagttattttctttttctcttagtaagtacttaaagggataaaatatcaagaatagtcaatagatcagcgtgataatatcaatacccctgtatttccattgaaaatatgtcaaaacaatgtaacagttgcgagcctgtgatttatatcagaagtcctcaatatatgattagcaagtgatatatctccagtatcggtgctatgtgcattcctggtgtttaatgtgttgagtaatcatttccctttcacaaagaactagaaacttaatttactagtctcatatctttactggacaggtggttgaattatcaatgatggattaaaagggaaatctccaatgttttagtcttgtagggtgggtaggtccaaataaaatcctcctgagagcattttctactcgatatagagaattttgaattgtgcagtattgttattttttaaattaagtcatgctagaatgttgtagaaagaggctaactatctaagatgtgaagaacttggaatgccataagaatctgattcattcaacccttagtctatcatcaagtataaatattgtggtattggaagggtgcctatctaggtaatttagctcatctcacttaccagatgaatccttttttttggtgcatgattggttgtgtattaagtttcaaagtacattgacttagatatggttttaaatgcacaggtttgtgttcctctaaaacatgccactttggaataaatcaggacctgctgtataattagtagattaagtagacaaaaaacatgatgtgatctacaggggttagtcctgttgcccaaaccctaatgggatagtgctggggataactatagtgattcaaaaaataataaataaataaaaagcacaaaaattggctttattttttatataattttaatcaaattcaactaaatttgtgacagtggaaaaccttttatatgattttgaataaaaattaaataagatatttagaacttgtactgttgtacaattgatatattgaatgagacccatcaattggtgatctctgatggtggatgaagtatcggttgaaaacatgatttcctaaatgtaatgaaggtgagtcattggttgaactttgtttgagagataattatgcataacgaatcactgtataattcagaatgcatgggttcttggtttctcttaaaacatgctctaaagagcaaaaaacatcaggatgcactatatggttagtagatcaattgtactaaaataattacatgatatgctaggatttcccctatgcatcaaacccttgtggaatcctggccagcctgggcaaaaacatttcccaagtctgtggtctatgagtttggaagtgatagtgattacagttctttgcatttggttcaaccccaaacaattaagaatcagaaaattttgcaatggatggagaaaagcttgattttttctagagggcatgttattttctagattgtattaatggagatctgactgctggtagaaaatagttggggttcatttcaaatgagaaaacattaattgggatgtcaagtagttatcattgatgattttagaaattattctttatagtgaagtcctttgccatgatgagtcatttgctttaagcttcatgattatcaatgctggtgaatcttcatggatgtgtgcatgatgtcatctggcatgttctatgaacaactttttcatcagactgggttaattctgtagatcatgtaatcactgctgatgctgtttccctcttttcccctaggatatcatgcaaatgagattctctaaaattttacttgtggtgtctagttggaataattttgaacatttgttttggatttgttgatttggtatcttgctgcatttcccccccacttttcctgctatcctttagttgcatgtaactgaggcttgcttcactcctatctcatgtaggtggtctgctg

SEQ ID NO: 11951 - DNA, 4440 bp, Vitis vinifera
  Intron number 4 from transcript GSVIVT01021259001 (locus G SVIVG01021259001) derived from phytozome v7.0 (chr-ID chr1 0; pos 3098086 to 3102525 reverse strand)
tatcaggtgcttaagcctcatcatttgtacattttcagtaatacaattgatgtaggacaaccctaggatggttgcctacactcaagggtaggtgggctagggttttatttttagggtgtaaggagaggaacaaggaataaactttatggtagagaaaattataagataagaaatagagagaaaaaagaaacaatgaagaaaagatggaaaaccttagagtctcactaaagccttgtaggagtctcacctagaagaaaaatcaatggaatctcaccattgagggttgcaatcttgcaataaaagaaagtataatattattcatcaaaatttattcctttgatttacattgattagcctatttataggcttctctaagaaatccatagtctactagaactctaataacctattatgattctaattctaattataacatccaaagtctactaggactctaataacctatcatgactcaaattctaattatattataactcaactagctaatcttaattagactccaacaaataccaatccctattcaattctaattaatattaatcctacttaaagtttacttaggtcttccttttcttccttgaataaactttaaaaggctttccctaatcaattctccccggcttgaaagaactcggctccgacgagttagacgcttgatacaactcataaagatcggggttaagcttatgaaaatccgttgtcgtactccatgtattctcagagtgtggtttgcctcgccattttaacaaaaaattttggtatccaccttgtcgagtagacacaagttgatcatcaagaacatactcgatctcaagatgtgggctaagagggttcaccatcttggatttgatttcttcaaatgccttgttggccgccttggtccaaataaataaattaggtttcatgcattcagtaattggggccataatggagttgaaatttcgaataaatcgtcgatagaatgtagtcattccatggaagcttcgcacctcatggatatttgttggtactggccaatcaacaatagctttgatcttctccggatctgtttcaacacccttagaagacacaacaaagccaagaaatacaacactagggctcatgaaagtacattttttcaaattaatgtaaaactttttagccctaagagtgcgcattacttgcttcaagtgttcctcatgatcttcacaaaatcgactataaataagaatatcatcaaaatagacaacaacaaaccgtccaataaaaggttttaatacctgcgtcataatccgcatgaaggtacttggagcattggttagtccaaacgacatgactaaccactcatacaatccatccttagttttgaaagatgtgtttcattcatcccctagtctaatacgtatttgatgatatccacttcttagatcagtctttgagaagattactgatccaaccatcatatctagcatgtcatcaagtcttggaattggaaatcgatacttgattgtgattttgttgattgcacgactatccacacacatccgccatgatccatccttctttggtgttagtagggcaggaactccacaaggacttaggctttcacgaataaagcctttagtaagtaattcatcaacttgccttttcaattcagcatgctttgttggattcattctgtaggttggtaaatttagtaatgatgcaccgggaatcaaatcaatggcatgttgtacgttacgcataggagggagttcattaggtaactttgcaagccacaagtcagaaaagtcatcaaggattttacgtgcgtttattggatattccttatcttgttctttaaattcttccactttccgagccattaaagcaaaaataactttagtttccttgctctcattttcaaattgacacatagtaagtaccttttttggttatgcattctcatctgacttcttacttggagggacttctttcattggatgaaggatcttcttacgtccgttgtgtatgagagcatatgtattttcatagccgtcatgttgaacttttttatcaaagagccaaggtcttccaagtaaaatatgacttactttaatgggtaagacctcacaccatacaaactcttcaaagtccttaccaaaaaggaatgttactaaacaacgaaaacttaccgggataaaggtgtcattaacccatgctactctgaatggatttggatgtctctctgttttaaggtttagcttctcaacaagttcttgtgaggctatgttcaaattgttacctccatcaatgatcatggtgcataatctcccttggcaagaaatacgtgtttggaaaatgctagtacgtcgccaatcttcttctccttttacttttggaacggttaataaaggtcgtactacaagactatgtccttccgtcataccatcatagtcacattcttcactaacttcatcttcattgtaggtctcttcttcctttgggtaactttccaattcagattctggttcttcaacacaaaagtgtaaacttttggttgggcatacaacagcataatgaccatgtccaccacacttaaagcataaaggagtcacgtctacttttctatctccattactcattgaatttttacccttattaccattcttataagtcacattcgaagtttgttgagtgttgctcccaccattcacatgattagaagttctgaagtttgtagtgcttaaaggtttgcttgttgtcctgttggagaaagggctcccaatttgtgaacttggacgcctggaaactcgaaatttgaggcctttttctattttgagggctagttgataaacgtcatctacggtataagtgtgtgtagctatcatctcaagttgaatcttcattcgaagtccagctttgtagcgggctgcaagttgagcatcactttcccgcacttgatttcaaatgctcaattcatgaaattcttctgtatattcttcaacgaacttggtacattgtttaagggaaaacaattttgtatacataacttgttcataatcagttgggagaaagtgctccttcatcttcaacttcatctcgtcccatgtgtcaataggcggttggccagttctatgaacttgattctcaatattatgccaccatagacgtgctgctcctttcaactttgcctttacaaaacgaacttttctattttcgggcattgcataccaatcaaagtaatcttccattgacataattcaatcaagaaaagctgttggatttagttttccataaaattcagcaacttcaagacgtaccttttttgtcacatcatcacctagctcaaaaagtttggcccttctttgattcaccatcataaaattgtcttgttcttcgcgtgatcgacttggcgactgtctaaattgatgacttgcgatctcctcttcaattggtcgtttttcttagctcttttctaataacttcatgatctcatcaagtttgctatttagttgtattatagcatcttgatgggattgttgtgtggctgaaattttctctaagtgtattgtagcgccatcttgattgctagaagtttttttaaaactcatgctttcataagttgctccgctccttaattgcatatgccttcatgccaagaactttggctctgataccaaaattgatgtaggacaaccctaggatggttgcctacactcaagggtaagtgggctagggttttatttttagggtgtaaggagaggaacaaggaataaactttatggtagagaaaattataagataagaaatagagagaaagaagaaacaatgaagaaaagatggaaaaccttagagtctcactaaggccttctaggagtttcacctagaagaaaaatcaatggagtctcaccattgagggttgcaatcttgcaataaaagaaagtataatattattcatcaaaattcattcctttgatttacattgattagcctatttataggtttctttaagaaatccaaagtctactagaactctaataacctattatgattctaattctaattataacatccaaaatttactaggactctaataacctatcatgactcaaattctaattatattataactcaattagctaatcttaattagactccaacaaataccaatccccattcaattctaattaatattaatcctacttaaagtttacttaggtcttccttttcttccttgaataaactttaaaaggttttctcccatcaacaatagaacacagttccactcctcatggagtaagaaagcaagatacacacaaacgccatcctatctcaacaatgaatgtttgttggtagatcacacaaccactagaagtgcagctttctggggttctcttgcttttacgttattctcctcaatgtaatcgactctgatttgatttttggatggtaggtcct

SEQ ID NO: 11952 - DNA, 2212 bp, Vitis vinifera
  Intron number 10 from transcript GSVIVT01001690001 (locus GSVIVG01001690001) derived from phytozome v7.0 (chr-ID chr 18; pos 14303683 to 14305894 reverse strand)
ctgtacaaggtctccacatttgtgcatagtaactggtatagagctctaccgaaattaaacaatttggcatcatcttatatagttgtatttttgagatttcttttggagttttattgagatttgcagtctcttcaattcaacctttctgctagattctgctaatttgattatgtttagcaagtagtgtgatggctctaatattaatatgtgagatgcatattttgtttaattatgataaatattcttagtgtaaaacatatgcatttggttggttgagaataaaaaataggtctacatagagttaattttaattatattctttacctaagatgttatttttagtggttttgtataatttacttatgcttttgatttaaacatgaagcttgatattgttaatgccactaaaccctaactttagtattagctttattatatgttttatttttaaaaaccattttagtgatttagttaggattttaaatgtttatgtaaaaagaaaaatcattttagtgaattatgaggtaataccaattatggcatcacagagtaatgcataaatttgtgattgtattaataactctagtggaccgtattttgttatattattttttttatcagaaaaaaggatatattaattatggataaagagtacaagagaaggtgaggggtcctccccacaaaatacaagaatttgaatgactaaaattcctccactatacaaaaaatttagtccactaaaggctatacatcaattccaaacaattgttgtccaatcatgttgaattacaaactgaacgccaattgagctaaataacattgaaaggagtgcttttaaatgtaatagtacaagaggcctagaaggaggaataaaagtgaactaaatcccacatcatctctactgtcctccacttttcctcaaagattctagcatttctctctcaccacatgatccaaggcaatgtgaggtaagtaatttgccaaagggtcttgcctctaatggaacttcccaatcctttataagaaatggtcatgatgtcacatctactcttaggcagaacctcaatgcatcttggctagatcaagtaacttgtgtcatagtgtaacttttcgctcccaaccgtgtagatattgtttactttggacccaaagagcccttaagactttaaaatgcgtctacatggttaagagaaacccgtacatatataatgctagaaactttttcctctatttaatgttggatattacaatcaccacctcatgtagacatgacatccttatcgtgtcccataggataacagggccaaacaaacaaataaccctctaaacaagctcccatactagggttaaggattgattctaatacatttttaatgacttgctcccagtcatatagatgttgttcgtactagacctaaatgaccttcacggctttaaaacgcatttacatgattaagaggagcacatacttatattatactagaaattttttcccctacatgatgtggggtatcacacatagccctaaagttgttggtcaatgtagaaagagatggtcaatctactctccattctccatacataagatgcaccaatcaagactagaggatttgtaagttcgtattttgttatgttattaattccacatttatctgcatttaagtttagaagaagtagaaactcgataatatttatttattgttgacagtggtctgcaacccaataaaaaattcaatgcccgtagaagatatataggtagaaaaaaagatcagtattaaatattaaaaaatgattttttttttatggtcaggactgaaatacatgtatccttgtgttctaaaaatttctgtagctcaaaaattttctgaagccctaactgatcaatatgtttcaagttatttggcattttttgttggctaggacttgtagttttttattttttattatttccttaaattattgtcctgtgttacttctacaatttggtatgtttgctgaatacatgcgctatggtttttatacacactatatttctaggaattatggtgtattttcatgttgtttatgctatcacatgttttagagaagttctattcattatctgtttctataacattggcaattatttaaacatatttgcttttatttttatttgtttcctttccatcgattttttttttcactcaaactatttttcatgcttgcagagtat

SEQ ID NO: 11953 - DNA, 8183 bp, Vitis vinifera
  Intron number 2 from transcript GSVIVT01011617001 (locus G SVIVG01011617001) derived from phytozome v7.0 (chr-ID chr1 ; pos 5922779 to 5930961)
gcaccgcaggtgaaagagatcgatacgagaaatcggtatgctgtcttttttgtttttgtacatttggtttgggatttctggttacttattgaaaacttagaagatttgccctctatatagtcatatttagcttgtctgaccaatgctagtctcaatagtttgcttggtactgtctgctagttacaagactaatgtctccgcgaaatggacgtttagttcactttttatttttattttatgtcatcatccaaaattgaccagattccaacttcttttatttcgttgggctgggtggaaatgacagcttaatttaaaaaccttgaatcttgttataagagaaatgcaagaactcatttatttcttttactttttgtcaaattagtaaaaataattacagaatggctggaaaatcccctttcctcccattttggctgaatttcaggtactacaatttaaacttgatttaattgggtgccttgtgcgagtttgaatttggctgtctgtatgccaccagttgctttgtattaaaaccatagttataaagtaggcataaataggcacgtgaagaactttttggatttgtatgcaatttttttttccattttttttggggaaaaataacattcaacaaaattttcttgttgttgatcaatcccaactatttatatgggcagtgggtctgatgagctgtgagcagtgattaggatatgtgtgtgaaactgatcttaactgctaatcatgttcaaactgtattctgcattgtttttacctgagtataattctcaggagattcccacagctaccagtgaagttccagttcgctgggttgtctaccatcttcattaagtaggacaacaagtgggggcatcaaatcatggatgtttctgctacaacaaatcatacattctatagaggagaagttgatttgtaaaagaagggaattcctcagaaatgtccatattgctattttcaattcaaaattgttgattgttttgagatcgtagttttagtaggaatgtcatagaaacagatatttgattaggctggtgttggcttttagagctttctactcttttctggtctcaggggggttcaaaggctttccttactagagttgtttggaatccatgggtcccaacaagagttgttttttttgtgcatgggaagcagcttaggaaaggatcctgacattagattggttgaagagggtgggggatgttttgaaaggataaaggcagtcttgaggcattttacataaatgacgtgaggcataagcctcgaggttgaacaaggcagaagcctcaacttaaacaaataaataataaaaaattatcaaaaaataaaaacatactcataaagtcacaaaaaaattgaagaataaaaaagacttaagcttcataattataaaattaataatatactatactattgtttgttataaaaaaattaattatttttcattgttaataattctaatttagttactttttccaacataaaatttagccatctctcatggttttacaaaatagttttcaatattactgatgctatcactagggtcctccaaggaatataatcatatccaattttttatattatcctccccaatagtgttaatatctacccattcttctttttagtctaccaattgtagtggtatcgttttttatctatcaataattagattatatatgagatcaaccactaggacaatcaacaattctcttattcttctcaatctctctttttcgcttctatttaaaatgttaattgaaagttaagtaaatcctcattttgtaaaaggtttaaccaagtatggaccgaactaaattcaggaaatttatattagaagtccccaaaagcaatagatgatagaacccgttaaaactcattaaatattgaaatttaagcctcttataaaatatataagaagagcccataaaggtcgaaaaccgtttgaatatatgtggcttagccctcaacagcttcgcggagaaaatcaaagagtggtggtagtcttataatttcaggggtagccctagctttgtgctctctagaaaattacaggctttgaaaagtgatatgaagaagtggaataaataggtgttcgggaatgtctcagctaggaaggattcggctctggagttgataaactattgggatagtatagaaaaattaagacccctgtttgaagaagataagataagccagagaaatgccaaagatgagtacagtcacctagctattttagaagaaacttcttggaggcaaaagtcaagggcgctttggctgaaggaaggagataacaatacggaaatgtttaaggaacctcaagtaagaagacctgatatggcaactgaactcttcaagagcattgactcaacggacagaggtcttagagggcccttttttggaggaggaagtgacctcagctctagcagatttgggaggtgacaaaagccctgggctagacgggttttctttggctttttggaaattttgttggcctacaatgggtagagaagtgatgcagtcttctgaggagtttcatgtgcagaattccatgactcatagtcttaatgcaacattcttagttctcatctctaagaaagaaggggtaggtgacgtgaaggactttagaccaattagcctactagggagcctttataaacttctttcaaaagtcctaactaacagattgaaaagggtgatgggcaaagtggtgtcaaatagtcagaatgctttttgtggggggtagacaaatcttggatgctgttttgattgcaaatgaggcggttgattcaaggaagggtagctctgatgcgggtttagtttgcaaattggatatagaaaagacttatgatcacgttagctggaagtttcttctttcagtcttagaaaaatgggttttggccccaagtggagacagtggattcacttctgcatttctgtgtgagaatggcggttttggttaatggtagccccacagattttttcctgacctctagagagctatggcaaggggaccctctttcaccctatctttgtgttggtgatggaggctctaggcaatttaattgctaaggctgatcaaagagggtttattaggggcttcaagattgagggcagaggggaaattgagaatcaagtttcacaccttttgtttgttgatgatacccttttttttcgtgacgatgatgtagagcagctgaattttttttttttttttttgataaatgagcgcaaaatatattaaaaaagcccagaaggtcgcaccgcatacaggtagtatacaaagtagccacaaggccaaaagcgcaaaaataggaacacctcaccagcctttagggagctgctaaccactccaagaagcctaaaagcgaagaggactcctctcccctatacaccttagcccaactccataaattacaaacaaaagaattcttgagagcctgaatagccaaagagccccctctaaaagctaaccaatttctttccttccaaaccgtccaaaaaatatacaacggaatggaattccatatctttttcctttttttacccacaaaagggccccttcaacagaataacgcctctttgaccgtttctggaaacacccactgaaccccaaataaggcaaagacgatctcccacagggccctgaccactgtacagtgtaaaagaatgtgatttacattttcctcttcacaactacacaaaaaacaatgattagggagctgccacccccgcttttgtagcctatccaacatgaggattttttcccaagtagcctcccacgcaaagaaaacaactttggttgggaccttatccacccaaatgtttttttttggaaaaatgaggggattgggggttgccagcagattataagccacccgaatccgaaaaatatcaagaccccctcctttccataacactgagtcctcctctgagaatatcctgaagtcccttagcaaaagaagcaactcttctattaacaccagctcccagtcattagaatctctagacaatttgagattccaccctccttgaccaaggcttgggtcccacacctcattcaccgtcgcgttactacaaaccgccaaggcataaagctggggaaacgcttgggactgtgctgcgttgccgcaccaaaggtcagtctagaacataaccttagtccccctccccaccctgaactccatgttatcccaacaccagcttgtctccttcaatatctccttccaaactcccactccaaaaggaccacggacttcattagatctccaaccacatccctccataccatacttcaccccgattagagcagctgaatttttggaaatggattatcatgtgttttgaattggtgtcagacttgaaaataaatttgcaaaaaaatgaagttattcctataggggagacagtggatgtgaatagagcaacttttctttttgggtgcagagtaggaaagcttcccacatcttatctaggattaccccttggggcccttaataagcattgtggtgtttgggactcaattgaggaaaggtttaaaaggaaattagttgtttggaaaaaacactacctttccaaaggaggaagacttgtccttttaaagagcactctttcaaatctccttatttattttatgtccctctttgttattcctagaaaagtgagaattagattagagagaattcaaagagactttttatggggagctttgggagaaaggagcaagatccacttggtaaaatggtcaaatgtgtgtaaggctaaaaattttggaggcttggggataagaagattgcatagtctcaatcaagctttgctaggcaaatggctatggagattctttgttgagtgtgaaagtttgtggaagaagatcatttgtggaaagttcgaggaggtggagaggggttggactactagagtgtggaaggagtcctttgggatggccctttggaaggacattagaaaagggtgggaagagtttaatgctagaacttctattcgtataggaaatggtaaccgtacaagcttttggtggggcatttaggcgggagacttcaagctaaaagatgtttaccctactatttttaggataacatcccataaaaatgctacagttgcaaaatcttggaaaagagaaggggatgaaggggggtgttaggaggttcattttagaagacccttccaagattgggaggtatagtaggtgactcgctttttgggttctcttgacctgttaaaagtgcaagaaggtgaggacactttatgttggaaagaagataggagaggattgttcagtgtcaagccttattattgttctctaagtggggagactaattttgtttttcctgggaaggagttttggggatcccgtgctcctctcaaaatttgcttttttgcttgggaagctgtttgggggaagatcctaactgtagacaccttaatgaagaggggatgacaaatggtcaataaatgtaatctttgtaaagagagtgaagaatcgaccgatcacattctgattcgttgcgctaagacaagagagctttgaatctttttattagccctctttgaggtgacttaggtatttccagattcagtaagaagtttcctccttcaatggaaagttaaggggtttcaaaagaagaatagagtagttttgcgcttggctcctatttgcttattttggtgtgtttggaaagagcgtaatcgaagaaccttcaaagatgaagaactcttttactagggtttaaaggatctcttctttcagactctttttgagtggacaagggattctttggagttggatttcccctccatgttgattttcctagatactctttgttgtggttaaccttgctttgttttgtttgtgtggtctttctttgtttgaggtgtgtttggcttgtttttgtgtatatagcctgtatacgtaaggcgcaccccttccttttttggtgcttattattgcatgttcttgttgtctataaaaaaaaaaaaaagcctcaaagctataagccttgtcgggatgaggcttaaccctcaattaccctagctgaggctataactgcaaggctaatttgtagaacctcgccttgaggcaagtctcggggcataagcctcaatggccttttaaaacatgggtaaatagatgctttatgtgtaaaaaggaggaagacttcatcgacgatatgtttcttcattgtgttataattggtttccgttgacaattggtttttttccttatttgggtcacagtgggtgatgcattcttcaattaggttgatgttgctaagttggaatggggctcaagtagggaaaaggcagaagaaagcttggttagctgccccattgtgtcttttctagaccatttggcgtgaaagaaatcggagggcatttgaagatgtggaattatcatatcaattgctaaaatcctcttttttgcttttctttttgaattacgttaggcaccatatagaaggaaagcatcaattttattgattggttagaagctaagtaattgttgggcaggttattttctttgtttgccacctttcttggtcattttcgcttggttctctttgaatactcctagtgtacttttaagcttttctgttttgtaccacccttctctctctctctctctatatatatatatatatatatatatatatttatattcttgttgcttatcaaaaaaaaaaaaaaaaaaaaggaaaaaagaaacagatatttgattaggaggaaaacttattttgatttaatattaatggaaataaccatactcatggatgaggtttggacagcaagttagtttagaagggtaacaagttcattgaattttgtaagcttgaactaatgaaacatttgatttgaagactaggagtttcttttcctttttattcttcattttcttttttcttcctttctctctttcccttatttatttgacatttgattatcagcagttgatgctgaggctttctattctcattgtagttcttaatttgaattgtggatagtgattgaagagtgcacttgtgtggagtgagtttatgctgtgcattagctctgggaggggcttccttgactgggagcaagagcttacagggtccttgttgcagcttttaaatgcaatgcacattcatagtgtgtaaaggccagattgctatggatggcgtcttatagaagggcttgttcttagttcatactataggattttggctttcagccaatctcctcttttccaggcaaggagatttgaggttctaaagtgccatctaaagttagcttctttacatgaaggctggcttgggagaaaatcctaatggctgatcaacttatgagatgtgtctggaatatggttcacagatgctgtttgtacaaacaaagggaagaaactgtaaaccatgtccttattattatggtgtgccttttaatttgtggtctttggttttcttccattttagggtgtattggctctattaaggatgggtagagattttttactgtgtttgcatgatagattcaaagaaaagagttgcaaaggaatatggaagatggctccattatatttgttttggacaatatggaaagaaaagaatagaagatcttttttaatggtttagagtagttgattttagttgtaaagaaagcaattccttactaatttttatttatttatttatttttggtctgaactttctgtgatgaatatacacatatttgttgatagtgtgccttgcaacttgtgtgcttgggtcaggtcccctttttgtttggtagtctttgtaaacatatgctatttcttatttgcgtatcaagggggaaaaacgatagccagctctttagccttttgggtgcatgtcagaattctattgtggtttttggactaaactgccttgacataaacaaaccttgttagcctcgctatagtggtctatcctaaattattccaaatattttatgcacccaaattaaaaggttaactcatttgatctcctgaatgagatcaataaaatataactagatcaactcattgcctctctccatggttgttgaaaagcaagtgcattccagtttctatactttttttttcttttgcgtttatatatgtgattctgaaagtaattaagcacttcctggtgatgtgcagatttacaaagctcaaagga

SEQ ID NO: 11954 - DNA, 4638 bp, Vitis vinifera
  Intron number 1 from transcript GSVIVT01014537001 (locus G SVIVG01014537001) derived from phytozome v7.0 (chr-ID chr1 9; pos 4938777 to 4943414 reverse strand)
aaggaagtcaataggtgcattcaaggtataagctaatcccttgtccattttaagaggtatagaaaataaaattttagacattcaatccattggtaaatggaccccttatttatgtccactgttacttttgtacatggaggttggtgttctcttaagtcatacaaatcacacagataatcaattcaagggaccacaccgcctaataatatagactacacattcaaagaaaagaattgtttctagagctatggcctaccaataggaaactagattgatcgtgatgtttgagggaaactttgtcaaatcttacggggaaaaaaaacagaaaagacgaggagacttagaaaacacctattgattgatgctcttacaacatttgtagttatcttctcctatgtattctcccttttaagaatctccatggtagtagacaccataattgtaaatcaactcattagagacgtgaaagactaccactttagctagtgggagctttgaaataggtttcttcagtccaagtaattccaagaaccgatacttagggatattatacaagaaagcctctaataagcctatggcatgggttgccaatagagaaagtccactaaagcattcatcaggagttttaaaggtcactcatttgggaattcttgttgttatcaagtgtacttatccaattctttggaatactaattcatcatgttttgcacaagatccaaaagctcaaattttggaatttggaaatcttgttatgaaaaatgacaatgatttcgattaagcagtacaaagcttgatcggttactaagggatttttttaataggattgtgaagtagtttaggtcacgcccgtttccgtgttttcgatttttgacaaactctcgatttttttgtagttgcattatgagtttgtgagggaatattagaagttattaatatatttagttattatatttggttactatatatttatttagttattatatatttatttatttagttattatatctcttatttatttagttattatattagattttttttttaaaaaaaaaattttagaagtaagagtaagttagtttttattttcttttattaaatctatttaaattttaacggtgttgcatctattttcaagagaattcataatgagaaatcttagattttcttttcttttcactctttttctctttgaatttttaaagttccacaaggcctttcaaaatgtgagtgaatggaaagactacttcactgaatcatcagatgagtgacaggttgtaaagtaatccggtatgaaactcccagacaggcagaactcctggtttaatcaaagtatgaacctcaagggtgttgggtggggctcaaacatctgctcttatactccttatgctaattcagatataaacaagtggatgtttgacctggtctactgatttgattttggtagatatagctgaaaatgggcaagagctttatataaggatggctgcatcagaattaggtgccttacataagaaaagtaaatttgacataaaacttcaaggagggaaacagtttcttttatataaagtatatacctattatctgaagtgtagcactggtccacataaaacttcaacatgttgttttagctttcaattacagttaaatatattgtataatgcatgcatgagcatgcctcttgagtctaggcctgttaggatgtttagcacaggagataagatgttgagagtgcaaaacagagcagaacataggagataacatcacggcatgagagaaatacaactcacctctgtttgttctctctctcttttcctttatatagagaggattacaaattggttggagactcccactgattctatttttcatctaattctaaagctaacctcaactaactatggaactgttaaagttagcctcaactaactctgaaactaattttgttatggaacattctgcctaatacgccacctcaagtgaaatggggacaccttcacattgagctcaaccttaaggacaatgagctgggatacagacaagggctttgttagaatagcagctacctgatgttttgtaggtacatactgaatatctaactctttctgcagcactttgtcacatacaaaatggacatctacttcaatgtgtttggcgcgtgcatgtgcaactaggtttgcagcaatgcaagctaccccaatgctatcacactagattacaggacatgtagaactaggcacttgtaggtcttttagtaaggcttgtaaccaggtcacctctgttgccgcatgagccaatgctttgtagagtgttggatcttgcaacatccttttgcttgggtgaactccatgaacaatgctaggaccaagaaaaacatagaagccattagtggacctttgatcattgacacaactggcccaatcagtatctgagaagctagtgagactgaatccagatgctgattgaatgtgcaggccatgatcaatattcccatgcaagtatctagaactcatttacaagctttcctatacatatcagtgggacaatgtaaaaattgacttaatttatttacaatgtaagatatttctagtcgagtgattgtgacatattgtaatgtccctacagtgttgtgatacaacttctcattgaacttaggtccagtagaactagatagccataggtccataactgctagtgtagggcaacttttggcttgttccatgttacttcgttttaacttacaagtcaattatatacttggaccgagttagataaagtcctgtggaatcccaaaacacaaagctcccaagtcctttagtgaaaaggatctgtgatgctctaattatgatgtgtgcgagttgttaagtgattgagatccttcttccctcttggcaatgtatgagctatttgttgattgagaggattcttcccgggatgattctttccttatatccatagccctaagggattacaagaagtcattgaagctcaacgagccttgggacttgtgagaaaacaaagtagtccccggagagcataaccgacttccatgcaggtctcgccgactgtggtgactttgctcaaagcttgattccaatatataaggtgtaaacaagtctgtacacccatataaatttgagtcaaatggtaacaagtcgcgtggggagaattccaaatttagagaaaaaaaagtaatgagaatccaaatcacagtagcctgctggcgtgtcatttcggatggttagtcagtccaaaagtcttcctagcacaccctgacaaggcgtgaaagttactcgtcactagttgacgcttaatcagaaactggaccacctgaatatcccctgtgtttttttttttttttcaatcctatcagtggctgtaagttgtaactgacatgtcctgtaaacttggcaaggaaagagagttgatacatctgttcttggtctttacttcaacttgtaacgcttctaaagaagaggtgagattggtcatgcactgttgtaatctgggatattcgatcaaaaggaataaactaatccctattccattttaagaggtatagaaaatcaaatttggatgcaggagaagatgatgaccaatggatggttagtccaatgatggatgttcgaagtcaaacaaatgaaaccacacaccgctgaataccaagaaagaaatggaatgaatatatttatggagttgcggctgaccattgaagaatgacattgactttgacatatgaagcaggttaggccaattcttacataggggaaaggaaactatagggagacttggaaagcacctaaaatctcaggcattcttcatctaggaacaactatggattctcttacaacagtcgtattcatcttctccaatgtattttccctcttaagaatctccactgcagtagacaccataactgtaaatcaacacattagagatggagagaccatcacttcagcgggtgggacctttgaattgggtttcttcagtccaggtaattctgagaatcgatacttggggatatggtacaagaaagcgtctacgaagcctgtggtatgggttgccaacagagagagtccactaactgattcatcaggagttttgagggtcactcatcagggaattcttgttgttgtcaacggtattaatagaattctttggaattctaattcatctcgttctgcacagaatccaaatgctcagcttttggaatctggaaatcttgttatgaaaaatggcaatgacagtgacccagaaaacttcctatggcagagttttgattatccatgcgatactcttctaccaggcatgaagcttggaagaaacacagtaacaggcctggattggtacctgtcatcatggaagagtgctgatgacccttctaaaggtaattttacttatgggattgatcctagtggacttccacaactggttttgaggaatggtttagctgtaaagtttcgtgctggaccatggaatggtattcgattgagtgggttacctcaattaaccaaaaaccctgtttatacatatgattatgttgctaatggaaaggagatatatattatttattatcttgttaaaagctctattattatgaggcttgtgttaactcctgaaggtaaagcacagaggttcac

SEQ ID NO: 11955 - DNA, 12438 bp, Vitis vinifera
  Intron number 6 from transcript GSVIVT01027390001 (locus G SVIVG01027390001) derived from phytozome v7.0 (chr-ID chr1 3; pos 15376409 to 15388846 reverse strand)
gcttactcggaggtatgtctctcacttagcttcagattctggaacatttcttaatctacagtttctgattgataatggattcacaaaataaatctctagtttggagcccattacttgattgtgtatgttgtccgcatgcatacaaacaattactgaataaatagaatattagacattttttttctttttgatgcgaaaactctccctctggcctaactagaaaatgttgtggaatgagggattggtggagctgctactgctgttggaatactcctttggttgatttgcatgttactcttttcttggataatttcactcaatttaacttggcctttgactaaatagtttgggttgggaggacctttcaccatctacttttcttgtttctatattttcatgcttaggtgaccctatttgggctcgttataatctaaatgtttgcacacatccatccatagatgcttttcctttttctgtaaatttagctgagagtgctctgtgtatgctgccctacaacccatacaggttgaggaatcaaacaagcttgtgatttgattcctgagaacaatgtattactatattgtgcagtacagcccactgctttgcaggcttcatttagctaatatcatattcttttaacttcttgttagtccgggcttgtgaagtgagattgggctattttcatttgcttattgtgactgtttggtgaaccctgacacagaggtgtccaatgtttaccaagccataacgggccaacgtgccgggccaacacagcccactttaaaatcgtgccggcccggccaggcccacgcatgctaaataggtgccccaacacggcccataagcttgcaagccaatcgtgccaggctatgttgtgtcgtgccgtgtcggtgggccattcactttgttaaaatttttaattaaatttttttagtcattttgtcttacatttttttcattatgaaatgaaatttctttaaacaactctaataattataatttttattttcatatatttatatttattgagtatgtaattgtaaaatttatagaaatatttacttaaaaaaattatatttcaattggtttttcgttttaatcaaaataacaataaatttaaaataatggaatataaaaggaaatgaaatataaaaaaaataattcttttattcaatatttcaacaaattacatgaaaaaataggaagaaaataaaggtgagaattgcatcactatagtttgagtacatcccaactaggttgacacccacccaactatcaattatatgctttactcaacctttaaaaattaactacatttaatatatttaaaagaaacgaacaacatattcacttttgtcttcttattcgatcttcattcttcttttttcatcttcattcttcatcttcaatcgtcatcaatctcttgaacatcattgtttgtgttgagatccaatttcttgaggtcttttttaagttcatcttccaaagtttggagtcttatgcgttcatcttcccaatccttcaaacatatcaaagtttttagcatctctgctgcgagagttgtcctcctgtctcttattatatttgcagctatagaaaaagcatattgcaatggtacagtagacaccgatagggttagtagatcacgtgccattttagatagcataggaaaagtgaattcatgagatttccaccacttcataatatcaatattttttacttcattaggggataggtatgaacgataatcagtatctaaatattttgaaagatcacacctacttgaaggaccaacttgtcgctttcccttagctaattgcataaagaatgaatcatttccaaatgtcgatggagttatagtacttgaagaggcactaccatatttattctcataatatttatataagttgtttaattgttcgtatatcttacactttggtttagatggttggttcatactagtagctatgaaatttaaaatattttctacaccttcaaccttagcccttggatccatataatcagttaaacaataaagtggtggaatggttttccaatatttcaaaaaaaaaaaaaaatccatttgtacgcatatttcactaaaagggggatattccatatactgttgaaacacattactcgtgttgcaaatacatctaagtgctttacaagatgtaagagtatatacaatagaatatatgttagtagtatcataaaaaaccttctaaagaatttttaaaaagaaaaacctttgacccaattatccgaagttattttaatttcacctgtcttactattgacataatctgatagtacattatgatatcctacacaagattttaacattaggtaggtagaattccaacgatgaaagaaatcatgatggaattttctctttacataaaacataaaattcttgtaatttgccagatgaatcaagaaatcgtaaagtagatcgaatagcctccaataagagtgatattaattttaaaccatcttgtactattaaattaattatatgacaaacacatctcacatgaaatacttcacttagtgggccttctctaactgttcttataaataaatttatgacacttttattgtttgaagcattattaaaggtaatactaaaaattttgctttgtatgccatattctctgaatacacttgtcaaataatcatatatgataggtccatcacgaggatgaaatatttcacgaaagcctaatatacattttcttatttaatttccaatttgaatttgtataatgtgctatcacacatgtaaaagggtcattatgttgattagtccatatatctaaggtcacaattacaataccactatgattattaaactcttcaattattattatttttttcttttttgtagcatttaattacatcattatgaggagtagtcctaggaattctatgaaatacaattcttggatcttcaccaaatgtcaatggaaggcacacactagctactattccagctaacctttctctcatgaattcttgattgtatataaaaggggacattgaagatgtactagatcctatttcaatttgacttatttgggattgcctagggtctaatgcaccatgttttttggtacattgttcagcatgtcttcgaaagtgacctatgccaccactagctttgtaactatatgcttttttacaatatttatattctgctagattttctacctctccttttgtattttgtctatttattatagtgaagtgattccaactatagatgtgtgtctactagccctaagtcttttacctatgggattgtgttggggacggttagagggagggacactagagggggtggggatctcctcatcttcaaaaggattaaattcattacattcatcagtactaaagtcaaggttttcaagatctaggtgacgaggatccatttttaattttagaagaaaaaaataaggtaaaaggaagagaacaattaaaagaaatttagaattaaaataaataaatgaaataattggatataaatacctcaaccttgtgaattgtgatgatgaccacttgtagagttcgtagatagcacaaaataacttgtaactaatcgaaacttatggatagtagataacttaaagccttgaattggagcacttgtagagaatttaaacttagaagattgtagtaagagagattagagagaataaagatttgtggagaaataaataatatgaggggtatttatagagaataattggtgaatcatttacttttttacccttaaaaccatagttgtgaaaggcgcgacgccaccctccggcgcctcgcttgaaggtaggcgacttcccttcacgaaggcaccgcttaggcgtgcaaggcgtgacgcggtccacaggtgcgcctcgatcccctacttcttcttcttctttttcttctcattctcttcttctccagcatcaggttgcaaagggcattgagaagccctaatttctttttttattttttgggaccaaaacgacgtcgctttgaccttttttattttgaaaagaataggctaaaacaacgccgttttggccctgttttctcttccaaccccattttctggttgttttcaacttgacaactctcccaaattttgccatagcttcaatcgtgtagtggagaagtgaagaagacgaagaagaggaggaaaaataagagaaaaatatatgtaaattagggtgcgcctcgcttcactaaagcacgcaccttaatgcgccatgcgcctcaggctctaggactactttgcgccttgatgtgccttgagccttttaaaactatgcctcaaactagttgttataaagttgttgatagggatattattgatatttgatataaaaatattaataatgagtaatttacttatttatcctttaaactaatcgttacatagttgttaggagggtaatatagacatttgacatgacaaaagtacaaaataactattgatttacttttttacccctcaaactagttgttatatagttgttgagagggatattatagacatttaacatgtaataaaaaaggaaaaagtagaaagtaaaaaaatgatattttgaaagggccaagtgggctagcaaggtggaccagcacgacttgcagcagagtaggctggcacagtggcacgtcaggccatcttcttaggcctaacatgacccgctcatttggactgtgtcgacccatctcactacaatattcgggccgtgccgaggcatgagccaaaatgggcggtccaacccattggatatctctacctttacatgcttataagcatttactttctacgcataatagagaataaaaagggatattctttttattaaacaattatgaaattacatgggaataactaggctaaggtttgaatattaactgtgtaacaaaaaaaactacaaatctaggacctaacaactttaaccttatctgaaattccaaatttgattaatataatcaaatcagatttatttgaaaataaaataagaactttaacaaacgatcctaatatttctacactcccccttaagttggcgcatagatgtttatcatgtctaacttgttgactagagtttcgaaccctggtgtagaaagactcttagttagaacatctgctatctattgtcgtgtggtgatgaatgacatacaaataatgccactttcaagtttctctttaataaaatgtctactaatctcaacatgcttcacatgattgcattgaataggattgtttgttatgctaattgttgtcttattgtcacaaaacaatttcataagatgttctaaatttaatttaagctcttcaagaattcttttcaaccacaatatctcacacactccattgccataaccctgaactctgcctctacaccactttttgttaccacattttgctttttgcttctccatatgtaacgagattgcctaaagaaagacataataaccaaaagttgatttttattatgactgaacctccctagtctgcatctgtaaatacttctacacttctttgatcacttttctttaacaatacacattttttgggtgtactctttaaatatcttaggatcttgtacacggcttcaagatgttccttgtatggtgagttcataaaatggctcacaacattgattgcaaatgctatgttgggccttgtgtgtggaaggtaaattaacttccctacaagctgttgttgccttctaatttcaactggcattccctcgattgtttctctaaacttgaggtttggatttgttggggtgttgcttggtttgtaccctcagttgcttggtttctctaacgtaaattaacatactttctttgtgacaatgattcccttttttgatcttgcgacttccattcccaaaaaatattgtagggaccccaagcctttaatctcaaattcagttgcaaggaatttcttcaatcttgttatctcgacttcatcacttctaataaggatgatgtcatctacatacacgttcaaattggttatcctcctccaatatacttcatgaacattgtctgatccatttgtccttgactctagccttgatttttgaccgaccttgtaaatctttcgaaccatgttctcgaagactgctttagaccatataaagacttcctcaagttgcatactttggttccaaagctttcccgaaaaaaccactagagcatccatgaagacttcttttaaatcgccattaaaaaacatattcttaatatttaactagtgtaaggaccattccaagtttacaactatagaaagtagtacttggattgtattcaacttggaaactggagcaaaggtctcctaatagtttatcatataagtttgtgtaaaaccgttagccactaacctaactttatgacattccaaagatccattagaattaaactttaccatgaatacacatttacaccccatcggcatctttccttcaagcaaattcaccttttcccatgtgttgttcttttctagagccttctgttaggaaattaatctagcaaatcttctatataaagaagatatattctgtatataatagtttcccctttgtattcctagattgtagttagattgattggtgatagcttaattataggagagactaatgtgtaaccgaagtttactttctttataattacattaattgacatcaatgaaatgtaattcaaccaattcttcttcttttcatggtatcagagtagggactaaaatcctgaactctattgtggctgcactctactttctcgtgcagcaatctctcatcctttggccaccatggttgatgaaaggaatcctacttcttctagaacatcaaaaccatactcatcaaagacagaaaaacaagtcgattcctctgtccttccatcagatgcatcaaagtctgatctctcaaatccttatttcactcatcactcagatcatctaggtttggttttgatttccaaacctttgaatggagataactactcagcttggcgcagagccatgaccttggctttaaatgccaagaacaaattgggttttgtcaatggcaccatcaaggcgccttcgaaagaaactcatcctaatgactatgcaacttggtcatgttgcaatgatatggtgcattcctggatcgtcaacactctcaatcctgaaatttcagattctgtaatctattatgcaactgctcatgaggtttgggaagatcttcgtgagcgattctctcaaagcaatgcacctcgcataattgagatccagcgagaaattgcttaccatcgacaagagcaactttctatctcggtttattacacaaaactcaagagcttgtggaatgaactggcctcgtacaatgatgcgtcaagcaaagcacaacaggataaaaaaagattgatgcaatttctaatggggttgaatgaatcctacagtgcaattcgtgggcagatacttctcatgaatcctcttccctctgtccgtcaagcatattcctctgtgtggcaagaagaaaaacagaggcttcttagtgtgacacacacagctgtagagtctaactccagcgttgccatggtcgtaaggagcaatcaaatgaagaacaactctgctgggaacgcaaggtcagatcgtttagaccgcttctacaacaattcgcaagattcacgacgatttgatcaagacaaacgtcgttcaggatcttccagaggcgacctcagtgcacctattgtggggaaatgggacactttgtcgagaagtgttatcagctgcacgaatatcctccaggacacccaaaggcaagaacaggttccaattttaaccgccacaagaatacttctgtggctaatcaagtttatgatggtgcgaacaaagatggtgggaagtcagtgttgactggaatcacagaagcacaacttcaacagctcttgtcctttctgaataacaaagatggaggtacaagttctcaagcaaatgcagctgtagcaaaaccaggtttgtttaaaatttcttcacaccgttggatcatcgacagcggcgcaacagaccatatctcttcatctccaaagctgttcttgcataaagataaaaatatttcattgcctccagtattgttacctagtggagaaaatgctaacattgtcgccaaagggtccttgccgctaaactctgtttattatctgtgtgatgtattatgtgtacttacattcaaagttgatttaatgtcagttagtcgtctaacaagaggcctgaattgttcagtaacatttttccctcattggtgtgttttgcaagatctggctacgaggaggatgattggtttgggtaagcagcgtgatggattgtattacctagcggcgttaacgacaaataaaaccgagaccaattcttattcatcaccaaatcgtcaaccaacctgcaacctcaccacttcatctactgatctctggcatagccgtttagggcatgtttcccattctcgtctgagtttcattgctaagaactttttaaatttttcagtttagtctaataatgattaccctatttgtcctttggcaaagcaacatcgtttactttttggtactagtgaaatttcatccgaaaaaccatttgatcttattcattgtgacatttggggtcgttataaacattcttcactttctggtgcacattatttccttactattgttgatgattacacgtgcttcacttggatttttctgatgaaacacaaagatgaagcacagcctcttataaaacatttctttagttatgtttccactcaatttgcatctcatatcaaaatttttcgaagtgacaatggtggagaattcctttcactccaatcttttttcaaagataacgatgttcttttccaacactcttgtgtttacacgccccaacaaaatggggtggtggaacgcaaacaccgccacattttccaagttgcacgagccttgaaatttcaagcttaactccctactcaattttggggagaatatgcactcaccgccgttcatatcatcaaccgcttaccttcacccgttctctccttcaaaacaccattcgaacgcctttacttgaaaccacctacgtactctcacctccgtgtgtttggttgtctcgcttatgctaccaatgtccatgtctctcacaaattcgatcaccgtgccatcgcctgtatcttcattggttatcccgttggacaaaaaacatacaaattgtttaatctctccaccagaaaaatattcaccagcagggatgtatgttttcacgaaaatcactttccttatgcttccttcgagtctgtccttcctacttctaatttgggctactcttcaggtccaatttctgctccaattcatgacccaactccctttcacgtcactaatcattctcgccttatccctcctcccaccacagactctgctccctctttttctgtcgcacccaattcagacacactcaattccgtcgcacccatctcttcatccacaatttctgatctcccctccctccctgatgagcagcccactgcgaatccaactccagctctcctcaaaacatacactcgccaccctaagaatgcttcttcacctctgctggaaatcccaacgcctccttccccatatggagacactcttgccaactacatcatcccttccttcatcactgtccttgcttctatcttcatccaatccctccgaaccatccccacctctccttggcccaccacaaccagccccaaccgagacccttcgtcgctccaaccgctcctataatccaccagcgaaactacatgattatgtatgctctcacatcatgcacgcttgctccgaccaatctccttccttgcttctaggtctgactaaaggtacacgttatcctttggccaattatgtttcatatcaccgctacaagcctgcacattgctcttttattgcccagattagtcaagtcacaaaacccagaaattattctaaagctgctgtccatcctgaatggcaagaggcgatggggtccgaattgcaggctctctaggctaagggtacttggactctcacatctcttccaatagggaagacgtcgataggttgtcagtgggtctataagattaaacaccgttctgatggatcaattgagagatacaaagcacgattagttgccaagggatttacacaattggaggctgtcaattatcaggataccttctctcccattgccaaaatcatcacagttcgttgtcttcttgccttggttgctgctcgaagatggtcacttcaccaattagatgttaataacgccttccttcacgacgatcttcatgaagagatttacatgtcaccgccgccaaggcttcggagacagggggaggaaaacttggtgtgtcgattacataagtcactatatggcttgaagcaagcatctcgacagtggttctcaaaattctcggaagctattcaagctacagggtatgttcaatctcgagctgactactctttattcaccataatacaaggcaagtccttcactgccctcctgatatatgttgatgatattttgattactggaaatgattctgtgagtattgctgcaattaagaaattcctccatagtcaatttcgtcttaaggatcttggtgatttgaagtattgccttggcattgaagtatcttcttctaagaatgggatttttatttctcaacgtaagtatgctttagaaatcattaaggatgcgggattgttaggtgcggcacctattgatactcctatggagcgaggtttgaaattgtctgataaaagtgatttactcaaggatccgggtcattataggaggttggttggtagattgatatatcttactatctcaaggccggatattacatattctgtgcatgtattaagcaagtttatgtatcagcctcgtaagcttcatatggaagcagcacttcgtgttgtgcgctatctcaagaacgcaacttggcaaggattgttcttctcctcaaacagtgatttcaggttgcgagcctattgtgattcagattgggcaggatgtccaatcactagaaggtcaaccacaggttactatgtcttccttggcccctcattagtctcatggagatctaaacgtcagaaaacagtcttgctttcttcagttgaagcagaatatcgtgctatgacaggtgcttgttgtgagttaacttggctgaggtaccttctcagagatttgggagtattgcatcgagagcctacattgttatactgcgacaacaaagctgcattgcatattgcagcaaacccagtctttcatgagcggaccagacacattgaaatggattgtcattacatccgagataagattcaagatggatccgttgctacaagattcgtgaactctgcacatcaattggcagatgtcttgactaaagctctgggaaaagaagtctttactcctatgattcgcaagatgggagtacaagatatccactctccaacttgagggggagtgttaggaaattaatctagcaaatcttttatataaagaagatatattctgtatataatagtttcccctttgtattcctagattgtagttagattgattggtgatagcttaattataggagagactaatgtgtaatcgaagtttactttctgtataattacatcaattgacatcaatggaatgtaattcagccaattcttcttcttttcaccttcatctcctcaaagacagcctccttccattttggaacacttagagcttcctgtgtattcttagggacatccacactagataattgtgaaataaatgcattcttattacacactttgtccagtgttactttctggttctttttataaacagggaacataaatgcagagcttccttataatctctatgtttgatatctcagaggaatgaatttttttcaattgattcttttcaattttatatgtttaatgacaaaaaaatgagtgaaaattttaaccaactctagaaaggtatttgaattgaacactgtacatagtttatgtttatatctactttgacaattgttgtgtggtagcttgattccttacaatctcatgctgttcaatcaatggcggagaactcaatctcttttgtatgactaaatcctctaccagattttggatttttcgctaccaccatcatcacctcttttgtcatcatattgtctaccaccatatcatggctgccaatgctgccatgatgttatttctgccacccaacccctcctttggctacatgtttttctgtcattgacaccattattctaacaatgaatacagactcagccatctcaaattgtggctcccactttactactgcttattgacattgaatcttaatttaatttacttatatctgatatgaaactaaaattttcttctgcagatattctcatt

SEQ ID NO: 11956 - DNA, 3943 bp, Vitis vinifera
  Intron number 2 from transcript GSVIVT01031132001 (locus G SVIVG01031132001) derived from phytozome v7.0 (chr-ID chr1 4; pos 1865745 to 1869687 reverse strand)
ttcgtgagagagaagtagaagatctgttttacaaggtaactagatgccggttgatacttgcattatatgtcatgcctgttgatacacacagttgagatgtctttcttgtaaagtatatttttctgcttgaattgttgctcttgttatgttttacataacacctgggtcaaaatatgagctaggaattgtgttttgatgaaacattaggtagtaatggattaatttacaggtgaatcattgtgtaaaattcttatgatctaaaaattattaactttgctaatgtatttttggataacatactcttaaatttcttcttctatatggcaggctagtatactgaaaacgcttcagattgtccatctttatctgaaacaatctttgaaacaaactgttgcttcccattttgttgaatttaggctgtgtttggtttactgaattgagtgaccgttgcattccattctgcccaatttccacccatccttggttaatgcttagactctattttggaattctaatgaggtcgcaaaacctgtgaaagatgggggttggaaacccatctatggacatggatttgctaaagcaattcctagaaaagggcttcgtattaattcaaatggcaaacatatccttatatttgcctctcaaataaaaaaaatgtcattaaaatattttcatatcttttgaggtaaatcaattccagcttctatatatgataaatgggaagataaattaaaacttaagaaatgcacattaatctaacttcatttattcagaaaaaaataaattaaacttgatttctatataagtctattaatttcaattaatgtatgcaaaaataaataaatttaaagctaataactatcttttttaaaaaaattattcttattaataatatatccaacttaattgatgtcttttctttctactattaactatcttcaattcttcctgcatggaaattattatgactgttataagtagttgctgttgtaaagtttaattataagttattaaactttggattcctgctttctaataggttattcactttatttaaaatcaccaaaaccatttttcttttactatttttatttcaaaggtgaagccatgtttcctacgtcataatcatctaattcctgtactggttttccaaaccagtaactatgggtttattctgttcaccagtttaaattgtcatccacttctgtttgtggtcatcttatgaattttatagtgttttgacttctattgaggtccttattttcatttttcatctatctatcatttcattggtatagtaatggtgaacaccacataatgcaaacatattataaagtgaaaatcttgtttcactgccacttgttatcagagatgttattttatttaatgttttgggtgctatatgcagttactagttagaattatgtatttgtttggaacttctttcctcactagagagcaagaacttcatgccatgttcttccaatgaaaaaaaaagtcttggaaaaccatgtatattcaaccatagccactaaatatttcatacaataataataatagttaaaatttctttgttagtagtttctatgattgggggttgggaataatagaatttattgttgtcttgtctccaaaagtgattttgctgaagaatgagatggtatataagtaagttaatgatggaagattccttgtgaaatcatactataagaccgagtttggaatgtggtgttgttttctttcaacatcgaagggtttgagaatcactttcccctcaggaactttcctttgtctgggagcagtatgaggaaagattcccactttggattgtcttacatcaaaggatgatatcagccagttggtgttgtcactgtaagcaagaaacaaggaattactcaaccctttacttatctattgtgggataggatggagtttatggctgacgttgttttgaacttttggtatttgttaagtgcttttagagtcaattatggcacatttagtggttggaagggaaatattattagtaagtggaagaaaaaaaatatgacatacagctccacttatacagtttttctggaagaatgtgatggaagtattttttatggtttgaattggtccaaattgcaacagaaaatgcaacgatatatcacacaacaaaaacatgcacatgggcaacattgaaccaagcaataagcgccaatgagtgcagtgagcatcattctaggaaacatatgttattggtataatggaatgtcactgcagtaaggtaaagggaggtgcacaaccatgattacaataccagaaaaggcacaaatttcacatttccttcaactttcaggctgcccgcccttttttttaataggcaaatagaaaatatattagaaatgccaaacaaaagggtggactaaagcataatgacatatacaaaggtgctaaaaggttagacaaaaaagagagacaaaaagcaaccctctctccttattcagagctcagctggtcaatgaagtccaccatggccattgagaaatctctcgtgtatattctaactcactcccaaaaattataaaggaaggattgtttgattgtttgatttgctttttcagaaatttcaaacacccttttatttctctccttccataaggtccaaaataagtataaaggaacaactcttcaaactttcttcctcctcttcctaacaaaggatccataggacgtaaatcaaccgccacaagatgactgcctttaagcaaataaaggaggatacggtcaattatttcttcttcttcttcttctttacatatatgacatccatttagcaacttccatcccctccttttaagctggtccaatgctaagttcctttcctaaaccaagttcacactaagtaaagtgcaaatatgcatgcagagtaaaggacctagcttgatattgcacataggcccagatgcacagacttgaaaacagcggaggctcaaggaaaccctgatcctgattgagttatagccacctttctgggtgactcttagtggttgttttttaccctttcttgtttagttctctaaatattattatacattcatatggactttcaatgaagttcccttctaaaaaattattataaagtaatggtaatggatatgatccaccagcttgtccgttgttttatgtgcaaaatggatgaaaaatcaactgatcacctcctcatttgttgccctaaagtaagcatcctatggcaacaaattttttgctgtttggagtggtttggctgttgcacgctataatgagaggaacccttcttagttggcattgatcctttatagaaaaggtatagaaaaaggcttggaggttagccctcttgtgtgtgttttagattgttcagaaggaaagaaataagagatctttcaaagatgtggaccagttggaccaagcattcaaatttgcttttatgagtcttttttggaatgggttagaatgcaagttgatcattaacctttcgaatatgggttagaatgataggctttgttgattggcttagcttcaactgaagggagagagtttttttggtttccttttttcacatttaagtgcaaattttggtgtgccctctttttaggcactgttaatgtattttctctttgcctatcaaaaaacaaaaaaaatccatcctttttgggttagaatacaaggattttatttcttggtgtagtggggtgaactgagaaattctattctgaccagtataagctatgggtttctttgagatcttagtggggagagagcacatatgaggatcatggttttgctcattgaaattgacaatgtggttagcatgggttaatatatggttcaaattctttagttatgaggggtaattgctgattgaacttcatttttctttctttgcaaatcattgtttatctaattggttctcttttgtagt

SEQ ID NO: 11957 - DNA, 7778 bp, Vitis vinifera
  Intron number 2 from transcript GSVIVT01030137001 (locus G SVIVG01030137001) derived from phytozome v7.0 (chr-ID chr1 2; pos 10137379 to 10145156)
tacaccgacagccatcctgactcgtgttccatcatgtaaagggacacagctatggcctagagaccctgagcctgcataaacttcactcctggtcttcatgcctatgcaaagatggagatagtttcgttttccccatctgatgatgtctatagaggaggccctgctccattcttaactctgttttgtgtcaccttttcaaaccttttgatttcacactcaataaagatgaggtttccaaggatgatctgccttttgagtattaaatggatttgccttttacttcaacggtttttgagtagttgatttgggttaataattgattctctttgcaatctatcccaattatatttttcagcaatgaaatccacactggagccaagttggactgatttgaatccaactgacttgaagcctttgagcttaagtacagaagaatccttttgatagaaaatagggttggatgctatgatctccacaaatagctttgtgcaatttttctgaagaacacataaaaacttgggtattattatattttgcaaatttcgaagagatgggccctagaagctctgaaacgtgatagtaaaatgagggccctggaacgatttctcttcttcctttagcgtgtgtaaggatgagtcccaagacatacaaagcagtggcagccctgaatggttggtgaaaaggtgaatctcgatagtggaatacatctagagggaggtgaataggtgttttgaccaattaaaaaaaactctcaactcaaatttgcaaactttgtaactttttgaatattcttcttctcttcacacattctcaaaaacacaaattataaatcacatgcatatatgaatgtaacaacactccccaacaatattaaaatgcaatttgcatgcacatgatccaacactcccaagctcaaatcaacttaaactaaattaagataaatgcaagatcaatatacctcaaaatgtcaatgatcaacaatcagaaacaacttcaaagattattcatagtcatttctcttcatcaatcaattgagtagtagacaatcaaaattctaatcaattgctgaaattgaacaaattgatgctaagaagagaaaaaaagacaatatgacaccacaaatttacgtgaaaaatctctaaagagataaaaaaccatgagcctaccattgattgaaaaactccactatgaagaataaaaactgagtacaaggttgtacctagctcaagctaaccaatcatttccggaccactggactagtaccttcacttttagattctcaccttcatcttccggagcacacttggagtccgcaccaagctcaatcttggcctcttcttgaattgtcacaaaaagaaaatgggtttttgcacaaaaccaggagaatgagatatgaatgtttcaaaaatcaacccatgttcattttcaaaaaatccattttaagaaaaatttcttggaaaacttgaatgagattttcttggagcaagcaaccttaaagagaaaagggaatgaggagaataagaacggctgctgcagtctctccatctccagaaatgggtgaacatttgattttaaatgggaatgaagcccttaatccaagggctggaaattgatcttagaatcaggttagttggattgatttgcctctacacctggattgatccaaaaataggggaataaaagccttgcaccaaaaactatttctcccaattttcttaactcatttaaagatgaaaaacagggttgattcacattcaatcaccacacactcgactacaaacctcggcctcttagcaaagttttaatcttcaaagtcaagtagttcaaagagggattggtaaaccgagttaggaaacacataggaattttgtccaaaattgccaacctagctaaacactcacaattgcaaaattaagcttaaaagtatggttgaagagctctctttatgacatgatgaaactattgataaatcttgacccacaaagggtcttcacctaaaacccttttttggggtcatgacttggtcattcttccttcttttgttctttcatttaatacaaaagcgcttctaaactcatcgaatctttatgcatattataattaaaccatgatgtaggatcttaatccaattgttcttatttctcttgaatgaataatcattcatttcttcaataaattaagggtactcacttgtagcaaatgttataaaagtatcattaagcagagggtgttgcatgggcatccattactttgtagttgttgtttcattgttttagatcttatacccgatctcattattttgtatccttatctaatgattcagattttatcacagttgagctacccagatcaaaagtttgatatctgataagcctcttatacgttatgtgtataccagaaaagaaaagagaaatgtactgccacttggcagttatttgtaacagtcttagtataggttaggtaacaatctggatacggactgggatggtttaaataggaaaaatgagggaattagtgagtattggatattctatgaatttggtacgagagtgatagcctctcgaatagccatctgagtatcagttgggtcttttttttcttgtaattcttgaaattcaataacaattctccattagatacctatcaacttggtatcaaagcatcaatccaaatggcttagaaaaaaaatgaaggctgagtggattttctagaaaaggaagttggagaaatcagaaatgagatgcaacgcttaccggaaatggaaaaaacaattatgaaccttgcccaaaacgtaatgcgagttctgcagtcgttggaagagacacagaatgcaatggtggcgttgtcattggggcgggtcacgacgactactgctcaatgagaagaccatgcaaaatggatccctggagttggggaaaccagtgggaattggatagcggtggatgagacgaggtgaggcggaaacggggaatgacatggcgagcgacaattggagatgcctatatttatgggagaaaacccggacgactggatctttcgagtcgatcgatacttcgcgatgtatggacttatggaatatgagaaattagtcaccaccgcgatgagttcagatggggacgcactctcttggtgccagtggactggttcaagggagacgtttaggagttgggaaaattgaagagatgactgttgttttactttcgtcgaactcaagaagggaggctttgtgagcagtttcttgtggtgcgacaacaggggacagtggcagcgcaccgacgggaattcgagattatagtgactcccttgaaagggatttctgatgaggtaatggaaaacacatttatgaatgggctgcttcctaagatctgggctgagttacatcttttgcaaccatatgggttgggtcacttgatggaaatggcccaatgggtcgaagataggaatttaaccctgtggacggcctgtgaaccaaaggacctaaagaacaccaaaatgctgtcatctacaaatcgaggtgaatggaagattggggaaaattttcagactagggtagtggctgttagtgagaagacgatgaaccaacaacgagagattccaataaagagactgatggaatcggagcttcaagcccgtaaagagaagggactctgttttaagtgtgatgaaaagttctcacctggtcatcgttgtaagaaagaattaagggttttattggtgcatgaagatgaagatgaggaggataatcagtttgacagtagagcaaccgaagaaccttcacttatcgagctaaaagacgctatggaattatctctaaattccatggtcggtttgactacgccggagactatgaaaatcaaagggatgatcgggtcaaaagaggtaatcatccttgtagacagtggggctacccacaattttttatcccttgatttggttcaacaattagcactcccattaactacaacaaccagttatggggtgatgatgggaactgagatatccgtgaaagggaagggtatttgtaggggaatttgtattttgatgcaggggcttactatagtggaagacttttttccacttaaattacgtaacactgatgtaattctgggaatgccttgattagggactttaggagacatgaaagtaaactggaagatgacacaatgaagatcaaaatgggaaagatagcgatagtgttaaagggagaccttagccttagttggattgaggtgtctcttatgggattggctagagcattgcaacaccatagccaaggggtatgggcgaaactctgtcagacttccaccacttcgggtttgagtgaaggagtataagaggtctcaaaaacagtcaaagaagtgttagctcaacatcagcacgtttttgggccaataacagggttaccaccaagtcgtgatattgaccatgtcattcaattaattctgggagcatctctggtcaacgtctgtccctatcggtatccacatattctaaagaatgaaatagagagattggtacaagagatgtttgacataggaatggttcggcctaacttaagcccactctctagtccagtgttattggttaaaaaaaaaaaaagagaatggaggttttgtatagattaccgtgctctcaacaaagttacagtcctagatcagttccccattccgatgaatgatgagttacttgatgaacttcatggcgcgaccatttttttccaaactagacctcaaatcgggctaccaccaaatttgagtctgataacaagatatccacacaaatgaatttcgtactcatgaaggtcactacgagttcttggtgatgccttttgggctaaccaatgcaccaacgacattccaattgttaatgaatcgtatattttggccacaccttcgggaacttgtgcttgtatttttttatgacatattggtttacaggaaggacttgaaggagcattgtgatcattttcaaagtgtgttgtccattttgacgaaccaccaactacatgtcaatggaaagaaatgcctctttgctaaaccgcagctcgaatacttgggctatttggtttttgccaaaggggttgctgctgaccctaacaagatttcagtcatggtagagtggcccacacccaaattccttaaaaaactatgagaatttctcagattgactgggtactaccatcgatttttcaagggatatggagctatttcttggcctctcacttaacaactaaaaaaaatgcttttaattggaacccagaggttgaggctgccttccaaaaattgaaaacaactatgacaacaattcctgttttggctttgccgaacttcagttagctcttcattgtagagacagatgcctcggggtatggtttgggtgccattttgatgcaaagtcaaagactagtggcttattttagccaagtcctctcagcaagggagcgacaaaagtccatatatgaaagagagttaatgactattgtcttagcagtttagaagtggcgtcactacctgcttggtcgccattttattgtgcggacgaatcaaagtagtttgaagtttctactagagcaaagagtggtgaatgagttgtaccaaaagtgggtcgcaaagctgtttgggtatgattttgaaattcagtttcggtctggattggagaataaagcagctgacgccttatcttgcatcctcatttctatggagttagttgccctccatggttcctagtcgcttagacactttgttgatcagttcacaagttgaagctgacccacaccttgctaagattcggcggaggctgctagttgatccagatgcttatccttagtattctttagaccatggcattctcctctacaaggggcgcctagttctttccaaggtctcaccccttgttacgatacttcttcaagagggtcatgctagcgtggttagagggtattccaggttcttatgaacttacaaacgactcacatgagattttttttgggttggcatgaagaatgacatcaaagagtttgtggaaaagtgtatagtatgctaataaaataaggccctaactttgtcacctgctgggttagtacaaccattgcctatttcagaaaaaatataagatgatgtaacgatagactttattgaggggcttcctaagtttgaggattataactccattttagttgttgtggatcgattgagcaaatatgctcacttctcactactcaaacatcttttcacagctcaaacggtgcttgctgtctttgttcatgatgttgtcaaattacatggaattccccatttcattatcagtgaccgtgacaaaatatttcttagtcaattttggacggagctatttcggttgcagggtacgtctctctgccatattaccacatatcatccctaaacggatggacaaacagaagtggtcaaccattgtgtggagacatacctttgatgcttttcatataacaaacctagacgttggtctacatggattccatgggcagaatactggtataataccactttcactcctccactaatatgacatcgttttgagcagtttacgagtgagacctaccatcgttgctacgttctggatcagattccacctctgttctagcagtggatcagttattgcaagagcgtgatctaattttaaatgaattgaaagaccatctctattgtgcccaatccaaaatgaagtcatctgcagatgctcatcgtcgtgtagttcaatttgaagttggggattttgtttatctaaaactttgtccatattgtcttcgttcccttgccaagcaacccaatgagaaactctacccatgatattttggcccttacaaggtggtgcaacaaattggtccagtggcgtacaagttaaagcttccttcttcgataactattcatccaatgtttcatgtttcacaattcaagcgggctcttagttcaactgatttatgtcatccactttcccctattcttgctaatgatttggaatggcttgtggagcctgatcaggtcttagatattcgctagtctcccaatgacaatcagcctaatattgaagtacttattcagtggaaaggacttcctcagtttaaagcttcatgggaattagttgacaccattaaagagcactttcttgacttccaccttaaggacaaggtgtctcacattgaggggggtaatgataggcctcttatacgttatgtgtataccagaaaagggaagagaaatgtactgccacctgacagttaattgtaacagttttagtataggttaggtaacaatctagatacgggctaggatggtttaaataggaaaaaggagggaattagtgagttttggatattctgtgaatctggtaggagagtgatagcctctcgaatagccatttgaggatgaattgggtcttttgtttcttgtaattcttggaattcaataacaattctccattagataactatcaatatcatgatacaaatgagccacaattttttccattgattttaaaatctgttcactacattagctaatacaacaaaagagaggtcaacagatcacgtgccgatgaacatcatatctcttattcattaataatggaatttggtgagcttgccggaagggacagtgggctaataaactaggccaatttcctgggttttaatccccacacgcggctattgctcggcctacaggagtcctatgaatatgagaccgcgcctaacaaggcttatgcacagagccagtggcaaataacagcacagtactctccccagt

SEQ ID NO: 11958 - DNA, 6914 bp, Vitis vinifera
  Intron number 1 from transcript GSVIVT01036721001 (locus G SVIVG01036721001) derived from phytozome v7.0 (chr-ID chr1 9; pos 23319015 to 23325928)
ttatttgattattattttcaatacaattttcaaaagtatggatttatgataaaaaaaagtttcatttttgtttatatttgaatatcattttttttaatctttattcaatgattcttactgcccaaggagaagatgtaaaattaagagaataaatggttcttattgagattatttttttcatatcttgtccattgcaatcaccttattttataaaggctactaaataggaatagaaaccaaataaaataaaaactaatcctaagtgtacgttattccctaaactaaatagaaactaatcttaaggatcatttattctctaaactaatcaagtcgcaacatcctcttccccgtcaaaagaagttttatcctcaaggtcgagactctcaaaacttttgttgaattttgtaaacatcttctcatgttgtgtcttccaaaaacaaattggcccgatgtatgagttattgaacaactgtcatattgttcctctttaactatattttcctcattcccattgtatggataaaattcgaattgtaaatgcttgagacctaactaacttggggggacctatagctgcaccttccaacatgaatttctttccattgataataaatttcattctcaaattcttgaaatcccataatatggatcccaatttagctaaccattgaattctcaataccatattgcacccacccaaagataggagcctcaaatttgcctaaaatcccttccttcgcatgttccatgtcaattgtctacaacttgcatcaccagtaattctaattccatctgtcattgccaccttcttagggttggtagtttgcattgagcatcttgttcttttggccactatgggatcaaggaagttatgggtgcttcttgagtcaaatagtatagtgacagacttcttcttaatgttgccaccgatcctcatgatctaatgagatgtttaatcaaatattgcattgattgaaaccctaatatcatcctccctgatatcatttttagcttcacatatcgcttccccatcactttcattagagtccttaacttccttgagaattgccttcattatcctttccgacaacaaggctaactcaatggtttgggttagaatgtttagtcgaaacattgtgacttgatttttaactgcatttttcaagccaataatgaattattgaacaaaaaattcctcagtcaacccactagttttgaccatcaacaggctcttagtatatcctaaccataaaaacttgtttcaatttggttatttgtccaataaggcttatcataaatactaaggccaaacctagaaacaatatctataaaaaaaattgtctaattgatttccttgccttgtacccttgaaaccattctaaggcacttccttctaaatgcaaggaagccaatcttaccttctcctaatcctcgattccattaattttaaagaatttgtcacatttgtaaatccacccactaggattctcacctttcaaatttggaaaattaggtttggaacacttggtttaaaaggagttttaatcatgtgagtgataatttgtctcacttctattgattaaagcatggttcccattacttgactcctctgttatggaagtcaagcattcaaattttaggtttatgattgcaaccattttcaacaattccaataaggttgctacttgtttatttgatgagtcatgctgcttgtttatctaacaagtccttcaattgtttaacaatatcttcaagtctatgttatttttatgttctagtcttttccatcatggtgccaagaccatgctcttataccaattcttatgacccatggagaagacgcaaaattaagagaataaattattcttattaagaatatttttccatgtctttctcattacgctttgtcatattttatataggctactaaatagaagtagaaactgaataaagccgaaactaaataaaataaaactaatactaatgatcatttattccctaaactaaatagaaactaaataaaaaatagaaactaaagatttagatatctgaggatgatttagatctgaaacccattcaatatattagaatttttctcaaaaattaaataaaggaaagattttcgtatattataattgtatgactaattaaatcaatatgcatgttactttaactcaatattagggttcaatcttaggtggattggttgaattgatgactaatctaaatttaatctgaattacgaaacaatcaacccaacccgagtttcgacctttaactcaagatactcaacctaagtttaactcaacatcatttctctaagtttgagttgaatttgaaccagttaggttagatttaagttgattgagttgtataattgttagtgtgtttttaaaatgttttatatatttatatgaaaatttatatagtaaacagataaaaatttaaaatagtaaaaaaatatatatatatataaaatcatatctttctaaaaaataaaaaatatatatgatataatgccacgccccaatacctactttatgggcatgataatcacttcacacctcaaatccaaaggctcaaaatggaatcaatacaaacattcatcttgtaattggaaattaccagttaccaaattcatgttcggagtagtaaaataaatgaattctaaaatctccatatcaactttaaaaactaacacatgagtcaaagtgttattgtccaaatacctcgaaactcaaataatttaaacaagaataaattttaacatctaaacaatgtccaaaaaaaagtttaaaccaaaatcctaacaaagaaaaattctctatcttaaccatcactcctcgtctgaactgagaatacttgaaaattatcaacgaagggacatgaacttaaaactcaacaaggaacatcaatacagtttcatggatcaaacgtttttaattataattacaaataggaaatataacatataattattttcattaaaacttttgagttcaaaatgctaatacaatcaaacttttcaataaaactttctcatatccattccaaaacaatttctaatcaaaatcaaatcaaatacattcaaaatatatttactttgattatcaaataacaaatggtgtccaattaaacgagacttcacaaatgagtagctagtttcaaatttgtcttatttaaggtgaacaaaaccaaatgtcagcaattataacctattgactaggaccataagatcaactattataacttgttgactatgaccatagaaacaagagtcaaacacttcattttattaattcaaacttacaaaacaaaatattatatctccacaattttcatttttcataaacaaaaaaaatgttcaaacatatttttcatacaaaacatatatttgatccatgcatagaaataaaaataatatttttacacatttcaaaatataatataaaaataaacttatttcctttcacaaaatctacattaatttctcttacctcaaaaaaacactcaaaaaccttgaagtatttaatcccaaagaatttcgcctcaaagaacccatttcaaacctaataaaaaaaagacacaactattactattaactatttatctaaatttataggtttgacttttgagaaccccaataattttctatattatgtaatcggttatttttaacttcttaatcaataataatttaacaagtgagtttttaaattattttaaaaaattaggttctttccaaaatttatttccaacattctattaatttattattattattattatttaaaccaaatccctcaaagatatgttttttttctctatttattacattaaactattattattactaatatttcattcattagtttaaaactaaatattattattattttttattaattttcatattcaatgcatgaccaacccattacctttgattattattaatactactttcctccacaaacagctgtcttttgttgttttttattttttattgtatgcaagcaatacataatttaacttttgtttattattaatcctatttacttccttacgtgcacgtcattccttagccctttttttccctaacataccaaatccttcctacctcacgcatctttcattattatttttttctcctcttaaaagtcaaaacttttaaccttcatattcacaaattttatgtaattttcacatccaaaactatataattcttttttttatatttattcattttagtaatcaaaatttatcaatcttcataaataaatcaaactatgtttataaatttttaatattttttacttataaattaattaaacagactttaatcaaaattgagatattccaaaaaatatctaaagtgttcaaaactaattaactaatataaaatattaatttaaagattaaaaagcttacctgaaaagttgatcttaaaaccctaaaccttcaaatctttaattatatgctctctgatctctgtgtaaaagagttttttgaataaaaaaaataagaaaaatctaatttataccttcgagttttaaatatgaaaagatctttttatccttattaaattactttaattaattattaatttttaaattatgattttacctctaaattgaatttggggcattacatataatataatttgattttacaaaaattaaaaagaaaatatatattattatataagataatttatattataaaaacattaaatcaaaattgagttagattaagaatgtttgaatcttaacgcaagtctaatctaaattaagttcaggttgaaaaaacctaacccaaatccaatccaaatgttgaaaatgattgtccaaatccgcttgaacgtcatattaggtcaagctaacccgtccaagttacacccatactccgtattcttttccataccaccttttatacctatcatgtataacattatgtaattaattttggttctttctctttgcaaccctcggtttagtagaagtctattttaattttctatttagacttaaatataataaattacactattaaataactcttagtttttgtgtccctttcatggtatttcctttagtgcccgaatttattttacatcgaccttttgtgtcatatgaaattgcttccttaatattcccttttatgtcttatctttgtcttctatttataccatatatgacaccgtgtcactaatgaagtcaaccgtatctaaccatttaggttatgaattaggggtgataattttaatgcaaaaaaaaaggttaagaaaaatccacatttttctttaattagaaatttatatattttaaatttatttaatttttatatgataaaaaaagatatgtgaaataagtttgaaaaaatatacaaaaataatttattaattctaaaatctattttttattgggaaaagtgaattttgactcactaatatcaaaatatattaaaaaagggatcttaaattttttaaattagtattatcttcatttatttaaaaataatttgaaatatcatgcacttttaaacgagtcatataattattctctaaaatgctcattttacttgctatgtcatagatattaattgataatttgataactaaactcctcacacaaatgtttttctttctttttcttcaaaaacaaacactcggaaggattttttttcccactttttaaaagtaataatatattatcttttatctatatctctatctcgtgaatccaaggtgatgtcaaaaacaaagaaaatgttctaaacaatcaaagtcattaaaattaacctcaacttacctcctaaagagaccatgagaaaaatcataaattttattttcaacaaaactcaaactcatttatagtttatcgggtttcactacttctaatattcgcactcttcaaactatcttacatttgctatgaaatgcttatttatggagaaaaaaaaaatttcaactttgtcttcgcagtgtttgtttgttttttaagaaaaaaatatcaaaaaataataatgatagtaatatatctaaaccaattgttttttaagaaaacaaaaatctcaaataataataataataataataataataataataatagtaatatatctaaaccaattgtttttaaaaaaaaaaaaaatctcaaataataataataatagtaatatatctaaacgaatgaaaacatttacctagaaaagtttagtttaattgtcaattattattgatgaaatgataagtaaaaaatgtattttaaggaataattatgtaatttattgaaacaaaaatatatttcaaataaattttaaataaataaataaaaataatattaattaaaaaataaagattgtattttcatatcaacaagtcaaaacccatttttctctcttttgtgtgttttttttggtttcttgttttcttccgtttttcttttttgttttatttccttcaaaatttagacgtatcaacgagacaaaaccttttttttctttttttcttttttttttttttaataaaaaaaaaattcttatttccttcctcctttgtatttactttccctcaaattttcggccatcaaacgtagccttaaacctgttctccaaacatcccgagaaccacgtaaccaacggacatgcaaaatgcaaagaagacaaagatggataagagggcatgcaaaggtccaagaaattttttggaaagaagagcagttccctcaaccgccagagcctagtggtagggggagtttagccgggttttgatttcctttcttgtctacctccgctgccaccgccttcgtgaacagcgggtaggtttctttgcatgaggaccatgcagaggcataaaaaatttggaaatgaatatgggcccaatgacaactgatcagcaggcccacacaccttgcatc

SEQ ID NO: 11959 - DNA, 1543 bp, Vitis vinifera
  Intron number 8 from transcript GSVIVT01010009001 (locus G SVIVG01010009001) derived from phytozome v7.0 (chr-ID chr1 8; pos 13423706 to 13425248 reverse strand)
tcacaagaattagtctggtagatattaaaggacaggtacattttaccatgttttgctttctatattgcaaaggaattggtttgactccaaagtttcttccccctattatttgcctttttctttttggttgggttgggttgggggtggtgttggtttgttattcattctgttgtttccaatctcgtttcagctacgaaaaccattgtccactagtgtaatttccttattccaatctcactttgttatagctagctgtctacttatcagaaaaaaaaaaaaaaaaaaaaaagctaactatcaattgtgtcttaacttttgcatgaatcacaatgcataacaacaacaaaaacaggaacagtgaacaacagatccttgactctcaactatttggggtctggtataagtccttgtctaccatttggctcaatctttgggccgtgtctatctatattttacatggataatgtgcaccttattttcatctggataatttttgtgatgtttacatcacttgaaatattcaacttaatggcgaacaactcttctttaagtggttctgtaatggggttatttatatatatatatatatatctaaatctttcatctattttggggaaagtataccatctcctctgaggtttgctaaaactattgggaccttccctcacatttgaaataggccacttacctcccctaaggtttcgttttttatccaacccttccaccagtcattggagctgttggctgcatggccttaatgacatgaaatatttttatcattttacccctcaacaaatgcataattgtgatcccttaaatttgtatttctggtaaatcctcttatgaatgaaagtataactattctatttatggaatttggataccatagttgaaattttcatcaacagaattggaaaaagcataaaaatctctcatataggattttggaaaaatagtctttttttcataattagaacttatagaaatagaatattttctattttggaagttagaaaaaccagatcttgttataaatagaatttgaaaaaaaaaaaaagtttttaatatatggaacttgagaaaaaaactgttttttttttcattgatggactggtaggaaaagaaaactgtttcataaatggaaattgaaacacaagcttctttaaaaatggaattggagaagacatattttattcatgaattaaataaaagcatttttttttaatattacttgcatgatctatatttattggattggatgctatagttgttaagcttagggttaaatttgcttttttgttgtttattttctccaaatggtaaagtaggtagtttaagaaatcttagttgggattatattagtctgcttaactgcatatttagtacatgcctcactccatatttagtgtgccattgggacttctaagttgtagttttctaaaagatgaaatccttttcttgtgtcattttatgtttaactaatcctgattggtttgaattcttgacaggtcgtgttagataaattggttaagccatcaaatcg

SEQ ID NO: 11960 - DNA, 19887 bp, Vitis vinifera
  Intron number 8 from transcript GSVIVT01029102001 (locus G SVIVG01029102001) derived from phytozome v7.0 (chr-ID chr1 1; pos 19743239 to 19763125)
agtgaccctagtttaaggttaggtatctctccaactaaagcagtttgttactcattgataattctatgcttgttattcctttcttctactgaacaagaaatgtactatcctgtaaaatgagggttcctattggattttgttgcagtgtaatgcattacgataaaatcccatcaccctaactgcttctacttattgaatttgatttttcttggttggattttttattttattttattttataatttgagttcttggatgagtggaagcataattgccttgttgtgctcttgcttgatcttgaaattctttctgcaagattttgaagtgtatctatacatcgattttctcttattttctattatcttagttgtatgctacatcacataacatcattttctgttctctctttttgtgtattgtaacttatgtttatacctaaagcagttagaaaagaatacgcatgcacatataaaacacatgtaatcaacagcaaagcaatacataattaattccatgaaaaatactgttgaaataatgccaaagttaggttttttaatttaggaaagtattttaggaataaaaaaggagaggagatcatttaggatatttccttatgattcagtttcctaattttaggagagaattaagctagattgattttttcttattcagtcattggtgtatatatatgtgtatggtgtgtaccgaatactatcaataaaggagttcagaaattcttcatggtatcagagccagttttctgaaaccctaatcccttccggccaaatctctctggccatctctcattccgaccatctctctctctggccatctctcattccggtcatcagtccctattctcagagtcaagggagaaaacgctttccggtcggtctaatcgtcgtcagaaaacattcaccgccggcaacttttccagcgaactttccggcgacggttttttctacaccgcaaggagcgcctggaggagatctccaatttgtcccaaagcaccggaaccagaaacccatccacgcgccgtccacgcgcgctttttccggccggcgactgcatctcacgcgccggcgcgtgagggcgcgtgagccactttccggcgatgcgcttcctcctctaagctcgtctgacgccgaccagccacccttcttacctgttttgccatccgagccctgcacgtgcctcttttggggttctcttgcttccgtgggcacttcgatcagtttttccggcgtcctccggctattttttctcaactccaatccctgcacgtgccttgggaagtgttcttctacctttccggtccatgacaaaatacggaatggcatcatcacaagtatccagcgtcacgtcaccagaatcagggggcagatctgaaattccaaaccttggtggcaatgattcctctcctattctcatcacaggacacaaattaaatggccataactatttacagtggtcacaatctgtgttgctgttcatttgcggtaaaggaaaggataagtacctcactggagaagcagccatgccagaaactacagaaccgggtttcaggaagtggaagattgaaaacagcatgatcatgtcatggcttatcaattccatgaacaatgacataggagaaaatttcttgctgtttgggactgcaaaggacatatgggatgcagccaaagaaacttactcaagttctgaaaatacttcagaactttttcaggtggaatcagccctacatgacttccgccaaggagagcagtcagttactcagtattacaacacactcacaaggtattggcagcaacttgacttattcgagactcactcatggaaatgttcggatgatgcagcaacatacaggcaaattgtggaacacaagagactgttcaagttcttcctaggactaaacagggaattggatgatgttagaggccgaatcatgggcattaaaccccttccaagtctcagggaggttttttcagaggttaggcgtgaagaaagtagaaagaaagtgatgatgggatccaaagagcaacctgccacaacattggatggctctgcccttgctgctcggtcatttaatagtagtggtggagatcgtcagaaacgagataggccttggtgtgattattgtaagaaaccaggccattataaggaggcttgctggaagcttcatggcaaaccggctgattggaaaccaaagccacggtctgacagagatggcagagcacacgtggctgccaactctgagagcacatctgttcccgagccgagtccattcaacaaagagcagatggagatgctacagaaactattgagccaagttggcagtggcagtactaccgggatagccctcactactagtcaaggaggaatgaagccgtggatagtggacacaggtgcttctgatcacatgacaggagatgctgccatccttcaaaattacaagccaagtaatggtcattcatccgtccatattgctgatggttcaaagtcaaaaattgccgggacaggttctataaaacttactaaagacttatatcttgactctgtcctccatgttccaaacttggattgtaatcttttgtccattagcaaattggctcgtgatctccaatgtgttactaaattctatccaaactcgtgtgtttttcaggacttgaaatcggggaagatgattggcagtgctgaactgtgttccgggctctacctcctctcatgtggccaattctcaaaccaagtctctcaagcaagttgcgtacagtctcagagtatgttagagtctttcaattctgtgtcaaattctaaggtcaataaagatagtgagattataatgttacactatcgccttggtcatcctagctttgtttaccttgcaaaattgtttcccaaattatttatcaataaaaatccagcatcttatcactgtgaaatttgtcagtttgcaaagcatactcgaacagtatatcctcaaatcccatacaaaccttcgactgttttctccctagttcatagtgatgtgtggggtccctcccggataaaaaatatttctggcactcgatggtttgtgacattcgttgatgatcatactcgggtaacatgggttttccttatgaaagaaaagtcagaggtcgggcacatttttcaaaccttcaatcttatggttcaaaaccaattcaattccaaaattcaagtcctcaagtcagataatgcaaaggaatactttactagtagtctcagtacttatcttcaaaatcatggcattatccacataagttcttgcgttgacaccccacaacaaaatggggtggctgaacgcaagaatagacatctcttggaggttgcccggtgccttatgttttcctctaatgttccaaactatttctggggggaagctattctcacagctacctatttgattaaccgtatgccatccagagtgcttacctttcaatccccacgtcaacttttcttaaaacaatttcctcacacccgtgtcgcctcttctgatttaccactcaaagtatttggttgcacggcattcgttcatgtgtatcctcaaaatcgtagcaaatttgctcctcgagcaaataagtgcattttcctagggtattctccaacccaaaaagggtacaaatgctattctccaaccaacaaaagattttacaccaccatggacgtctctttttttgaacatgtcttcttctatcccaaatttcatgttcaggggaagagcatgaatgaacatcaagtttaggagtctcatcttgagggtgtaccttcttttcactcagagtcaccaaatccttcccaattcgcgcccactgagttgtccacacccatgccgtcatcagtccagccagcccagcacacaaatgttccttctcccgtgaccatccagtctcccatgcctattcaacctacaacctcacaacttgctaatgagaacttacaagtttacatcaggaggaggaaaagacaggaattagagcacggatcacagtcaacatgtggccaatatattgactccaattcaagtcttcctgaagagaacataggtgaggatagggctggagaggtgttaattcccagcattgatgattctactctgccgattgcattgaggaagggtgttaggagatgtacagatcatccaattggaaattatgttacgtatgaagggctatcaccatcttatagagcatttgctacttctcttgatgatactcaggttcccaacacaatacaagaggcattaaaaatttcagaatggaagaaggcagtacaagatgagattgatgcacttgagaagaatgggacgtggactatcacagatttgccggttgggaagaggcctgtggggtgcaagtggattttcaccataaaatacaaagcagatggatcagtcgagagattcaaggctcgtttggtagctagagggtttacacaatcctatgggatagactatcaggagacttttgctcctgttgcaaaactgaacactatcaggattcttctctcattggctgtcaatcaagattggtgcttgcaacaactggacataaaaaatgcgtttctaaatggtgacctagaagaggaagtctacatggaaataccacctggtttcgaagaaagtatggcaaagaatcaggtttgcaaactccaaaaatccttgtacggccttaaacaatctccccgagcctggtttgatagattcacaaaagcagtcctgaagctgggctacaaacaaggtcaggctgatcatactctatttgtcaagaagtctcatatcgggaaaatggccatattgatagtctatgtcgatgatattattctatctgggaatgatatggaggaattacagaatttgaagaagtatttgtcagaagagtttgaagttaaagaccttggaaatttgaaatatttccttggtatggaagtggctagatcaaggaagggaattgtagtctctcaaagaaaatacatactcgatcttcttaaggagaccggtatgcttggatgcaaaccaattgatactcctatggatagtcagaagaaacttggtatcgagaaagaaggtacaccggtagacagggggagatatcagcggcttgtcgggcgcttgatttatctctcacatactcggccagatattggctttgcagtgagtgctgtaagtcaattcatgcacagccccactgaggaacacatggaagcagtctacaggattcttagatatttaaaaatgacaccagggaaaggtctattcttcagaaagacagagaaccgtgacactgaagtatactcagatgcggattgggcaggaaacatcattgacaggcggtccacttctggatattgttcttttgtctggggaaatcttgttacctggaggagtaagaagcaatcagttgtagccagaagtagtgcagaagctgagtacagagctcttgcacagggaatctgtgaagggatttggataaaaagggttcttagtgaactgggacaaacgagttcatctccaattctgatgatgtgtgataatcaggcagctataagcatagcaaagaaccccgtgcatcatgacaggaccaagcatgttgagattgacagacacttcatcacagagaaggtgactagtgagacggttaaattgaactatgttcctaccaagcaccaaaccgcggacatcctcaccaaagctttacctaggcctaacttcgaagacttaacttgcaagctgggattatatgatatatattctccagcttgagggggagtgttgaaataatgccaaagttaggttttttaatttaggaaagtattttaggaataaaaaaggagagatcatttaggatatttccttatgattcagtttcctaattttaggagagaattaagctagattgattttttcttattcagtcattggtgtatatatatgtgtatggtgtgtaccgaatactatcaataaaggagttcagaaattcttcaaatactaagataagcaaacatatatatatcaatatcataaatatgcagacactgatggggaaaaagtgaaatattttgtgtgggggaagtggacctagtggaagccttagcttcagaatttggttgggagagtgagttgactgcggtgaaattatccctgtagggaaactggatcaaattgaaaacagtgtctgctttgaaagactctgctatgcttattttggtgcttatgaaatgaacaaaatagaagaaattatcatggcttagagtggacacgattgctattgaaaaatgtttttatgaattttttatttgactggttaggaagatcccttggaaatgggatgaatagtttgttaatgctttgagctgtctttaagatggaggatgcctttttctcttttattttattttttgtgttttgagtgatccatgtatacatgttgggtgccttggtttgccccttttaagtgccttctaattttaattttgatttaactataaaaaattacaatttttcagtgcattaattcataaaaaccacaaaaatgttctaaacttttaacactctttcttagttctaatcagtttaaccattaatggatggcttaatatagaaaatgataaaaccagtctccaactaatccaaaagaaataatttatgtaaaactaaaactgcatatttgtgtggaatatggatattgaaaccattgagggctgtcaaaccttgtaagatatttatgctgaaaggaactcatcatgtacaaatacaattgcatgctcgtgtagattttggatattgaaaccataaaaaactttagtcatctttaaatgtataaacaagaaaggaaaagaacaattaaatttgggtggaagagtttgcttcatggaaatcattgtaccatgggagggtagtgatcccctttttagtaaaaaaaaaaagaaaaaaaaaagaattacttataattaacttaacaacatctaggtaacataagaaatcattcctaggcaaaatattggtctagatactttttatttatctatttttctttttgttaagaacaaacactttattgccatggaataattaagtaaatagaaaaatgtgaaatccttgctttgaaagaagattgcatcaatttgatcaatagctagaacttggttacaattagaagtcacagtgacatcccatctactagagtgttacccataaatgctcaaaatattttgttcctaggaaatctccataaccacttcactaataggctttgaacctcaaagcatagttgttaaaaatttacgatacacaatatgatacaacaatataattcattttcttttttatagaaatcaatatgaatcgcaatctatatcttattttgaagtgtatcgtgcaatacatatatgatagaatacatgatattatgatacaatgatgatacatacatcttcaactattttctataatttttaagaaaaatcaaattaatttttttgttaaaagaattattatattaattgtttaaaatgtactaaaagattaaaaattgatgataaaaaggaaagatagataaaataatcttatttcatttgaatggtttgaatattgacaatgaaaatgatggtgattagtgaacacaatttttacttaatatattagattttttaaatttctcttttggtggaaaaggaatgatgacaaacctgaaaatttggaactttgaagatgataaataaagatatatatatctatgaacaacacaataagtacatatgtctagttagaatttggaaataaaaatcatagctagcaattgaagaagtttattttagtggattatgtgttgaatctatatattatagtcatattttgttaatttgaacttataaaaactcttaacattcagtgttttcttatgatataatatggtatggtttaactcttttgatcctactatcttccataaaatttgttatatattattctacacttcatattttcaatagatatacacgcatatacatattttttctatttatttttcactataaaaaaaaatttatgatacatgatacaatatgcacgatatagaaaaataaaaacacaatatatgacgcgttttatgagttaacaactatgcctcaaaggtatttcctcccccatctttcacttttttgcttacacacttttaccatcaaacaaggtgatttctttccttttcccctcacttgatcataaatgtcattctttagtccctcaatcctatgtgccactttaatagaagacttcaaaatagaaagaaaatgagagcaaacatgggataagcatgactgtaccaaagttattctaccatctaatgacatgtaggctttttttaagcaatctaaccatcaaaaaaccctatcaaatattggatcccaaaaagagaactctaggattcccctaaccattcgataggaagacaataatgcacatggattaataggaaacattgcattatgaagaagaacccaattctaagactatatcttgactcattaatcctaagaaggtctagatttattgtcaatcctcaaatgtccaaacactaataaaattaatttaatactttgtcatttgaattagctcttgagaagaaaattgtgtcattaatgagctataaatgagtcatccttatctgatttctatcccataagaagccctaaaaattccattcctccactcataacatcaatttgcttagcacatttgcccttataggaaatgatgagtcgatcactctatcttaaaccccttgaggtctaaacccattctttagcatatatgcttgttaatacacctttttatttatttatttattttttattgagaaataggagatgtattaattacgtataaagagttcatgagaaggatggagaatcttccccataaatacacaaacttgatcaaagaaatggtcaattgtctttccactctccctacattggatgcactaattaagactaaggactttgaagggtcttctcaactgtagcatgtcattgttatgtacctctttgtgtgctactaaccaagcaaatgctttgaccttacgtgaaacttttgatttgcataaaaatttagttagatggaaagaaactaaatttgatatattggacaagaagaagaatgattttaatgagaataaatccaaacagaaaagtgcccatgcttttgcatctgggtcatatggaaacaagtgtatgtagataaggaaagttataagtctttcaagatccttaatctttgaatcaattgagttgtggtgaaaaacaatactccaagaaaaagagggggcataaccaataacagctgaaatggagagatttttagctatgatgactttataaagtcttgaaaattatgaacgcaaaggttgatccctccaccacaaatcttcctagaaacgaattctagtcctatcacccaccacaaagtgagtgtgtgtgaaaaaaaaactagagaatatatgcaatggccttccaaggttacaaatgtgatcatctgacaatattattaacgtcctaccattaggatgtgtcccatagatatttaaaataaatggattccaaagagcgtaactttccttacgaaacctccaaagccatatcattaataaagcacgattcctcagagaaatatttctaagccccaattcaccaaactatttaggcctacacactagatcctaactaataaaatgaccccttttaccctccccaaatcccgaccataaaaaatctttttgcgatttttcaatccttcttgttattgatgttggaatcttgaaaatggataagaaatagcttgggatgtgagacaaacaagaccgaatttgtgacaacccttgcaggtgctacccacgcaaggcaatatctcatttatagtctaaagactgagatggagatactatcctatgaaaggaaattaacttgtaacccgatatatggtgtcacccgatatatggtgtcaaagcgcataaggaaacatatcaaggaactatatatttattacctttttgagatactacgttttgagtacataaaagttggccttaagggatcaaaaacttgtacatacctaaggaaatggctacatgtcagtagtttatccaaaaagaaacaaaaagaaaagggcaacaagggttatatgccttgttgactatcctctggaacttgcttagtatctggttttacttagtcgtcatttgaaaaatttagggaactacaaagtgagtataactcaatgaatgatcatataacgtaggttttaggatggttagtccaaaatagtgaaaggagtttcatcatgcatgtaacactcaacgtagataatagatagtataacaatcaaataggcatacaacatcaaacaacccgatgtataatcaatcaaacacatgcataatccatggttgtagtgccactccaactcccgacacatcccaatatcatgcaatatcattgctacaatgccccttgctccatcgacgtatatcatatatgcatccaccgatgacatatatctcatatatcatggtgtcatataaatacagtgcctcgacatctctcggcatgcttctcatacaaactgctccagtgccttgacatctcttagcatgcttctcatacaaactgctccagtgcccttcatctctcaacataaaagatcacaaagtcaaccaactatggtgtgtccttccatctctatggcatgatataggtccaacgtatataacaatcacatccataataataatgtaaagtaccataatgatagtatcagtgatttttagtgaatagtacatactaggtaagtttctaggaaagactagaggggtcacaatggttccgcttaaaactcagcttccctagacaaagtttccctaaaccatacacatcccttcatgaccactaaaccatcttaactatatatatacatatatagatatcaaagatacaatgaacacttttgttataaacatagtatttgactaacacattttcaaagcatatctcatgatatttaaaaaataatgaacacatataacattttaaacatgagatatataattatgaaaccattttaaatcatatattataagatcactcacctttttagattggaattgttgtacaacatttgttatgatagctcgaagatccaacctttggaatagtactaccataggagctttttaatacttctttcctttcctttcttggcaggtgaacatctgatttataagaacttaaagcaagtgaatatataggtgactcgttgcgtggcctaactaggtgccaattaaagggaaatgattagtgtctttcttattgcatagggatataacatgtggcacgtacttgatccttctaggtgcttgagtagctacaacagcttgatgagtcactatgccatattaggtgtcacatgatgaaggcgacttagtgtcctttaggttgcatgcatttgacaccttatacgattgcgtgctctcaacaccacatacttggttgcatgctctttgacacctcatacttggttaatgatagacaagaaggtgatgctcatgtttttttagcaaggaggtaattaaaatgaaacttcaaaagtatcattattaaaaattagggttattacaaaattagatttattctaccccctaagaacaaaaaaacttttttccacctatccaatctcctagagattctatcaatcattggatcgctaagtaagtttgatttcatatttccccctattggaagacccaggtaaggccaattagaaactgtacattcaagccttaaaactatcttagaggtttgatcttaacttgtgttgatgcaagaaataatgcttttgtttagattgatcctaagccctaacaaatgccccaaaactagcaatattagcttaagagtttgcagatcttccatagaagctcttgagaaaaagatagtgtcatcaacaaattgtaaatgagacactttagtcctatttctgcccactaggaaccccttaaataaatctctctccttcgctcttagcaacaacctacttaaaacatcagtaataatggtaaaaaaaaaaaggggaaagaggatctcgttgtcttaagcttctagatgccttaacccaacctttggttgtttcattcactaagaccacaaaacttgccaaagacaagcatcccctcatctaagactccatttcgaactaaacactttttttttcaagtgcatggttcaaaaaactccaatctacatggtcataagatttttcaaaatcaattttcaagattatccgttcttctcttaatctcattttcttatccaccaactcattaacattaagacaacatccaaaatttgtctcccctcacaaaaagctgcctaggaaatgaagatgatatcatggaggactttaagtaactaccttgataagacttagtttatgatcttgtacaaactagggaccaagctaataggtctgaaatctaaaattctactggtttgactcttttttagcactagaacaatgaaggtagctttggtgttttggtttattattcctttattgtgaaattctaagaatactcttagaagatcatccttaatcatatcctaacactcctaatacaaagcaatggtgaaaccatcaagctcgggggccttttccttgtttaactaaaacacaacattgtgagtctcctcttctgaaaaagagcaatctagtcgattagcactctctgttgaaataagagaccaatccagtctttttatcctccaagaaccacgtgtaggcttagagtataacttcccaaaataatgtttaatctcctttgaaatgtttttgatgttatctagaactaccccttcttttgacaccaaagactttataaattccctattccacctaccattggccacctcttaaaaaatttagagttgcaatccccttctcttatccatttgacccttgcttttttcctccaaaacacctcttcctcgaacaacaactcttccaatttccctttccttaaggcccttcttgctgaaagttcaatagtcaaattcccttcctgttccatggcatcaaagctaacaatgtttgtgagaatatttttctttttcttctttaagtcttcaaaagatacttcattccaatctttcaactttgatttgacaaactataactttttcatgaatttatgaccttcccaaccctacaacctaacactcattccattaacaaccaaaattttctttgaaatctgggtataacaactaactgttttcaaatataagtggtgtcgtacctcacttaagagggttggtatctaggacaatcagatagtgatccaaagtaaatttggggagcacttcttggatgctttgatggaatccttgcttccattcatttgaaaataaaaatctatccaacctcttacgaacaaagatctctagcataattgaccatgtgaaagactcattcctaagaggagggtcaatttttttgtggaaatcaaaagccccctcaaaggttaaggcccttatttggttagtagcaaatgggaaggtaaacaccaatgacatgttacagttgagaagaccttacaaatctctgagtcttcattggtgtattttatgcaaaggaaatggaaagtcaattgaccttctttttctacattgtcctttaactttggggctatggcacaagttttttagtttagcaaggatggattggttccgcctaggagcattgacgatatgatgattatttcttttagaggattgggaattcaattagaggcaagactttttggcaaattgtttgcctcactttattttggatcgtgtggcaaaaaagaaatgcaacgacttttgagaagaaatggagatcggaaaggatgttgtgggatttgcttcacttctactcctctttagacctcttgtactatcgcttttagaggagctccacttaacgttatttaactcaattagctttcggtttgtaattcaaaagtttgagatagttggggttagccttcgtgtatagtttttgcatagtggggtgtaagcattactttgatcaagttttgtattttcaaggaaggacttctcatccttttcttagacttttattatcattaataaatttttgtttccgatgaaaaaaaaaaaaaaaggtcaatcaactcactttttctaatgaattcatcaaagtccttcatgcttggggttaatcttgaaccttccaacttttctgaaattctttttatgacattaaaatctccttgaacacaccatttcaaaaaagctaaacctaaaaggtcttgaagctccatccaaaaatccttcctaaaataggaattagttgaaccagagaccaaggtaagctaaaaaatccctttttcatctaatttcaacttcattattactaagaatgaccctagaactatctctatacaattgaacttcaaagcatcctaaataatcactacccctccctaagccccataagttgggagaacaacccactctttgtttctaatcttccacacaatacctataaaccgcctatcacaagacgcactctttgtttcaaaaagaattacaacattcggattttcatgaaattccttcacaacccttcttttctttctagaactagacctttaatattccaattaatgattttcataattacaaaaaatagcccagaaaaaacctaggagacagaacgtatggaagcctagaagcaacaaataagggtttattcttcctcctagagtagaccttatctaaagaatgagcactaatattgcccaatcgaatgccattctcacaatatttgacaagcttgatattcatagatcccaaaaccaactgaatagtggccatttttgtaggagtgagaccttctatatgaaaatatttcaactgagaagggctcactaggattgttattaggtgaactatggaaagagatgcactttgactcctggctaggaataactattagactccacaccttctgaaatgggacaaccaacctttgaggcagatgatacattgtaaatcactaatggtttgaacgaggtgattaaggaataacaaattgaccaaaaaggaaggatggaagtggacaaagacaaaacaggggagagaggagtaggaagcataagggtagcctactaaaatcttgccattaatagtgaattgtgcgttaaaagaacataactggacttgaaaaccacaatagagaacaccccctctaccttcagccacacttgaagctacccgtgacaaatgcgagttgagatttaaaccgtccctagccatcgtagtcgcaccttggacctttgacaaccttggagactccacaccttttgaaatgggacaaccaacctctgaggcagatgatacattgtaaatcactgatggtttgaacgaggtgattgaggaataacaaattgaccaaaaaggaaggatggaagtggacaaagaccaaacaggggagagggaagtaggaagcatatgagtagcctattgaaatcttgccattaatagtggattgtgggttaaaagaacatacttggacttgaaaaccatagtagaaaacaccctttctacccttcaccacacttgaagctacccctgaaaaatgcgagttgagatttaaaccatccctagccatcatagtcacaccttggacctttgatgaccttgttccctccaaagggacgaaactctcattctcctcccccaaggatttttcaacctccattatgatatctctttcttgattaaaacctccgatctctacagcaaaaccaactatggttgttgtgcacagatgaaacttggaaagatagaggcaaacttcttgcacgtgaactagtaatctttgtgactaggcttggaaatggtagcttaggcatatgactgtggaagattgaggcattgacgctaagagaatggagccttgagtctttaggaaatttgaattagactggtcaacctttgagcgcaatgacaagtggcccaaattgcatcaaaagcccttatctacaacgatttccaattgggcttgcctccttaaaggtgagataggaggcccaaagccttttccattttttgggttttcaccagaaagagctttactaagagtgcgttgggcctactgccatttaattttcaggatcatgtatctccatcgaaggccgtttctatttgagcacaaagtagtctaaatacattttgtatctcgtgtggatacattttgtattgatatgtgtatgatcctataaaattggtgacaacaattctttaggacatctaatgtgcacccatctaagtttaatttaactaaatctattagaggtatggatacatatgggaagcaactctcttcctaacctctttaactcaaaaatcatgttccaaccaagcttaaaatgcccaagaagtaacctgaaagtcatagaagtaaaagtctaaagaaaggaacaaaaatgtaaaaagttcgaaatagactttaatgtccttatttatcctaaaaatcctagcgttttttcccttccaaactataaataacaaagtgaacaggtcacatgccatgagacccttcattcccaccctcacaccaaaaaaataaaaataaaaataaatgaagaaagaaaaaaaatgatcatcataatattattcacccttggaggaaccttatttatcctagaaagtctaaaagtctaaataggctatgccaaagccatagtgttatactcttaaagtatataaaattgattaggatcgagagctttaaaaggctttctcaatggttatcgattttcttacttactgtaagccatgcaaaggccttaatcttcattgtgactttagatttccaaacaaaattggttggtcaaagaaagaagttggaattgtagagttataacaaatttagtttgtcttggaagtaatgtgacgagcaatctttctagcttcctagtctattttttgtctgtctttgcaacgcctaggaaggtgaggtgtggatcagcaagggataaatactgctggaacatagattcaaaaggaaccttttagattctaaggtgactttagtggactcgttgtagttagtgagtgataagttgataagttgtagaaggtctccaagaaggtttcttctcaatcaggtgctactatagatctttgaaatttaggagaatctttcttagctaagaggatttcgagccctagggctttgttgaaggttggtttccttttttgggaggcagtacggaaaagaatattttcaactaaccagcttatgaggagggttgggatgtggtttagcaatgctgcttttgtggacatgattgcaagtctgcagatcatattttttattagtttttttactatgtctttatttggtgtgtcttgggctctcccttaatcagttagggatgttttccttagctggcaggatttgaaagttgacccctttgtgtttcttttggtctatttattataaaatgcaataattagcacttttgagtggtccattttggttgtgaagaatgtatttgttcttctaggcgaagaagtgctaatctttccttcataaattttgaagacagcttgagtgatagttaagtaagtgaggttagtcatttgcttcttgctcctattaatttttgtacaacttgtgtacttcatatttgtacatgggttgcaccccttttttcccaaggtgttttattaatatattttattctatttttcctatcaaaaaaaaaaaaaaacaaacaaaggggtgggggttattaagggttgggttggtcacttggaaaaaaaaaaaaaaactaatgcctggaaattttaagtttgaaagcatttttttaggctccataggataaatcataagcttgtaactttacatcaaggttggggaactttagtttcaatgtcaaattgtgacttttatttattattattattttttgataggtaactcaagtgaaagtacgtgatgaaatactaagggtataagggattttgaatgggagaaggctctaatggtttagatattgctttcaatgtttttgcactattataaatcataagccatacagatgtattaatggagctgttaaaataattttggtttaatccatgtggaagttgttacctcctccaatatgtctggtgtagttaaactttgatggatgttctttgagtaatccaggataattcggtataggaggcgtgattagaaatcattcaagtacaatattgagaacttactctaaacctactggtgtgggttcaactattgagtttgagagaccagctttattgtagggcttgttgcaagctaaaaccttttgtctgttgctatctcttaagtgtctaataggtgtaaaggctcatggaagttcaatcgtcggctcagcaaaattctagatgttgctagcgaaatgggatgctctttcttttggatttctctcatagctaatcaaggtgcaaaccagttaactgaggaaagagcaaaacacttggcttcttttgttaagagacttttttcctccttgagcatgtagaacttttgtagtatgttgtacattgctttatcattcaatgaagtgaatatattttgtttctgatttaaagaaaaaggtcgacaattatcaaggtaagtctacgacttaacaacttagggcttattttggattaaatttattggaatcagctgcattaatgtctggattgcattcaagttctttttaaaattctatcttatgggttttgccaaaagctgaagggtttgaaatgtagaaaggggcattattaatctcgtttccctctattctgataggtgtttctctgaaagtcaatatgtttctctgaaatgaatgattattgacttttgacttggaggacaggtcattccactgatcatcatgtttctctgaactgatatgttaatgcatttgtgggcatttcctactcagtattaagattctatatcaggttgaagaaaagtgataagaatcttttcagtaaggttgcttgtacattggggctttctcaaggggcatgggttgcaattttcagtacctctaaaaattatgttggatgccttataaagaatctgtgattagattctctcttttctggtttatttattctctctttctaattacagaagtaggaaagaacttagagagaagtggaagggtagtagacagcaatgcttcttctctggtgctgagagaaattgaagaacttattcttttaattctatttagaggagaatccaagttcttttctttatttgggttttcatttgtaaggaatctgatgttgttttgtccctcataagataatccgaatttcattttcttctctaggcttcaaatcacttgatgtgatctattggttttcctgttttgttctccatgaagtgtcttgtcctccatgaggtacaacttgtactacttctcaaccactgccatccctttttgggatgcattttttttttaaaactttttttatagtcagctaaaattcataacattattttgttctgacatctttaggatggttagttatatccttggatttttttttttttttttcattctgtgtgtaatagctttattctttttggaatgattgatttcttggtttttgaatttcttttacgttattaattgattcttgttttgtcaagccaacaattgtttatctaaatgtaaagcttttctatgctaatacacacttaaatactttctgacaccaggggactcaaaaacatcttaaaaattcatattaaaa

SEQ ID NO: 11961 - DNA, 13692 bp, Vitis vinifera
  Intron number 7 from transcript GSVIVT01027871001 (locus G SVIVG01027871001) derived from phytozome v7.0 (chr-ID chr5 ; pos 8815593 to 8829284 reverse strand)
caataagtgatattgtcaaggattcacctcacaaggtatgtatatgaggaaacacatggtaattatgatatgattaccttaagtaatacctcagcttgaattttggaacccagggttcttttctggcttgactgcctagcttttgtcatgaaaactactttgtctggtatgaagtttcatagcagtgttcctttatttcataacttacttgcactacatttccttgcactaaatcagtggttttattggataagttctgtaaagctggagagtacaattgtgtccatctgtttaagatcattatgctttttgtaagtagtagtatcatgctcacattgttcttatgctgtgatattagtactttaaatctttgacaaggaaagttatgcacatttaattctttaaattcttgtgttggtggtctcattttaatttgatggtcaatgaggcaattattctcgccatggtacagactattattttttatttcaagagatccaattaaggtctctttggttagtctacttagagccatatatatgttccatgacttcaaatcctttttctccagaagctctaccattgtgctttctcaaatgcaccagatctggaggtgagggtcattacacttttctgtgtctcttacccaacccatgcccctgtgaccctgagagcaagcctctaacattccttggaagtatccattgcaatggatgagaatatgaattgctgactgctctctctttgcaaaaaaagtatccacttaccaaatgcccaccccttttcatgaggatttttcctgccttgagtcttaggtgaaaaaaacaaatgctaggtggaacatgccgaactcacccaaacttccttcatagggaaattctcagaaactcacagaagatgtatagtagaatggttttacaaaaagacatgcattctttcccttctccacaataaggtgtcctcccctctctttgcatgggcactaaatgaatgcacctaggcaagttggcctgttgtagtgcaaccttaggatgattgtctctaatcaactaagcagttaaggagagaaacgacaaggtaaaaatgtgtcagtgggtgaaagaaaataaaatataaaaaagaaaaagatgaagaaaaaataagagattttagagtctcacttaaaagaaaaaagtgatgttatctcaccattaatgcatacatatacctatatatatatatattaattattcagtattaatccctttttgtagcaattagccttatttataggctatataaaaccctaaaaattgtataaaaccatgaaaaaagaaacatagcctatataggaacttagtaggactcttctccctttcataaaaccattaaatcttccaattaatagaattaaaaagaaaaaaagaatcttttctttttaaaattagaaacttagactttctaaaaacttttggtaatatgagtttctaatcaagtaggcttctagatccttaacaaacaagattttaaaacttcccaaattctaaaatcttcattttgtttcttagttttcttttgttaaatttaccttgaggtgctcattcccttcatggacactagttctagaccataatcatttgatgaccttcaaaaacaaggacaaaccttcaaaaacaaggacactaacaaccaatcccctccatcaccgacaagtatcttactttcagatttccgtctaacacaattttgagtaaggatgggtagctttctttcaaagacactctccacaccatctgcgaaaccaaaatttggttcttaagccattcttaatcaagatacaatgcctgagccaaaactccacttacttgtgccttgtagctttctagagagagccacaacagattgctttgcccacttccttagaaatccacctaccctctatctcactaaattcaaagttaacccttttccaagattgttttcttctctataaaacctccacaaccattttcccaacaatgatatgctaacacaagtataagtgcaaaacttttgatgccaaggccacccccactattcttgttcttatgacaaagtccatctcacaagatatagctttttccctaaatcatagttctctttaagtagtcttgttgaattttttttttttttaacctctttctagatactttaagaatgatgagcatggacatatgacaaacaccttttttgaaaggatggcaaacaagtcatatagagaagtatgagaaggaagaaggggcttagtgttactacaatgtgagagattggtatggggttggagtatgaaatcaattgtagggttgcttttgtagtggggtaatggaatgagggcaaagttttggaaggatagatgatgtgaggaggggctcgtatgtgtggcctttgcctccttgtatgctttatcatcatccaaagacgcttgggtgctggatttatggggtgtgatagacacgcccccgaggtgggggactggaatctgtgtttttgtagacactttttatgattggaaattgggtattgttgagttttttctctcaatattgcaagataagtcgatgaatagggaagatattgacataatgatttggaaggagtcaaagaatgaagttttttctatcaaattcctttagtttgtcttggagctagagattcaattcccttccttttgagcattatttagaattcatggatttgaactaaaatgagcctttttgtttgggaagcctacgaaaaagtattgatgataattaacttaaaagaagagggtggttgttgacaaacaaatgtcttttgtaaaattgagggaaatgatcatgtttttcttcactatgtcaaatgaaaggttttatggtagttgctattctccttatttggcatagtttgggtgctttattccacaatcaaagaaattctattgagttggctccttcataggggaaaaacaaaagaaggtttagagaaccgctcccctatgcatttttcggacattgtggaaggaaaatgaaagaaggtttagaaaaccactcccttatgcatttttcagacattgtggaaggaaagaagtgatgtgcatttgaaaacgatgagatgtcaaatcaaaagttgaaatgttattcctaactaacctcttagcatgtacaattgcttcttatctatacaaaaactaacctcttagcatgggttgagatgtacattaaggaaggctcaatgtctttcattgattagttaggaactcgttgagagagagagagagagagacttatttttgtgttttctcttttgtggctttgcatatgttctatgtactctgatgtactccattcttatgtcgtatatatgcatctttcattgcttataaaaaaagaagatatgtaatagattgacaagttagactagctacttatgatgagagttaatctttcccctttagaaagatattgcttctacctcttcctaaagcttgcacacaagccttcccctaaagtgggtatgtctttgtatctatgtgtatagaatttactcacaattttttaatgaacatgaaagtttgaaacaataatgtcatgttgtgtcttctatgtttttgacccatttcagcaatgtatcatgtctaacatatgatataaaaaaaggatgtctccatggcatatctaatatgtgtccaagcatcgttcgggggaggtcttcatctaatatggtatttgacaagtgctcctctgtatatgtgctatattggaactttcttgtcatggttttttcttgtatgtatattttcaagggttttagattccatgtaatttggatttcattcaagttgtaggtggcaagattaatcaaatataaaaaagaatgtgagttaaggtgatgaggaaagacattatttgttgcaatcacttaattggagacatgaccctaaatggcaaaataagattcatctagttgatccttattacttggattaaggctttgttaagttgggtacaccaagcgtatatgtgtgtgtgtgtgtgtgttttttttttgatagataaaaggaaatatattcaacagaaagaggaaacaccaaaaatagtgctctcaaagtatacagggagtatagaaaagcagcccaaagactcaaaaccaaggggggagggaagaaataacacttcaccaacccctacttagagcctagccaatccaaaaaactaacaagagaagaagggctcaaaactatagacaccctaactcaagaccaaagattacatacaaaagaatatttcagtctatgaagcgaaagttcctcattcccaaaagctaacaaattcatttccttctagattgaccaaaaaatacataaggggaccatttgccaagcctttttacaagttttccccacaaaagctccatgccacccaagaagagtttccttcactaaacatgagagaacccaagccacaccaaatagggagaaaagaagattccacaaaacccgcgtctttacacaatgaagtaaaaggtgattcaccgtctctacttcagagaggcatagaaaatacctgtttgccatagagtaccccctcctctgaagttgctctaaagttaaggttttaccccaagaagcctcccaagcaaagaaggctaccttaggaggtacattcaccctccaaaatactatcataagggaacaaatgagagtctctaggctccaaaatagaataaagcgacttgactgagaaatcaccactctttgaagccgtctaaaccactctatcttcgtcctccctttgcaccctaaaggcttggatcttgagcataaaacgctccaccatctcaatctcccaatcattaaacgcccttgagaaaagaggggtccaaccctccccatcactgtctaggttccaaacatccgacacccaagcatctttagacagggagatggaaaataaggaggggaatgactcacaaagaggctcatctccacaccacttatccttccaaaatttcactcttcgaccactacccacttggtaggctaatctactattcagaaacaaccacttatttctaattgctttccaaagcccaacgccacacctcccacttacggcccaagtgcaccaatccccctcctccacaccatatttgtcactgataacttgcttccaaaaaacctctctttcattggcatagtgccaattccacttacttaagagagctctattcattagagctaaatttctcacgcccaaactacctttccttttttccaagcaaaccaggttccacctaacaaggtgtggcctttgcacaaggactcccccaccccacaaaaaatccctttgaatcttctccaatctcaaccttacttttctgggcaaataaaagagagatatgaaataaataggcatgctagagagagtgctccagattagagtgagtctccctccttttgaaatatgtgtgtgttgattcattcatatttgatgtatagtcatattgtctgtgatcatgatttattgtccacatacaaggtgcaacatgataaatataattagacaatatgaatgcgggtttgagaaaatttgtcgtcctcatttcgtaatgaataattggtgtacaaatgtgtttcaagagtacatggaatatacaagaaaggaaataataaaaaaaatgaaaaaaaattctgggcctaaaaaataaaaactgaataaattttttgaaatgtagcattagtctataaaatctttgacttattctataatttaattttcctctaattcaacaacaaattagactcaaatctactcctgatttttcgacattccccctcaagttggttagtatatatcaaacattcctactatcacatataaatacacacatacaaacacattcctagcttgctagttagtccttcaaaatgccatttctgcagtccctagttaggatgcctgttttcttgttggaacaaacaacatgcacacaagtccttaagtttctccttgataaaatgacagtctacctccacatgcttgattctatcatgttgtatcgattgtgtgcaatgtttattgttgtcgtattattacaatagagcctcataggtctttcaattggaatctttagctcattgagaagcctttttagccaaagaagttcacaaatccaaactgtcctctagaagacgtttaaacttagattgttatgagtcttaacatgggattctctatgctagggttgaaggtatgttggagttgaaagtatgtcgatacggggagggcggtgttggtttgctgtggactaagtcctttattatttctatagaggtggtgggagggaagttgagaggcattattgaggaaagagggagaggtcttacaacctgaattaggcttcgggatctgagtttaagttgtctattggaagggatggaaacttgctgtagagatgaagtcttggcaaggtggcataagtcttgggaggagggtgggtggaagttcaagctggagcaatgttcgaatggcgtagagaggtttttttctgtttagttattacaagggaggcaaaaaggttttcattgatcttccctgaaggtaagggccatcttaggggatagtctattttggccgagaagctttgttctttaggaatcgttccctcttcagaggttgagggagtggtctcccctcttgaggtgaagaatcttccaaaggaagggactattgttgggtcctttgttgaagtggttaagaaggaccaatgggtggtgggggaagcagttcgactttagttggaggagggtgaggtgaagtgtagggagaagttgagctagtgtatggtaggttggtttgaggagatgttggaccagctaccagatttttcttggttgagaaactttgtgacgagcctccggtctttgaaagggaggatgaagatctcaggcttccggggagccctgctcttgtttgactttgaggattgctctgaggcagaaagggtgctcgttagaggggcaagaaggttcaaggagaattttctatatctaataagatggcatcttgaggtagggtgtttgtgtaaaggggggtctgctaaggaactttgggtgagggtgctgggatttctgctgcatgtgtggggtcagtaggttttaaaaaaaataggggaccgttgtgggggtttattgctgtggatgaggacactgtgctcttgtctcatctacggtgggtgaggattttggtttagtctgatgagagagtcttgcccggatctttgcaagttgttgtggggtgctccggtttttccgttcagttgtagtgggaagctccattgagttttttaatggtggcttgagtagcaattgcagcaggccttgtggtcaggaggaaagggaggatgtggagggtggttcatgtgccagcgtagagtgggaaaggagagacaaccagctcgtcttacaagcggtgtcatgttgcaaacatttggcagggatcctcaaataggagaagatgcagctgtaagttggccaaaagctgcagaagaaggggaagaccaagaacgaagtgagtggagtatagctggagaaggaagggtgtgtttggtggggcccgatgttgcaggaggtatgggcggattggagtttaggcccctttggatcgccaatggatgggtaagactcctattgaccacacatccctccagacccaaggttgtaataggcctattatagaggcccataagatagggaatagagggttcaacagttagttgagtggggattaggatccaaaaggccttggaggccttattaggcttgttgcttctagggcccaaaaggcatctagattcatagtggtgggttctctggatgtgaacgatgggtttactaaggcttctcgaagggggtgtctcttctgttgagaccgaagagaccgagtttaggagttgtgccgaagatgaggtggaaggcaagctccattacaagcgctgtgttcttgcgtggcactcattgatgaagccctcgaggaggaggcaaatgggtttcctagctctcctagcttagggcttttggactctaggatccgactgcttcaggtgttgcttcatgatggtagagtgttggagattcaggaagtgattctaaggacccttagagtaagaagttggcaattagggatgaggagtcgggaccctctaaggccttggagcatgcttgcatcttggagggagaggatcctattagccttcccaacaaatttgtacattttagctactttgtggggatgcttgttatgggattcaagaaagagattagctccctcaaaagaatttggagccaagaaaagggcgtggggttaagatctcaggtggaaaaaggaatcatctctcgacatctagtcttaagagggaatcgcgtaaacttgagtgtgtagttaattacaatagttcttcatgcactattaggggaaatgggaggaacaatggggggtcaatactagaggttgttgtattgttttttgtgttgttagaggattctaggtgggggttggttttcttcttaagggtggtaggttttttgcctcgtttttctcctcttgcttgccttgtggcttttgtttgtatactttgtgtgtacttcaatgcatcattttgcaagtgcttttaatatattcttatatacctatcaaaaaaatgttcaaaaatcccatgtgcatatagcttgtaacttagcttttgcactactcggggcaaccaaattttgttttacttttccaagtaacaagattgataccaactaaggtgcagtagtttgaagttggcctttggtcagtgagattatcaacccaatcaacattggtataggcctcaactagaagatgctcattcttcccaaacactgctttgagatgctctttattagggttgtgcatgaactagctaacaactcacaacaaaggaaatatctagccatgcatgtgacaagtaaatcggcttcattacaagcctctgatattttctcttgtctatagttgcagcattacttgttgccccaacttacaattttgatctatgggagtgtcaattggcttgcatcctaaaacactattttccttgaatagatcaatagtgtactttctttgagatacacaaattgcatctttggatctagcaatccccatgccaaaaaaatatctaagtggtccaaaggtccttgatctcatacactattaggatagcaatcttgctgcctagtgtctatttaaaaaacacaatatggttgacttgactttacccatagctttggattgacttggtaaatttatccaaccaagctctaggagattgcttcaatccatagagtggtctcttgagtttgcacactttctcacctccatgaattttctcaaagcctggtgctaagtccatgtagacttcctcctctaattcactgttcaagaatgcatgcttcacatctaattggtgtaagggccattcaaagttggctgcaagagataaaaagacatggattgtattcatcttagtcacaggggaaaaaatttcttagtagtcaataccatgcatttgtgtgaaacccttaactaaagactggctgtgtatctcttgattgagccatccaccttgtattttgaggtgaagacccatttgcagcccaagagatgctatgctcttagcaaatcaactagttcccacgtttcattcttcttctaggtatccatctcctcaaacactgcctttctccattgggttatccgcaacgcttcctgtatattatttggaatctcaacacttgatgggttgttagcaaaagtttggtaagaaagagacgatctatgataagatacaaatttgtatgagcagattgtgaggaactatcatagatagtgagcaataggaatatcgagatcatcaaactgcatttctggaaccaagatggaagcactaaaaggatcagaattacttgctgcgacttctaggttacctaaattcgaagttggcttttggcaatgttgagaagactaattttccacttttgaagggtttcgctgtcttgagtaagcactaagctcaggttgaggtttttctaggaatgcttctccccttgtttttgatattcatgttgtggaaccataggatttgatgctggcagattgaaggacatattggaaagctgactattccttgagttgaactcaaattcctagaaatgatcttccacctcataactctctccctaaagagaggttttatggaaataagattgattttcaaagaaggttacatccatactcaaagaatttcttagaaataggatcatggcactcatctcttttgtgttggtgaataactaagaaagacacgttttaaatcacgagaatcaagcttggaccaatttcatgtatgaacattaacaaggggttgtacatccaaatactttgagaggaagagatgtaaatattctagtatgaagataaaaattcgagaagcagttaagaggtgcttcaaatttaagaatctgggtacggcattcgattaatcaaataagtagtgagggcagtttatcctcagtaattttttgcaacctcattggtgaacatgagtgctctagcttagcaactgcaagagggtgtctatttttttttctatccacaaccccattttgttgaggtgcatcaaataagaagactgatggatgattccttgttctaacatagactttttaagaattgaataaaagtactcttttccattgttagtttgaagaacttataattgtttttggaattgaattttaacgtagtgtggaaatttttgaaaacattctcagcttccgatttttcttttaaaaaataaatccagcaaactcgaatgtggtcatctataaatttgatgaatcattttgtacctgtaatatatttgatacgtgagggaccctatatattactgtacacaaaagagaatggtttagatactttgtaagattgagcaggatagaaaactcagtgatgtttggacaattgaagaattcttgtttttaaacaaagctggaaataactattttaaatatgaaacactaaggtggcctaaacattattttattgtcaacagaaaaagaaatagcacttctacttgctgccttagcttgtccactacatcagcattcccttcaaaatagtagtcaatcaatcttcctagcattggtaattgtcttccccaaatataggtcctgaaattcacagccaaattgtgagaaattgatgatgtagtttaggtcttatttgagtttactaaaagataaaagattacatgaaagtttaggcgcatgtaaaataaaattgaaggtaaaattctttgacaaaaaaaactaaacctttccctgcaataattgataaagagccattgacgacctttattctcagaccacctgaataaggtgaatatgttgagaaccaactaaaatggtcagatgccccaaaatcaatgatacaggggactttatttggcaaaaaagtatgtgaggcattcaatgagacaaaacgtatgggtcaatgggcaagagggtgatggattgtgagagagttaggactgatttatcaatctgtaccagtgctcttgttccttgctgaatggtgaaggattaatggttccaggttggtttttagctattgcttgcattcctcggccatttcttttaggagaactttccaacagtctctttgctatgccacagcttgttgcaatggttgcaccacaccttccctttttcttcacttctgaatttttggacctccagtaacagctgcagtcttggttgcgacagtaagtaaagctaagttttcagttgtggtagaaataactgaatttcccatcctaatgtgtgccctgcttgcctctctcttaacttcagagactgcctctcggatcaggttatttgttaagctctgtgggaaattcaaatacctttccaactttttcttgaacctggcactcgtagcatgagcatcaaatttgtcaaataaatctaattattgccaaattctattcagaatgtatggtatttagttacatcctgagttccttgctcagtctcatgaattttggtttttatttcatatacttgtgcagaattcccaagtcatagtttgtttcagtcactgcatctgataatcctttgctgttgaaatagatatgtctgaccgatctttggctccattgaattaaccagccatgatataatcacggaattctctgaatcccatgtagaaaatgatggatcatcctcctttggtgctttgattgcaccggttgagtagccaaatttcttataacctttgatgaatagttttactgattgaaaccaacgaaggaaattctatccattcagcttatgggtggtaatttgaattctcagattatcaccagttccataagtggtattctgaagggctgctgttgaagaggtactggccttgactctccagaaagttctcttcaatcactccagacatgtggtcctgtccctttttgcttggttaaactctcggcaaaccaaacaaagaactttcctctctgattccagccataaaaggccagaagaaagaaaaggagaaaaaagagtttttatttttttatttaagccgacttcagtagggaactgagctctgataccatgaatgcaggtttgacagaattttttgtgctcataatgtaatgattaattggtatacagagatacttaaaaagtacatgcgatatacaagaaaggaaacaattgtacagagaaaatctgggcctaaaaataggaactgaatgaaatttgaaatgcagcaataatctataaaatcttttgacttattctctcatttagttttcctgtaatttagtagcagattagacttaaacctaatcacgattttttgatacaatataataatgcaatcaccaagtcacatcattaaaaaattaacactgaaacataccgaaggagaaagaaaatcagccaaaggagttgttgctacgctcattttaatgacaaaccaattcgtatgctgatcaagctatggtctgaacattcacatacatcctccttatttttgcatttttagcaggttcatggttttagagttatacgtctattgaatgattagtttttgtttgctctcctaggcaccttaacaataaattcaatacttgtatgtgtgtgtttctagtcactttccatcaagcattactttgttaacttttttgggaaaggatgtactaagttacatattgaagaaattcaatattgcagtttctataacatggcattgctataaggtgaagatgattgtgttttccctcttctttgttggccttaatgccttgtatacatcatgtataggtgttcttctttaggcactcttaatacaattgcttttacttaataaaaaaaatcttattgtgctgttcctaaatgctcaacagtcagcatcaccaattaaatttcctaagattttttaataggctctaaatttattttatcttgttctgtagcctgcgcttattgtgtcaataagccacttgctggctttggtctttctctttccctttcatatttgataaattgatccatgtttgtgcattgttgccacagatcttcattggtgggatttcaagggctctttcatc

SEQ ID NO: 11962 - DNA, 2251 bp, Vitis vinifera
  Intron number 9 from transcript GSVIVT01020712001 (locus G SVIVG01020712001) derived from phytozome v7.0 (chr-ID chr1 2; pos 2879350 to 2881600)
gggcattttccagtaatccagatattcaaaaaaatgtatgattcatcttattctggtaactgaggactgcttttatacttcaattgcctctctgtagcatcacatgaaactattctgtatggtatgaatttattattaacttattgacctaggatgtagaaattatgatctttccttgtggtaaatgtgtttgagttgatgtgtttgtctttcttgccttggtctttagcatcatattaaaataattcttatgatgtgaatataatgttcttcagttgaatccataatttggcaaatgtgatattttctgtggttgtcatgttttgtgttgatattatgtcatcgtcttctaatctatcaaaaaaacaaaaattatgtctgattgtcttctagtttatgtgtcatactttctcattattttgtaatattggctgtgtgaaatggtcttgcaggattatctagactgctgcagttttggcttttgttgggaagtgagttttgttggctttagggtttagttgttacctattgaactgtaatacaaaattcatgtattcatgttcctcatttttataattctttattttctaggctaatatttggagaactttgatgggttggctagagggagggcatagatcactggagtttttcatagaggatttttgcatctgcatcccacctgattgtatcacctgcacttctgtttttcagtattttatgtaggtgttctttggatcttctgttttttctttaaggatccttgtacctatttccctcttttcttttttaataaaattctcttcttatacactttaagcaatagagggtaaaaaaaaaaaaaaaattaacaccttcgggtgagacttattctgaaagaaaaacatctagattatggcatcccagtttttggactgggagatcacaggaatgttatgctgcacaaaacgtttgcattagcactttacctcctaaaagtcatgcctagccatttttgcaacttttttctcattgttgctatcaatgtcaaacaatcaccacaaagaactcgtgcttttgtcctggtggtcatcgccatgcttaaccaaaattctttctattgccactacctaagccacctccaaagttgcaatcactttctcagggctcccagtagggtaggaaaggcctggtctggttgatggacaattatcttggtttgggcatagcttgcccatgaccttctatctgatgtcttcaacttctcttcattatgatcctgcatctagtgacattgatttggtttttcatggttactactgttgcatattttttttcattctggcttgtgtagcttcataaagataaaccaagtgcatttctttctttctattcattgtttagccctttcacaatgactcatcttcccaatgttgccagtatccactcaactgaaaaaatgtatctcatgtccctctccaatttgttttctgcattatttttagactgctcctctcctccatttattgttaaatttgcacacatcaactctagccctcctttggagaaagttcattttctctatgttcttatctctatatctccactttctagcctggccttgcataatagtcaattacaagaaagtgatcatgttgggatcacaaacatacacaaaggctttaaatatttgtgaggctctaagacaaccataaacattaaatgttccaatgtatttctctatcttggcatggccatgcccaaacctacatgttagtgttggctgagtcttggagatcatgagctgaaattatttgggaaaagaacaggatagtgaagcatttggttgtcttcaacatagtctgttgcatcatgtttacctgtattcatctccatttgaaggcttgtattttcaaccttgaataatgcttgttttgtttcgctgattttccatctgatgttgctagtatctttgaatctgcttgtggatattacacaaggccatgttagttgctctagttttctagtcatatcattgaaagtttctgtgtcacttcttcaacattttattttcttgttttaagaatataatatgccttaaaacatcttaattccatgtattttcttattggtttttctatataatttgaaatatcagtggagtgcttttcattcagggatttggctactaaggactgtcaatattttgtcttgctcttttgctattagtaatcaccttgtacaccctttcaggtatctgatttccatcttg

SEQ ID NO: 11963 - DNA, 9569 bp, Vitis vinifera
  Intron number 11 from transcript GSVIVT01018377001 (locus GSVIVG01018377001) derived from phytozome v7.0 (chr-ID chr 15; pos 10086608 to 10096176 reverse strand)
aaggattaagggaaggagcaagtcttgcagaagtggtttgtaaaatttttatactgtgccagtctaaattatactttattggaatatacccttatattgtatcaacaaaattgcacattcatttaatggattgtcaattttttttaggctaaataagaattatattagactagtttagaaaagagagaaactgaataattgaagaaaagaatgagagtaaacaaacttaaggtcactgcccatagctagataattttttcttatattctaacaaaataaaataaaataaattataaagttgcctcaaaaatgatactttagcactccctctcaaattgaggcaaagatatttttgaggcctagcttggaacacacattagagaagaagcattttcctaagcttttgtgaatattttcaacttgatcttctgagttgagacaagcagtcactatcttcttactcttaacaactctcctaatgtcaatttacttcaatatgcttggttctttcataaaagactggatcacttgccatatttatagtgacttgagttttataaaaaactggagtacattttcatgagcttttcaagtgagaaaccaagctccagcagaagattcttgatccacagttcagaagtatgagccttggccttgtaatttgcttcaacaccagaccttgccactatattttgcttcttactcctccatgtaaccaagtttcccaccaataagtgtacaatacctgacaatagatcttctacgaaaagcaacacctggccaattagcatcgaaagctaaaatatctatattaagcttaggcgcttttccataaaaaatgcctaaacctaccgaaacctcaagattctgcaccaacctcctgatggattgtttaggagcttccataaattggcttataacactcattgagaaagtgattctagccttgttatggtcaaataaattagttttctaacaaggcttctacaccattttttatgaagaacatcaggactgcccctccaaattctgcagacttagagcttaacgtaccaatttcagcgagtaaatcatgtatacgcctcctttaagatgactctaccatcttttcaaagcaacttcaatccagagaaaatagtaaagcccgaagatctttagtttgaaacttatcaatcaaatacttcattgcctgcttaatatctgtagttctgcttccatggatcaaaaaattgatattgccacttatatttccactgaaatatcggtaatttagggtaccaatttggaaagagcggctaaatggaaatctacaaaatactattgaaatttcttcaaattatagatgctgccgatatgaggaaaatttaatactgcatgtgtcaaaatattgccaatatttcctaatattttggcaatatgttatgaaaatatccacatggtcattgaagggaagaagccgatgaatgagatgatggacaaaatgatggagaggatgttggataattgacacaagtcaataaccattgaacccatttattggtgaagctaacaacacatgttgcatacaaaacaaaaaccatcagtgtagaggagcatgtctaggttgttggaaagagagatataaggaggagatgtgatgggaagcatgcaaggatgctaccatctaacagaaagtcccttttggggtgttttgaatccatgatagtaggatctcattggagtaactcatctaatgaggcctaatctcaactttttgatctttatagttattgacaaatatcaacatatggtggttatgggatattttactattctcctccacaagtgttatgtagttccaaatatagcacaagtagaaattcaaataaacatgctcccatgcacagtttcctattcatggagaagtagtggaaggaattaggatacctatgtatgacatgttcatagttacatataaaaccaagtgaacttcatttcatggtagctgttagatagtgtatagttatttcaattatttactttttttttccttattgtattgtgggtcccactagcatgtatatatatacctaagtccaatgtgtattattaatagtttttaataacaaaaattagggattctcccttttctctcttttcacatggtatcagagcctagggagaaaaaaaaacctaattatttctggtttatttgtgaatcaattctgggaaacctttcagtgaccgtgtttcattccggttaccttccccatctcctaaagctttctgatcaaccgtattgccgtcagaaaaccctcaccgccagtgactttttcggcgacttttttcgacgaagtccttttccgacaccgaccataccatcaggtgcgcaaggaggagatcttcaatattatgctgaaatccaaacccagttcaatatttctattcgtgtgttatgcagtgacaatgctagggaatatttttctgcaccatttacttcatttatgtcccaacatgggatccttcatcagtcttcttgtgctcatactcctaaaaaaaatggggtagctgaatgtaagaatcgacaacttgttgagacaactcgtactctccttctgcatagtaatgttccttttcgtttttggggggacgctgttcttgcagcatgctatttgattaatcgtatgccctcatctgtattacacgatcagattcctcattcccttcttttccctgatcaaccactttatttccttcctcctcgtgtttttggttgtacttgctttgttcatattctcactcctggacaggacaaactttctgccaaatccacaaaatgcatctttttgggatgttccagacttcaaaagggttatcgttgttattcctttgagactcatcgctactttctctccgctgatgtcactttcttcgaggactcaccattcttctccacctctgagtctcttcctgtttttgaagtcttaccccttcccattatctccttacctgatgtagtgccttctcgcccacttcaggtttatcatcgccgtcatcgtgtcgttgttcctctttctttggccgaggtacctgctgactcacttcctatcccttcggcttctcctgccctggctctgcctccttctgctgacttacccattgctcttcggaaaggtaatcgatctacttgtaatcctcatcccatttacaattttttgagttaccatcgattatcttcaccctattctgcatttgtttatgctatatcttctgtttctcttcccaagagcacccccgaggctctttcccatccaggctagcgataggcaatgatagatgaaatgattgctttacactccaatgacatttgggatcttgtttgttttaccctctggtaaatctacaattggttgtcgttgggtctacacagttaaggttgaccctgatggtcaggttgattgtcttaaggcctgcttagttgctaaaggatatactcaggtttatggttctaattgtggtgacactttctcttttgttgccaagatagcttctgttcgtctattgctctccatgattgctatgcgttcttggcctctttatcagttagatattaaaaatgctttccttcatggggatcttgctgaggaagtttatatggagcaaccacttagttttgttgctcagggggagtctggtttagtgtgcaggttacgccgttctctatatgacttgaaacaatctcctcgagtatggtttaaccgttttagttctgttgtttaggagtttggcatgtttcacagtacaacagaccattccgttttctatcatcataactcttcgaggcagtgtatttatctggtagtttatgtggacaacattgtcattacagacagtgatcagaatggtattcagaaactaaagcaacaccttttcacctactttcagactaaagacttgaggaaattcaagcatttcttagggattgagatagctcaatctagttccggtgtggttttttcccaaaggaagtatgctttagacatcttggaagaaactggtatgttagactgtacaccggtagacactcttattgatccaaatgtcaaacttatgccaggacatggggagcctttaggagatcctgggagatatcgacgacttgtaggtaaactgaattaccttaccattactcgtccagacatttcttttcctataagtgttgttagtcaattcatacagtcaccatgtgatagccattgggatgctgtaatccgcattctttgatatatcaaaagcacactaggccaagttgtgttgtacgagaacagaggtcatacccaggttgttggttacatagatgcagattgggttggctcacccacagatagacgttccacttccgggtattgtgtttttattggaggtaatctaatatcctggaagagtaagaaacaagatgtagtggccaaatctagtgctgaagccgagtatcgagctatggctctggcaacatgtgaactcatatggctgaaacatcttcttcgggagttgagatttgaaaaggatgaatggatgaagctcatttgtgacaaccaagccgctttgcatattgcaaccaatccagtcttccatgaaaggaccaaacacattgaagttgactgtcacttcattagagagaagatcgcatcaggatgtgtggcgactagttttgtcaattcaaatgatcaattagtagatatttttactaaatctctcagaggtcctagaattaaatacatttgtaacaagcttggtacatataacatatatgctccagcttgagggggagtgttagatagtgtacagttattttagttatttacttttcctttttttttttttccttattgtattgtgggtcccactagcatgtatatatatacccaagtccaatgtgtattattaatagtttttaataacaaaaattagagattctcccttttctcttttttcacagtagcgatacatcaagattgtattccattgtgattaggtactattaaactacataggtcatcaatttagtattaaatatattgtttttctcaaatattgaaattcaatgaaataaaacttttatctccacattagtatttactccccttcaccccttcttccccaaaccaaacaaggtgtcaaaaaacctctagcaactgctcttttcaacaaacaactaaaagtctccatcacgactacgaataaataaggtgagagggggtctccttgccttaaaccccttgagctttggaaaaaacccgttgggcttccattcactaagactgaaaatctaacagtggataaacaccactttatccaactacaccacctctccccataccccatcttctccaacatcgctaacagaaacgaccattccacgtgatcataggctttctcaatgtctaatttgcaaagaattgcccttctattacttttcaaaatggaatctattgcctcattagcaatcaacactgtgtccataatctgccgcccctccacaaaagcattttgagacattgagatcaccttggctaacacttctttcaatttgttagccaacaccttagctaaccatttgtatagcccttccaccaagctaattggcctaaaatccttcaagtcctcagcccctcctttcttaggaatcaacactaaaaaggttgcattcagacttctaacaaatctcccaatctcatggaactgtctgaaaaaattcataatcttcttcttcacaaaatcccaagaaaactgccagaatgccattgagaaaccgtcaaggctgggcgctttctctcctcaattgcctgacaccgctccaaacacctcctcctttgagaaaggcttctctagcccctccacatctacctcttccaacctctcaaaatttaaaccatctataccgggcttccagtcaccaagatctgccaacaacccttggaaagctctgctcacctcctctttgatttcactttccttagttaaacacctcccattcacctttattctagttagctgattccttcttctgtgagcattagccatctgatgaaaaaacctagtgtttctatccccctctttcaatcaaatttccctagacttctgcctccaagacacttcttctaaaaaagcccacttcttatacgtctcccttgcctccttcctggcctcttcttcttccactaacaaagagcgaatcctctcttccttatcccaataatccattaaattccatgcattctgtttcttagaatcaatttgcccaaaaacctctttatttctcaaaatcggttttaaagccttcaatttttcagttaaaatgaagctggctgatccattaacttgaatcccctcccaccactttctcatcacctctttaaagccctcctcctttagccacatattctcaaatctaaagggcgtgggccctctcctcattcctcctccatcaagaagaatcggagagtgataaaaaatcggcctagccggtacaacttgaatgaccccctgaaaatgagcttcccaatcctcagaaataaggaaacgatcaattctcgactttaaccgattattaagacctccacaccacgtgaacaacccccccgaagaggcaaatcccttagttctaactcctcaaccacctctgagaatctcctcattgtcagggacatgcggcctcctctacaccgcttagatgggaatcttatcatattaaagtctcctgctatacaccatggctcattccacaaacctctaatgtcccccagttcactcaaaaaatcttagggctgaacttttaaaggttagattgccaagcatcacccttccactgaccttcatcaacttgtatgagtgagaagacttcttttacaggtggtaaagattccttgtcaaggatttaggcacataatcaaattccacattaagtccaacaagaaaattgaaaattctctcacgttcaacaaattattgtcacagagtagcgttttcactacactttatcttaatagtttggtaacagtctaattcaagccacaatcctttcatgatattataatattcaatcatgtataaactaacttgtttggtggttataatttttgttttgatctcataaatctgagttgcatctcatactttggaatatgattgtcgaacggtctcccatatctcctgtgtaatagtgagtagcctataaggcccactaatctctgactgcaaagagttctgaagccatgacacgataatggaatatacattagcctacacaccaaatcttggatcatctttgctcaattttggactaatcaggtgactcgatttccctttactttacaagaacgtttttaccggttgcaactagggtagatagtttcaaccattcaatcgaaatgatgctccaaggttttggctctagatgttggaggtcaggtgttgacatttaatacagggattgtagaagttacttctaatgtttcaaacatgattgatggtacgactgagaagagaagagataaaaaaggaaaagaggaacaattgaatacacaaaaaacacattggtatttgttggcaaagaaggtcgtgcaataaaaaaaaataaaaaatcagtggcaatgaaagctgaaaaattccctagagctctaataccatagtgttcaaaaaaattatttgtgaattagtatatatgtatatgtaaaagccatgacatgatcatgaatctacctcatcccacgcaccaaatctggatcatctttgctcagttttggacaaatcaggtgacccaatttccctttgcatttcaagaactttttcactagttgcaactagactagatagtttcgaccattcaattgaaacaatgcctgacggctttggtattctttgatgttggcagtcaggtgttgatgtcaaaacagggaaggtagaggttacttttgatgtttcagacatgattagtggtaggaatgagaagaggagataaaaaaggaggaactgtgggatagacagaaaagacatggtatttgtaggcaaggaaggccatgcaatcagaaaataaacaaataataaaaataaaaaataaaaaataaaaatttcagtggcaatgaaggtcggaaagttccccagagctctgataccataatgttgaaaaagagaatgaattagtacatgaactcgtgtactcaagaactcatgtccttgttcaagccaagtcctctggttggcattgaacattattatttatcaagtcgggaaattgatgacctttcctattagtttctcttggcctaatcaagatctttttgctttatatttttacatgttaaatgaacaccaaataatcaaagtccattaaaatttttttagttatttccttttttaagtgcttatactgcctcaactgaaggtaggatgggtgaagggttttggcttgatagttgaaatgatggttaaccaagctggtggcatgcctcgtcctatagcataggcagcattcttctaaattggccttttatggggacttaaggacgaaatcacacaagtaaatcatgtcttaacacatctcagattgttatttagatatacatcaccgcaggatcatcctatcatagaaggataaatatgaacctgagactcaacagtggttcattttataaataggcatccaccatcaaatagagacaacttttgaaacctttagcagaattctggaagatgttttctgttgaaaggatgcgaaccaaaatgaaacagcattttgatgtctagtgggaaacaattttggatgatttgtataagatgatactgacaactggttcgttcttcttcttgatttaagagacacaagtccacaattgatctttcaaatttcaaattttactgataggttattctgaggttattcagatggatatttaattcaataaatacaaccatttgtttctgtctgcatgatttgaacatttgtgtttcaattctaaacatttctgacaaacttatttgctttttccaacaaatgttctcttctagaaagacatgaaccaagattataaataggggaaaacaagttgacacttatatttaccagaaatcatttccagattcttaatgagattatggtcccttgaagaatttgttgggctgatagccgtgaagattgttgctaacaccaaatatatatttgaatataaaactagcatattagaagaggttaatattgagtttttcattgtctagttgtttggtcgtattttagtattgttctttttccctcgagttttgacaaaaccttctagatatgtttaaatttcacatgcaataatttctttaggatgaagttgcatctttgtgtgtgcgcacacacgtgttgcatgtggatgcacccttgtctttcatcaattcttcaagttattattatcaaataatcatatggatctgctagtttgatcatatcatttataaatattacttagatgcttaaaaaaagcctttagtgttgccacattattaattatcttaactattccatgctaatcaggtgaaacaagtaaagcctg

SEQ ID NO: 11964 - DNA, 6493 bp, Vitis vinifera
  Intron number 4 from transcript GSVIVT01031076001 (locus G SVIVG01031076001) derived from phytozome v7.0 (chr-ID chr1 4; pos 21889949 to 21896441 reverse strand)
aagccttgggtattgagaagcagtgtgtgcttgatgtacgttttcttcccactgtttcatattttctttatatttttcacttccattttggaaaatactctggatggcatgactaacgctttagtggggttgttgtttttcctcccttatgagtatgtttatgtgttctgataaaataaaaggtatgtttatgtgcctctttgctataagctgatcaaatagctaggttctaaattgatatttttgaattgtcttctggttgatcttgtcaaatgaagtgatttcatttccccctagttactttgcttttctgttgtaatcgtggaagatgtttaaagtgtggatatcctttaccacatcttttgatttgatattttgtcagacttagcatagatgtttaattctcatctgtgatgttcactgattaacattatttgttgacttgtctgcatggttctgatttagcatatgctatctagttgtccttctttgtcccttttttttttcatgtgactcatttgtattggcattctgctccttttgtttggttaactgagatttgaaattgttagaagaataagccaagaaatcagcaattatttatctccatatatatctaatttctcctaccatatttttcctttcttgtaaaagctgacccatgattcttgtactaagaatatgggtaaattctacataggaacctaaggtaaatttccatataggattcttgcaattggattgcttgattttagggattttttttgtaagtagcctaatttaggtgatctcatcctttgtatatatgtattgtaaatcagaatgtaaagatacacaggagatttttttcatcatggtattagagccaaaagtttgactctgccaaggtcacatacaaccttcattgttgtagcttgttccctcttttaactagccttggttgttggttccttagttcccattgtaattccctcaaggtcattacttgtttactccaaaaaaaaaaaaaaaaaaaaagccagaaaccttgttgttttttccctaaaaatgtctgaaactagtgaaaatacaccatcctctcaaacaaccctacccttcaatccctcctctacactccgaaccttatcacctttatctacccatcatagtgatagccttacactccaaatcaccactcaaaaactcaatggccagaatttcctacaatggtcccaattagccaaacttttcattaaaagttaagggaagatgggctatgtcacgagtgccaaatcaaacccgactccaatgatccacgatataaattatgggatgaggaaaattccatggtgatgtcttggctactacacttcatgcaactgaagattagccaaacatacttgtttctctccactgccaaagagattttggatgccattagtcaaacgtattccaagagtggaataacaacacaagtatatgagttgaattgtcgatttcatgctacaaaacaaggaagctagtttgtcactaaatattacaataaattgcgaagcttatgactggaattagatcattaccaacacatagaaatggtagttgctaaacgattgaagaagataatggagcaagagagagtatttcatgtggtgaatgcatgaattggtttaccacattgacaacatatgcaatgtgtggttgagtgtgagataaataaattaatttccccaccaatctttgatagaggccacggtctaccatatcatcctttatttttcctcctaatttatgattttgctcaattggagtctgttggtttgcatcctaacatccctatctcccttggcaaatcggggatatatttttgttggaaaataaatatacccccttttaaacgtgccacttcaatcccgaggaaatattttagacgccttagatccttgatctcaaattcattagacaaataagtttttaatctttgaatttccccctcgtcatttccagtaacaataatgttatccatataaactatcaagatgatcaacttaccagatgagttatgtttgataaacaatgtgtggtctccttggcttttatggtagttcattcttatcattgattttgtaaatctcccaaaccatgctcttggaggttgtttaggtccataaagagacttcttaggcttgcagactttgttcttccaagccttgtcaccaaaccctgatggagtgtccatgtatacctcttcttctaagttgccatgtaagaaagtattcttcacatcaaattgttacaaaggccaatcaagattagcaactaaagacaatagaatacgaatagtgttcatttttgccaccggtgcaaaggcctcttggtagtcaatgttataagtttgggtaaatcctttagctaccaatctagccttatacctttttattgtcccattagccttgtatttaattgtgaaaatccacttacaacctactgtttcttcccattgggaagctcaactatatcccaagtctcatttgtttttttcaaagcttgcatctcctcattaattgctttccttcaattctcatctctaggtgcctcttggattgtgtttggaatctcaacagaagacatttgtgtaataaagcctcggtatgtagatgataaatgatgtaatgaggtaaaatttgaaataggatgttgagtgcattttctagtgcctttcctcaatgcaatgggccaatacaaatcattatagacactagaatgagtattttcattttctgatttagggttggatgatgggatatgagaggatgttgtagattttcctgaatttacccggtgttcgttgttgtggggcggtcaacatcctgaggtttgaggccccatggagagtcctaagggctcgaccatggaaggttcctcggttataaaaaaagaaaaaaagaaaaaaaagaaaaaaaagaaagaataatttattattttaaatgattatgtttgatatgaattatatttatatgatgatggtttattattttatattaaaatatgtgttatgaattatattgatttaccatataggctgatgatgttggaattgaaactcggagacaatttcatatttatttttcatcaatttgatgacaattgcaccattttatatcataattttgttttattagtttttaaaatttatttaattatacttattattatttttttaaattttataattttttgaatcttttaacttataaatttgtgaatcgcctaatattgagccaaaacgctaagaccgatgtgcctcaagaccctttgagtgaatgaccaatactgtgattttgaatcatgctcaaaaggcgccatgagatcatggtaaatgctgaaaaacactgccacccactacctaaagctccaccaatcaataaagtccaacatgggcaaagggccattatcaaagttattactaatgaaccaaagattgattgtaattgttgttgtttagttttacttttggcgggaggattcctcatcctccttttgtacttctttttctatcaatatattcatgcgtggtttcctatcagaaaaaaagaaagattgattgtaattgtttgaggaggcaagaataattatatttagttgtttgaaaaacatcaaccttggaagacaagtattttttatatggttctctcacctataaaaaaaatatgttatatgattctctcatagaaaaataaataaataacccaagtttagttgaaaattttcaaaaaagaaagctaaataggagtttttgttttttattttttatattttaaataccatcatcaaagttcttactaatgaaccattttgttaattgtttgagaagataaaaataattattttagtttgcaaaattagcatgctgagggtaattcctaacttaaaattttaatctcttacagctcatttgttcatattcagttaattgagaaaaaattaaaaaaatttagtttcggtacaaaaaattaatgaaattgttgaaattttttaagaaaatttctcactagatccttttaaatttatttttaaaattttcctttaaagattcatttttatcacaccacaagtaatgccaatagcatgttatatactgtacacatgatcattaggtcatgtgtacagtatataacatgctattggcattacttgtggtgtgatgcatttatatatatattttttaacctttcaaaatttagttgattcattaataatgaccatgtgttgcatcccaaatatgaaaacccatctatatcacttattaattgactattttttagagtattaatttcaaggattgcccctccttttgtgctcttgaggcctggctcaagtggtaaagggatgggggaggatttgtgggaggttctaagttcaagtcccaatggggacaaaaatttacttataaaaaaaaaaggattgcccctcctttttcaaagattgccccctcctaataaaagtttctggctctgttcttgcttaattaatcagacaggttaagctggctaagtacagtgcctaagtgttggattttcttctggttgagtttgtagccttggcttcttctagtgtgtgtatatgtttcttccttttctttttgggtctatttttttagctttggttgggagatcttgcctatatttttcctttttggtgagaatttatattgatgtgaaggatcactcattggcttgcttcttcctttttggtcagattttgttccaatgtgaaggataatttttcattcattgtattgattcagtttaatgaattggtcatttctgataccaaaataaatgttttcagccaatgcaccattttcagaaaatgtcaaagtgctgttttttttgcattttaaaaaaacgctgtgccttaactttcaaaatggatttgaaagtgaaaagactagattcatttctactctcaagtgggtccttgaggcctagattctctaagcatgcatttggaaacatcttctagaaagaatgttctgcaagccattatggtaattattagttagcccatttttgtcatatttgaagaattggaaatgttcaaatttgatataattatgaataaatttgcctttttttttttcattttttttaataaaaatcttgatttagaaattatctgggacctgctttcttaactgcttgcttcatctcaaaacttaaatgatacttctgtagaaaaacattgtccagaagtttgtaaaagattcaactcttgaataggaaactgaaatattattaaaatgtagaagattataccagcaaggatgagagatctttccagtgaaacaaagcagggatgcaagattttaagaaaataatgcgcctcccaacatcaagaaagaaaagccatcacccgtacacctagattatactaaaattccctttttatgggtttattaggggcttaatggtgaaggtggcgtcctcttgaccattctgtcagcttcatgctcagccaatctaggcttccaattgaaagaatatcccaaattatggaagacatcaacaatctgatgcagccactgatcatatctcttgtgactctaaaccccagctataacagtttctgaatcccccaccatcttaaggttattattatctattgaagccgcccttttcaggacttctagtaaagtgatgatctcaaagtagcattcccaacatgcagatttcagaatgtctgtaaaatatttagtagtatggaagtgtttgtggttaatttgtagtaactctataaaaaaaaaaaaggaaaaaaaaaaagaagatgattaatttgaagtatccaataagcctatagcctgaaacttgaatggaatcccaaatgtatttaaataactgaagaatgttgtgcaggttttccaatcctgctgcagcagtaaattgttctagaagacttgtttcatctggaatgaacctgtcctatcattggtgtggtggtggcatgatatccacaagaaaggtgtgattaaaagcaatttagtgcagttgtaaagtgctctgagaagatcttcatgaagaagagatttctatctaatgtgtggaaaaatttcaattctgaatcttctttcttgtaattcttctgcaaaatcttctagctcccacctttgctgaaatgagtttttaggctgcaaaagcttctactttagtgtatgtatgtaaccagatacacttaaaaaaagttgtcctaattctttttgaaatatatgacatatctataggcatctcttattgttggattttctgctgaagtttgctattctgattctcttaattgttctgtgtatgcctgtggaaatttcattcatgtaacttcttttgtaaagttatttctcttgtgggtgggttagcatatactttttaagtttgtgaaaactgtccctagaaattttttgtggttagcgtgtacttgtgttcacaaacaatattgtggttgatgcagctagagaaggccttgc

SEQ ID NO: 11965 - DNA, 2972 bp, Vitis vinifera
  Intron number 2 from transcript GSVIVT01021595001 (locus G SVIVG01021595001) derived from phytozome v7.0 (chr-ID chr1 0; pos 7766457 to 7769428)
aggtgtgttttcctttcctagtgttttcatggtttatgttgttttcaacctgcattacagagactgaacttgtctccaaatctagcatgctttaagaagtatgtaattcaaacatgatggcatttagctttgacttaccactcaaaaatggttttaatgtgtgcatctaatttattttgccaaaataattgttaggcttatccatccttattagttttcactggatcctatatcatctgtttgtaatttcatttgcataaagataaatcataaatatccatgctaaagatgcaccaattattttttcaaaatgtaatatgtgattagatggaaaatgtttgccaaaatgtttgaatgatccaaaagttatgtaaggtctctatgacaagtgtttgttgaacctgatttcttatattatggagtcttggcttttcaaatgattgatctacaaaaaaattccttcttaagcacagagaacaaaattcaaataagtttttgagctaagtagagaaacatccacatagagaacacttgcatattggagcatggacccaaagcttacaaaattgatttggagagtactgagagaaatcggttcgttagcttagtttttgcattttcttggcctgaaaatcaactttttgagcattttggttttaaatatttagaaattgggagttcttgtattgcccttaaatttcctccatgatgtcaatgacatattggtgatgtcttggtagattcttaaaaccacccaattgtatttcttcccttcttgctcaaatgtgattgcttccgtcaattctgcaactcacttctatcacttaaaaggttgaatggtatgttgggtgctgactagaaattgttctgtttctgcattttcttcacttcattgtcatttacaacttatttcaatgtcttacaatactcacccaatgttctatagaaatttttttctccgtctattcttcataatgaccacctacatgtcataaacacattatatgtgacattaacttcaaattgatgcattactgtctttattattacttccaaactcatttaaaattttatatttttatcaattggttgttctaatttccaaattcacattgatacgaagaaaatgtctccatgtgttttaactctcaatatctttgtcatatcgaggtttaagtcctttactctctttccaaacaatgctccttaaattggttcttttagaggattaagcagattgtggtcactatcttgtgcccaccaaatgatttacatggatattaatttagattgaaatttgtaacttcttaatttgattgaatttgatgaactaccacttatcttatagtggcacttgtattggtattggaaaactttaacagtttcatcttcatgttctcaattctagaagcaaggactttaatatgattgtaagctataaaaaaaggaccacagttgctattgcaattggtgctaaatgcttggcttgccaacccactaatatctcttcatctcagcccggtgtgtactgcaaatagcctttctacttgtctttttactattgttcttgttgttaccaccatcacttctgcttccactacttctactattcatattctgtaatgatgctttagtcatttggttaatagtgtagaaatgaagaggaggttgattctatgaatctcgaaagaaaactgtataagattcgaccagcctatccatcttggaaataagttggattggatgtgtcatgtagaccacattggcatgccttagaattgtgaacaggtaaaagaagtttctagagatattagcaaggtacatggagatgctgaaagatcacatgtcttggaaaaagaaagaaaaatgatttctcatggaattgttttctcaactacataaacaaagtaatcttgttgagtgaatagaagcatttcccagtataaatgcaatatattttgcataaaagaactttggtgccctttttttttatgcactgttaatatatttttatttgcctataaaaaagatgcataaaagaagaacaaaattagttaaatacatcttattagaaaagttaacaaaaaaagcttagtgagataataatgacccgatcagttagcgaaacaatgaaccaagcaacaggcttctattgtagagatttttttaccctcttgaggggtttagagtttccctaacttatacatgttcatgttatattcttgatatgtaaaacaaccttcttattcgtttcaagaagtttttcctcccttttgattagtttatatatattgtggaaggatttcttgtctttcgtttgtacttaacagttcatatcaattttagtctgtttctaataaaaaatgtatataaactctaatatatggatttcaaagagatgatcttcagcacaagaagctcttttttttaatattcattctattctctcattctgaggggctaattttaatgcatttcttctcatttccaccatttctgcctgccagatatatctatatatagagagatagatagatagagggggaacaaaagatttcacatatctcaattgatgatgagctgatctctcctctctttctcccatctcttggcattttatggaacaacattagttgctatctgagtgctagcagttgtgttcataagccatgtattttaaattccctcaatgcaactgaatgctagtacctcagagttttcagttttctgagagatttattcacaaacatttgggaactatctatttaaatctgatcagaaaactgtgtctctgttttgcaatcctctaacgaaatgtttttatgaaattctctgttcttgttttggacatgttgaaattgtattgttacacttttatagtaaagctaaactaaattataatgggaaaaagcattttataatttctcttgcagatagtttctttgatcattgaagctgctacttggtgctcc

SEQ ID NO: 11966 - DNA, 7316 bp, Vitis vinifera
  Intron number 5 from transcript GSVIVT01027912001 (locus G SVIVG01027912001) derived from phytozome v7.0 (chr-ID chr5 ; pos 9309272 to 9316587 reverse strand)
gtgaaccaagattatttagacccacgggtaagcatctcatctacataatgcttctattccttctagaatgaagatgcaacaaataagttttgagatgcttatatttatgactgaagaagtgacttggtgaactctgttagccccattggcatttggtaaattctggtgtttactatttggctgatgatttggtaaattctggtgtttactatttggctgatgatttgcacacttatatttgataggatttagttgtcttttacataaacaaggctttgttcattattttgcttttttgaatgtttctatgaagagttcatcctttctaggaaaccaagggaatccaaattggtggcgaatatcattggttgacctcaatttatcatccttatgtttttagtggcatttgggcagataagggtattctttcatcacatatgtaccttttcctttttttatgcatatgacagcatgcatataacctgggtttcacatgtgtgtggggactctacatattctttagtaaagggtgtataaaattacagaagagaaattaaaaataaataaaaaaatcaaaattaggagtcaattttatttattaagtttttttgctggttaaaaaatagttggttatttgcttatgttgggtaattatatcctggcttagtccataggctggagaatccagcctactgattgctgccttaggagttacctccaggaaagaggctttatggggttggagcattttacattgatgacctctatatatctaatcaaatcctttgtacactagaatttgatccataacagtaataatattgttactaaataatagaattaaaaccttttagatagtttccagatccaatcaaaatctttcttaagtactaaaatcaaaacagcaaacctgaagaaggaaaaggagcctgatcaaaggacatatgcggatgtagcaaaactaagagtggggagacttggggaaaaggtttggctggaagcgggaaggagggtgaagcctggtagattagagcagttgggtcgttgcttagtgggtagatgggataaggtggagaaccatccccctgcgttggattttttgaaaaactgggctgtccacgcttggctactcaaaggtaagctggacatagctgtaatgggaggtgggctattactctttgagttcgaattgagtagtgaggccgagcgtgttcttgctagagggaagagaaaggttctaggcagtgtattattgatggaaagatggcacccggaggtggggtgctttagcaatggtgcttttgctagcaaggtttgggtgagagtggtaggtcttccccttcatttatggaatcgagaggtgtttaagctgataggagatggctgtggtgggttcattgctgtggataacaagacggatttaatggcagagctgcaatgggctaggatgttggtgaaatcggcgggcagggacactccttcctctgtccagattgtggatgagttggggtgcttctcagtgcagctgtggtgggaatccccaccttggttctctcaggtggtgccggcgggaagtggccttgggaaaggggatgcagtggctgtagaagttacagggagtgggtctcgtgatgagtgtagaggtggcgttctggtgaaggttggacagccgaaggagcagaaaggagtagctgagccgccctgtggtagttcttcaaaaggggtttcaggctgtccatttgagttggctgaaagggggcctagagacgaggtgactaatggagaagacagctgcgggatcagaagtcgaggtgtagggatattagcaaatctgggaggttttaaatctgggccagcagcttgtgtttttgggcccgattgggaggcccaagttaggagtgggcttggagaggatggtattaagacagaccaagtgggagcccagatatttgggccagattgggagcccaggcccatcacattaaaaggatgggtaatgggctgcgatgataggcccttcctcataaaggggtcgattgcgggctgcgaagggagggccgacatgggttttgagtctgaggtgggagggataaaaggaaggagggcttctcctcgtgccaaagtcggggggttggagattagggctacgatggaagcttcgggtggccaagttaaggaggacggggggatcgcgtgcttcctaggaggagatcggagggattccgagtctctaatggcggaggcgagagcgcgtatgactgaagaagtgttgtcggctgaagcatccaggtacgagcccgttaccgacgatcttgggggggatcgggttttcttttcttcttctactctttctgggtgcgatcgggctatggtggtggggggtgttaggggtacagtagttattgacgaagatgatgggtatcaagctccgctgcgtgctgtgttgactgatggcagtccgtgggagacgggtacagagaggggaaagaacaggggtttcaggtcaaaggagagtgaggatctggaggaagaagaggaccagggtagcggttggaatgacagtagcttggctaagtttagtaagactttgggattctcgatagttggcgttgaaggggaagtccttaaactactgttaaggctgaaatcaaggagggatcaaggcaagaagaaaggaaatgcagggatgactaggtttgatagggaagtgaaaaaattggaatggtccattaattatgaaggagaaagcaggaaaaaaggctcggatagaagaaatggggatagagctctgtgtcttaaatgaaaattaaaatcctttcttggaatgtccggggggtgaatgacagaaataagagaagtgcaattaaggccttgatcagatcccataaaatggatttggtatgcctgcaggagactaaaatgtctcagatgtctttaggggtggtgagaagtcttggagtggggagatttttagattggggagtaatgaatgcgaggggggtagctggaggggtgttggtgttttgggacaaaagagtgttggaactggaagggatggaggtgggtcttttctccatctcctgccggttcaagaactgtgaagatggatttaattgggttttttcaggagtgtatggccctaccttaaagagatatagagagctgttttgggaagagctaggggccatccgcgggctctggagcgatccttggtgtatcgaaggggactttaatttaatcagatttccgaatgagagtagaagagggggaagattgtcttcttcaatgagaagattttcggaagtgattgatgacttggatttgagggacctcccccttcaggggggtccattcacctggagtggaggactgaataatcaagctatgaccagaatagaccgtttcttggtgtcggaggattgggagggtcactttaagggggtggtgcagtgtactcttcctaggcctgtgtccgaccacttccctattctattggatgggggaggggtcagaagaggtcctgttcctttccgttttgaaaatatgtggcttaaggaggagggatttaaggatctgttgaaggggtggtggcagagtctaagctttaatgggtcgttcagtttcattcttgctgagaagatgaaggctttgaaggctattctaaagtcgtggaataaggatgtttttgggcaggtggatgtcaataagaaagtggccctggacaaggtgaatttctgggatggtcaggagaagcttcgtcccttatcattggaggaattggaagatagaaaggtagcaaagggggactttgaaaaatgggctctaatggaggaggtttcttggaggcagaaatcaagagaagtttggctaagggaggtgatagaaacacaggttattttcatagaatggctaattcccatagaaggagaaactgcctgtccaagattaaagttgacggggtatggttaacagaggagcaggagataaagagaggggtggttagagctttcaaggaccagttgactgacccggggggctagcacccttctatggaaggtctggactttaatagaattggagatgaggatgtagcaagattggaggaggttttttcagataaagaggtcctcaaggctctctcagacctgaacggggacaaggctccgggtccagacggcttcccccttagattttggcaattttgctgggatgttgtcaaagaagagatcatgggctttctgttagaatttcatgagcgcggcagattcgttaggagcttaaattcgaccttcctggtcctaatcccaaaaaaagctggcgccgaggaccttagagacttcagaccgatcagtttggtgggtggtttgtataaactgttggcaaaagtgttagccaataggcttaagaaggtagtgggcaaagtggtgtcttcagctcaaaacgcttttgttgaaggaagacagatcctcgatgctgcccttattgccaatgaggcaatagattctttgttgaaacgaaatgagaggggggtgttatgtaaattggacttagagaaggcatacgatcacataaattggaattttttgctgtttgtattgcaaagcatgggatttggggaaaagtggattggatggatctcctggtgcatctctacagcaacgttttcagttttgatcaatggcaccccggaaggctatttcaacagttcaagggggctgcgtcagggggaccccctttccccttacctgtttgtgttaggaatggaggcccttagtaggctgatccatagagcagtgggggaagggttcctatcaggctgtagggttaatggaaggggtgggaatggggctttggtctctcatttgctgtttgccgatgacacgttagtgttttgtaaagcttctgaagatcagatggtccacttaagctggttgttgatgtggtttgaagtcatatcaggtttgaggatcaacttggacaaaagtgaaattttgccggttggtagagtggagaatttggctcttgaggctggctataaagtgggcagactgccttcttcttatttggggatccctttgggggcgaatcacaagtttgtggctgtttgggatggggtggaagagaaatttcggaaacggttggccttgtggaagagacaatttatttccaaaggagggagaattactctaattcggagtacattgtcaaatatgcccatatacttgatgtctttacttcgaataccaagagtggttagtctaaggttggagaaaatttaaagggatttcttgtggggagggggtgctttggagaggaagcctcacttagttaattgggataccgtttgcatggataaaaggaaggggggtttgggagttagacgcctgtccatccttaatagggcccttctttgcaagtggaattggcgttttgcaattgaaagggagaatttttggaggcaagtcattagtaggaagtttggggaggaagaagggggttggagttctagagaagtcagggagagttatggagtaggtctttggaaggaaataaggaaggaaggtgcccttatgcaaaataaagtcgcttttgtagtggggaatggtagaagggtaaaattttggaaaaatatatggtgggggaacctcgccttatgcaattcttttccctccttgtatgcttttgcctcctctaaggaggcttgggtagaggagtattgggacacgtcgggaggggaaggggcttggagtcctagattttctaggcccttcaatgattgggaggtggaagaggtggagaggcttcttttgacaatccgaggtgcaagacttagtcctcttatggaagatagaatgatgtggaaggcgaattcgaatgggattttttcagttaaatcactctataatgatcttttttcaagaagagctggtctttttcctcatggtttgatatggaaccctagtgtgccttccaaagtgagtttctttgcttgggaggcttcttggggctaggtgcttactatggatcagcttaaaaagagggggtgggctgttgctaacagatgttttttgtgctgtgaggaagaggagtcaattgatcatattcttatacattgctccaaggcaagagctttatgggaattattgttcgccctttttggagtgtgttgggtccttcctttttcggctagagagacccttattgaatggagaggctttatgttgggcaagaagcatagaaaggtgtggaaggcagccccgttgtgccttttttgggcggtttggatagaaagaaacaggattgcattcgataatgaggaattttcggctcataggttgaaaaattcttttgtttgtaatctttgggtgtggacaaaaacaattgtaaatgaaggttctcttactttacctagtttttttgattggctaggcgctagatgagggtcgggtttgtttttttctcttcttttgtgtgtgccttaaggggccttttgtatactccctgtatgctattgggttttcctcttggtgcccttttcttatatatttctgcttttgcctatcaaaaaaaaaacctgctgaactagccataaccagcctaggacttgaaaatgagatgaaccttaggaactgatcctgtttctgtcataatggatcttgcaaggggctgtggaactgatcaatttgtggttcaatggtgcttccactcatggatcttccagtcaattttggagtctatgcatatctgtaaatttggttttttcaattctgctggaacttttgtttggtttattttttacacttccagtggataaaagcacttagaacatttcttcttgtttcttatggatgctaattatttttggtaattttgtaagactagttctttagaaaactttcaaattgtcctttgtaaaccctttttcatatcaattctcaacctgaatggaacacctcaatgcccaattctttctcttttgtttgtttatttatttttttaggaggttagtcatagcgtaaaaataggaacccaataacttgttccatctctttcacatatgactgtgtaacatgattatgatcttgatggataatagaatcagaaaggtcttgggttttgtgtactgaattctgtaatgaagaccatgagagcaattaagatgaaggataatttctagggttttttcaattaaagaaaaaattttgagtttgaattaatgtatgagaagccaccaatagtctttttgtattgttcttgtaagcttacactctgattcatataaataggtgccaaccgatacttttatttgtgtttga

SEQ ID NO: 11967 - DNA, 7038 bp, Vitis vinifera
  Intron number 8 from transcript GSVIVT01032348001 (locus G SVIVG01032348001) derived from phytozome v7.0 (chr-ID chr1 4; pos 26540326 to 26547363 reverse strand)
cttcatagcgattctcggccctgctgccgttttgagttccctagcgaagttggaaggattccggagaacatcaagtgcccagagtgcctccgcatcatggagaagtacatcacttttgggtgctgccatgacgagaacgccataagcgcactctactaagcctctacttctgttttgcatatgatgtatgcatgttgcctgttactgaaataattccatgcgtgtgtttatttgttttgttttctttgttttccccttcctgtttttccgtgtgatgtaataagattttattgtctcgttgcatccacatgatgtggaaggaagcaccttgtatactccatgtcgttattactattagatgttggagtttcctttaaatattatccttgttttgatcaggcttatgtgttcccacgtagttgtcactataaaattcagaaccgaaactgaagaccaataatacgttcatatataactcacaatattatgattccccatgtttgaaatgttggaatatagaatagattcagataaagggaaaaagtttgtttttatacaaagaatttgtaaaatttaaatttaatacactaattacccaaagataattaggattttgtacaccttttgatcaaaagtattatcttaattaattatttgaccatctagaaacaaagtgggtactgattaattttgatcatcataagtatttttgacttgaaaatacatcaaatttgaattatttttaaaggttttcattttatgtattttttttttaatttgtgcatgaaacccacctttccacacatcctctttattactacatttaattcactataagaaaaaacgttaaccatgacgttttttaagtgtcaagaaatatattcaatggcgcttccccaaagcgtcatctactagcctgttataataaatatttgcctacaatgacgcttctagaaagtgtcattaaagagaaccttgacacttaaaaagtgtcataattggttatatcaaactacattgacacttttataagcgccattgttgagtagaataaaccttgacaatttctataagtgccattgtttagcagtttcgaactataaggacacttttagaaagcgccactgaagagaaccttgacacttaaaaaagtgtcattgttagttgttcacactacattgacatatttattagtgccattattgggttgtataaatgttactggtggttactctcattccttgacacttagtaaaagcatcaaggaatataattgtttaattttaatttaataattgttgcacctaatttttcaccttctattgaaataatgcatacacataagaaaaaaaattatgtaccaatgaaattggttgttgcacctaatttttcacccggtaatacatttccaaattgcagtatttaatcacaaatagagaacttgtatttcataaataagaaacacaaaaaagctaaaatatattttaaaaaaaatcataactttaatgtttagtcccttaacatagtccattttttctttacatgcaacccaattgtgctttggtctttaacatactccttcatgctagcttatccaactacaaggttaatttcccaaaaagatgctttagagtgagaattttaaaattataagtgttaggattgagccctagaaagcataacataatgtaacatattaaaatacatttataaattttatttatttatatttcttggtttcccatttattatcctatatgcattaattggttatttaagcatacgtgtcacatcacttgcattatacataacttgggtgcattaggagttatacggaagatccaagttatgggttccttgtagagtgatgagtactccacagtcggttcatggatttaggcaatttatctgagaatgtagtgtactacctcctaattggtgagacaacttgtcttgatggtcaaaatggttttcctatagtaaatgcactagtgtatgtgatacacattagacaagacttacaatgaatcatgatgtaaggttatcaactatcatgattcatcaagttactatagtacatggactctcaaacttgagagaatattgagcatgtgtcaaagtcaactagaggctttgacatataaatgagaccctaaagtggtcatatatccttatagatcaggtcactattaatggaggccgatgacaataggtattctcaatagagatgccatgatatctcatgaattgagataatgtgtttccttgagtgatttagaagactatggtcatagaatttcttttaatagaaatttggcatatgctaattggaactagagtatgtcaattgatcacacaataagtgggatatgtaactcaagaattgaagaggtaatcttgataagtgataagattacctcattagactacagacactagtttatagagagtccacatatagtagatagtaggtcataaactcaacgtttgtctcgttgttatttgcataaggtattagagcatagttgatttttttttttttgtggaatattgaatcaactttaaaattggattctaagataaccaatactcctatgggtcctaatggtctccactctaaactcatataccaagatagcatggtttatgagggttggattgactttaagtttactctagtgtagaagggtgttttcataattgcacatagttatacaagaaatagtgagcaaagtttctagatcaggcaaattgattaattagatgaccctttgtggttaattaatcaattatgacccagtttagacttcaataagtaacccaaacccttgcgggcttaagttacttaagcctagtagctatagaaatcctataaatacccccttaggaggttaaggtttcctaatgatttttcagagtcatctttcacttttagataaagaaaaaaaaggcaagacatcttcccttccaaaatccactatttagagtgttaaagttgtggcttgagtcattaggcgaaagacttcaggtgtacaagatccaattatgaatcgttcttctttagttttattaatctaaatggtttttaaaagtcgtgtttccacttagattagttcctaaataagcctatggtaaatttgcatatacctatacgatccaacatttaggaatagagaaatttagggtttcctacaataaagagacaaaaatgaagattggccaacatgtttaatagacaaacttatgtcattactaatgtgaactctatcctggctagtgaactcttatatatgcttcaaattgtgtacatcacaagttatatgattggatgcactagaattagggtagtaacttacatcattgtaaagttctaggatggcaatcattgaacacattagagaggcttggtttcaaaatgcattggcattctgaaaattgaaaccgaaaggcccttcaaaacaatagtagcaatttaaaatcacattcccaaacttcccatacaactagcattatggtttaccatttgaattccaacatcttctatctttgccttgtccattaaaaccattgttaaagcctcgactttattaaagtctccattaaactctcctctactaaaattaattaccaccataattctaattagaactttgactaaaatttcaaccttgattcccattgaacccttgacaagaattttgtctttgtccttgacctccaaagttattactttgccacttcttcaaattactttgtccctaaaatttagtagctatatttgcacttagtgcaaagtccaaggccttcttgttcttttcaaaccttgcttcttgagccattaatgaagacttgatctcttctatagtgtaactatccattctaaagtttattaacactataaaagggatcatactatgcagttaacccatcataaatagcatcaacctgatctttagtagaaagaaaatgccctactgatgctaaggaattaacacaacttttaatcttggacaaatactcattaacaagcaaagatctaatccattcattgtattctaaagttaagttttgaattaactaaccttagccctagtttaggtagaaaaatattgcccaagcttgccttaaacctggaaagaagtttcacaacctaccatttaagggagaattggttttgaaattgatgataaaagccacaacataacaattgatcttattattcccaatcaagaaattcttgattaaacatcctagaccttgcatcttcttgcaacaaaagcctttctagaatctcaccactaccaaaaatgaatctttgcaaaccatatcctttgattgtcaacacaacctgttgtttccaaattcaaaaactattattatcaagttttaccaacaaagaatgagtaaaactaataggtatgaaccttgataaagaagatgatggatttgtcaccactagaacttgtaccattgtccctaatgctcgattatcctctattgaaaaaaaaatgcactttgataccatgataaaattctgaatctaaacaattttctagggcaataaagtaaaggaatgcttacgtttagagaaatttcaggagagagttttggaatttttgtctattcaactaaaatctatatctatactatcaagtacaaatataaaggaagatctctaacaaacttgtaaccgacttcaacaagctttacgaatataaactatgcacttagccaagctaactatatgactaaaacataaaacttcaacaaattaatcttttgtcttaacatgtgatatattatacatacttatgtcataactacgacttgatagtcttatgttataactcattgtaggtcctattcaatatgtaatcatacacattagtatactcaccatgggaacctcattttaatagccaaaactagtcatcctccaattaggaagtagtgcactagaggattgcttaggtccacgaattggttatggacaaattatatacttgtaagaaactcatgacttggatcttcaatgcaactcctaatacacccaaatcatgtacaatacaagagatattaggtaagaattctcatgaagtataatgtatagaataaggatagatagaagtaaaattgaaatgtcatcaaataaataatggatttcaaatttattatatcatgttatgcttttaagaactctatcctaacaattttctcatcatatttttcttactcaacaatttcaatccaccaaaattaaaatgtctaaatcttaagcatcaaatctacgagaaatcattaacacaagattttaaacattttacaacatcattctgaatgtttaacaaaacattttatcttgtcataggcacattagcaattaaattggcatgttgatctcttattgaaaggctttgttttttatatgaatattatagcttttttctaaaagttaacccaaatttaatatatgatttttcatgttgtgcacatagtaaacattctagataaattgatgtcttttattttttaaacgaattaggattttgtctttgtcttttattggaagtttggatgcatctcaaaaaaatatggccactttccgattcatcaagcttcacaaacatatttttgaaaccacacatgtgattgtttgctccaatgtcaaggtactatgtgtttttctctttgttttctcctttatacgccaacaacacaataggtttttcttgatctttcttttcaatataggtggtttgtcctttcatattattagtggaacttctacattcataagcataatgaccatatttgttataattataataatgaatttgggttttatcatattttccccctttattttgccttaattatttaatgaattaagattacccctttctctattgtcatgaccacatccacaaccatagttattcttacctttttcattaaaaaaaaaaaaaaaatcattctcgtttaatgaaagttttgtttgaagaacttgttctaatttttcttggttatttcttacttgatagactgatggtgaaagctttcttgtctcttgtcctcatatatttcaaaaaaaatccctttgatttaaagactgtagtttcatcttgtgactctttatagcctttttctacaaccttccatgcatcttgtgaaccatatctttgtcttgatactccaattgtttgtcttaatttgttaagttagaggacttgaaatgaatacatcccacttgccatcttttcacatggctctaataccaatttgttggatatgcagaagctcatataccaatttgttggagtaatagggttgatagaaaaacacaaacaattacaaaagaattaaaactttatcatatttcatcactttttcttattcaaatattatataatctcttatttataaataatcacacttaacaaaataaaaaatcctaataataaactatgacttgacaactcaaaaatagaaagtaaaataactactcaaaataaaacattcgtctcagccaaggtggatatggatgtccactgtcaagacacagaattctccttcatttaaatttagattcgtaatttaaaataaataaaaataatattaaataaataaaacctaagcaaaaaaaaacctcagtcaaaactcaaattgaaattgaagcaaggaaccaaaatcttctttcccttttcacttcttaatatttttggaaaagtaatattctcaattatgattgctctgaaaaggattcaagttggcaagcgaagtatcatcattcgttgcagccactcaacggctacgatctcatcatgtgatattgtatttgtatatccccatggccctttccaggggttcatttgatgccaaccatgtgattcactgcccaactaaagaatcattcgaataaaagatataggtcagaaaaatgtttttcgatgagtaattttgttctagttgcacaggtcgtacaaattttagtcatcaaacagcagtagaatcctgatttggatccaaatatagaggcaa

SEQ ID NO: 11968 - DNA, 10395 bp, Vitis vinifera
  Intron number 1 from transcript GSVIVT01029998001 (locus G SVIVG01029998001) derived from phytozome v7.0 (chr-ID chr1 2; pos 8819949 to 8830343)
aagaagctgcagtgaagcaatttcatggaatttttgcttggagactcacgaattacaaccaattgctcagggttgggaaaattggaattggtgtaaattgtgactgggtctttgtaaaacccacatcatttagctagaaaagctttgaaaatacattttaatttaatttataatttctatgttagaatattagatccaattcctaaaaagcttatcagccttgtatatatggctaagcaggtcaacttcccaagctcaagcgcattaagaaattctcagacctaccttttttttatagaatttttgggaagttttacagcaattgaaaacaaatcttaaaagggtcgggaaattatttgaaaaaatatggcagatttggtcacataggtgataaagaggtgataaagttggtacaacgcccaaaattaaactctcaattaatttaattgaacaaataatcataaaagagatttttttaatttatgatttttatttttttatttatactttttgaaaaagaaaattccagtgaaatatgttcgtgtagactgtgtggcaggatgcagactaaacaaagaaattgacacgtgcttgaagtccggccctacacatagccccattggaaaacagcggtttcatcctccgtactctttgggcgttaagtgggttcacaaaccaaacaatgggctgccccaacacagcaacacttagactgaggacaaactatgtaggtgaatacccaattatacccacatgaatcagtggtcaatctttcaaatctaaggacagagtagtcattccaattcaaaccaaacaaagctatgagaactgctggccacagcctctggtttccccaaaactttgggcagtattcctcaaagaatcaagtgggctagagttaataactacgtccaccatggttagattattgggggctagagttaataacttcatcgaccatggttagattattggtatctcgatgggagaagttgttttgatggaaaaacattgtattttattattttgtaaattttatcatcactcatatatattattttttatttaaaattaaataaaaaattaaaattcttagaaaatacgaaaagaaagtatatcacaatctttattttctattctaaaattaaaaaataaaaataaaattatgaagaaaaaagtacattccaacttacattaattaagggatgatatactgtgtaaataaaaaatataaaaaataattaaaggttaaataaatcacttaataaatcggtagtatgggttgatggtttcattattagactataacaaggattttctttttctttttctttttaaatgcatttcatggtggtgtagaatttttttgtataagggtttttaaattgtaatatagattatacatatagttgtgttttgtcctaaattctgacttccaagttttcaacattatataaaaattcctaaaatcacctacttcgtaggttttataacattatataaaaagccatgaattcacctattagaaaaatgttatttggtgcgctatcattaccatgacctcaatctcgtgcaaagataccgagtggttacaaatagtaaaaaataaataataaaaacaaaatatattcattattattattattattttgttcttttatcatccattattcacatcttagcatatgatagaaaagatgataaaagattatttatgttatatgattttaagtgaaatgatcaaaatatttaaagaaaaaattaataattcatgaagaatttttggtaaatttataaatttgtaataaatattgataaatgataaacaaagtagtttttaaagtggttgcagcagttaaacattgtatcttattatgattttccaccctcaaaacttaataataaaatttcataacaaatttttatctatttgaaacttttgaaatgtgaaatcttttcttggacatttttatatatacatttgtgaattttatctttattttttatttataaaattaaaggataaaattaaaatgttaaaaataaaagagaagtatatcccaacttgcatcaattaagagaagatatattaagcatgtgaagaatgcaaaaaaaattaatgataaaataaatcacttagtagatagtatttaatgatttacattattagattgtagcaatgagttatatttttatttttgtgtataggggattttaaattataatatatatttttttatttttgagttagttttctttgttgatacatagttttttttttgtcttggatattgtgttatcaacagttttaaaagaaataaaaattatttatcccacatcgattcaaaactaaaaatattatatatatttattaaaactttgatactcttaaaaaatacaagtacaaccaataagcaagcatagggatggcaacggggtgggtatgggacatgccacccctaccccatttccatcccggttatatatttttttgcccatccttgtcccaaactcggggcggggcgagttggtgtcccccttacctatttacaaaagaactgataatctcatctccgtcccaaatgtattttcgggaattatgcttttacaaaacataggtctctgaaatttcaatatatgttatatgggttatcataaacacatttaatcaagcatttgttgtgcaacaaaactgcaaattacacatatgagaacaaaatgcacagatctacaaataaacaacccaaaaaatctcaaatccataaaccaaaaccagaaaatatgaaaaacaagacattctaacaaagcctcaaaacatagtatttaatgatttacattattagattgtagcaatgagttatatttttatttttgtgtataggggattttaaattataatatatatttttttatttttgagttagttttctttgttgatacatagttttttttttgtcttggatattgtgttatcaacagttttaaaagaaataaaaattatttatcccacatcgattcaaaactaaaaatattatatatatttattaaaactttgatacccttaaaaaatacaagtacaaccaataagcaagcatagggatggcaacggggtgggtatgggacatgccacccctaccccatttccatctcggttatatatttttttgcccatccttgtcccaaactcggggcagggcgagttggtgtcccctttacatgtttacaaaagaactgataatctcatccccgtcccaaatgtattttcgggaattatgcttttacagaacataggtctctgaaatttcaatatacgttatatgggttatcataaacacatttaatcaagcatttgttgtgcaacaaaactgcaaattacacatatgagaacaaaatgcacagatctacaaataaacaacccaaaaaatctcaaatccataaaccaaaaccagaaaatatgaaaaacaagacattctaacaaagcctcaaaacttagggttttcttacctggaaatgaggaatccatagaaaccctaataatttgttgtctacgaatttggtttttggtttttagagcaaaaattgtgcttttagggtgaaatgggaagaagcaatttaggaataaatgagaaaacgggaagaaatgagaaaatgaaaggcctcttacaagcaaaagaaccctgagcaatttaggaagaaatgagaaaacgggaagaaatgagagcgaaagccctctaattctctcacgagcgaaataaccctaaaacttgaggaagaaatgattatatacggagaactttttgggtattttgtaatgatataagggtaaattggtaattcacatacgggacggggtagaaactgcaaaacccatccctgccttaaacccgattcgggtttttatatattccccaaacccgttttatacccgaatagaatattctcatacccgtcccaatagggatggggcgggtgacccggattacccagaaaattgtagttcctaagcaagcattgagctaaatcctaatctcacattcctgctcgaaactttacactcacataaaaacaactcaccacttgactcgatggactattccgtaacttctcactaccaacaaccaggcactattcaacctctcgctcacttataaattcactccctacctgcatattcaaaacatatcttactactattctactctactattctacttttcgtggtttcatatctcactattattctacttttcgcggtttcatatctcactactattcgcgtgttcaaagtgtgcatattcaaagtgtatccctccttgaattaattgtgaattaatttaggcttcaaagtgtgttgctctacaacatccctcctagtcaggcctcaaagtaagaacaacaacatctacaatatctgccatggccacacaaccaaggcatgtggtatgcctcattttctcatgtccttttcccattttgttccctcttttcatctccattttgttttcaatattcccttaccttactcatattctctaaaattagataaaattattaatttgatcatatttatctaacatttttaattagtactactagtatcttattttcataaatctaattgaatttcctacttatttatttattgttttcatgacaaaaattcatcagctttcatatctttccttacaattctgagttcaactgtccttgcgaaataccaatatgagaatgtttccccatttgcccaacacaacataggtatgcaaatctccttatttgcatcatttatatatttcatgatggttgtggcttatgaaatccttgattctaatggaactatcaaaattgaagaagatggaagatatctccttattttgggtcatgtttagttcttaagtggaacagcagctgcaactttgttgatcctgatcttgatcccatattttggatggttctttctgatcatgtggaccatgttcttagtgaaaatagcatgctattgggataaaacattttataactttgacatgttcaagaataaaaaaaaatgccaatgataaggaatgaggacaagaggagcaacgaccccaagtttagagtaggtttggtctataagaggttattagcaaaaaacatattttcttcttgtacttttgaaagtgttatataagtgtcatattttgagtaatgagagtatttttttttccttttttctttttctctaatacattattgttgattattcttcgctggaatacccacaaggctattagatgtttcattgcaaatatggttttatatgatagcattacgattgaacttataaaacatattttctacatattgtttagctgggcctcccaactacctctcggtaatatcctcttaacataggaagtataaactaatagcaagtgctaatctttcccattcttacacaagaaagacccaaggagaaggtatatttagaaattgcatatctatgttcccaaacaatagaaaattcaatatatggcacttcactctctacttttctttcccacattttctcataacccaaatatgctcacctctcattctaagatccaaccattgaaaaacaattacaaaaatcctaataaaagagatagatcatactacaattacactttcttacaagaaattgaagtgtagaaggtataacaattgagtgaaacaaataaaaaccaacctcctttaacacacctgctaatgaaatacttgtagagacactataaatccctccagactccaaaagatactgatcaacagcctcggcacttgcagcgacgagaccaatccttggtacgatataatgcacgaactcgacacggaatcggtaagactcagttagattacagaaaaattttcaaacattctttttttctttccaatcataataaaacattagaatattttccaaaagcaaacacccatgattttgaaattggagcttttaaaccagaagatcaaagaagacgaagaagaaaaaacccaacccctgacccgttcagaaataagaggagaaaccaccgaatgatgaaggcatgatttaggatttacttacttgattttcctaaaaatcgagaatcaccagagggtggaggtttggtgtcggcggtggtaacttgtcaagtggactaaatcttgcaacgaggacgtcagccaggcaaccctcacagtcagattgctccccctccggggtctttcatagttgtaaatttgcaattgcaagtggtgtcatttgtcggcggtcttgacagcaaaggtggtatgcaaggtgtgggagattgggagccctaattggtaaagtaaaaaatgcattttatatggatttacattgatgatatgagataggatttgatggtaacttattaaattaaattaaatgattgagtctaaaatgatatggatggtatgagataggatttaatgaaaaattaaatgtatttatatggcagattgagaattaaatctccaattcttagtattattataaatagctttgagttaaatgtgaaatttttttgttttattaattttttaagcttatttaatttctatctattttttttatataatttacataacatttttataattttatgaaatttctaattatcttattttgcgtaatgcttgatactgaatcgagatgtcaagaccaacatgtctcgggatcatctgagtcaatgatcgatatcgcgactttgaaccatactcgtctccaatccctcaacaatgatgaaaaatgaggccaacgtagttgccttttttattattatcagttaaaaataatgaatctaaattcatgtattatcaagaataaataagtttatatttataaatttttattataaatttatatttacacatatccttgattttcctcaaggttttatttttaattgattacaaagcattagtacttatttaatttaaaatgtattaaataaatattaatattatataaataaataaaagttgaatttgaataaaaaatttatatatatatatcatattcttcatgaatatgaatctattattaaagatacatggtaataagtgttaatattatataatcaaatgagagagtacaaaaatgttctattattagcaatacattattataataataagatacttaatataatgtaaataaataaaagtcgtcataaatttaaatttgaatttatattttaaaacccatcacatttatttttatttttttaaaattttaagaattttttctccacttcaaatagcaataatagtgtttattcatactaattatacttaaaattgatgaaaattatgaaaaaaaaaacccatacccttcaaatttatatttgttttaattttaaattttttttctctacttcaagtaataataataataatgtttattcatactaataacaataaaattaatgaaaatgatgaaaaataaaaaattgtttggtttcaacattgtttattcaaaataattttttttatttgcactttcctactaggccaaactaagaatgactcagaccagtatggtccgtttaaatgcctatctttttattataagctcactaagctgcatctctcaagactctagtgaaacacaatctggcccaaataaattttccgattcaatccacttcctacaattccgccaaaaagacctaatttctcattgaaaaaatggttaaaaataagaatagcaagagaatcaagttatggctcaaaaaaggttttttttttttcttaaaaaaaaaaaaaaaaactatctaaaccttaaaaaaattgaaaataagtaaaacataagataagttacaaactaaatgcaccaaaagtaaattcaaaaatggaatagctggttagggacaatactataaacaagtaggcttatcaattgttgaatccatagaatctgtggtctccctatgcattatgaattttttctttgcttcaaataataataataataataataataatgtttattcatactaataaacaattcttcataatcataacctcctaatttccaataattataattgaaattattttaaataaacaatgttgaaaccaaacaatgtttcaacataataggaaagtgcaaataaaaataccccattacaaataccttccaaaatttatttaaaattcatagatttttttttttactttaaatatcaaaaaaattattgattcataataatttcacttagaattcataaaaaaatatgaggaaaaaaaattaaaataaaaaattttaagatccctacccttcccatttaattttaacaatttttttctgagcattgatttgttgatcggttatcaagggccactcatttgctttgttggatctaactctctataagcatgctttgttttggcttcgttttttttatctttgctttctcttgtaaatatctgatgcattgttccctctttgaacttgagatataaaaaccatgctcttgttccttgtggattccacctgctcctagctctttgataatccatgaaatagagctaagttcatactctatttttatgtttttattattctttgtttgttgttgatggtgggatgatattatcaatggccaagttgctgggattggaggagtgaggttatggggaagtgaacttaatggaggatttctgtgatcatatctatgctccaatctattggttccaaatgttggtcacgagactgcattgaagttttggtatttgggatcactttgccatctgggtttagtaagcaacacagtggcaataaagatgcattggtgttattaatttgggtgaataagttggttgtatgaattgtgaaagttcaggttgtgctttgaggagagtatatcttgcatcctactattttaattattaattttggatgttgaaatatgatgtgattgcacttcatatgcatcatggttgtgtgaggaaaaagaaatattaaagaaatggttgtgtgaaatggaaataagaatgaaaagaccctggatagggcaaaaatgaaaagaaaagaaaaaaaaaatgaaatgatcctagagagggcgaattaagaaggaagtgagatctctaagctgaaagacccaaaagtttacttcgagaagactccgaatggggagtatatttaggtatagacgtgtatcctttggtgaaagcttgagaaccacagtgcattgtgtgattgcgtgtaaccatttgcatcataattgtatttggaagaaggatttgtattatttatcaagtgtatgtttgaatatattattcaaaactaaaatgacttgtttattttgtaaatttagaattgttgatatactaaacatatgattgaataaggaaaatgataattttgattgttttaaatttgtatggttggggtttcttttagtgtatatattgtaaatgtaatattatatcttgacatatggttgtgttattgacttagaatttctaacctatttgggtgtaaaacaccctactaagcaacgtgaaaatgctcacccctttattttctaaaatttttagatgcagatatagtttcagaggggccgcaagaagttcaagaagcgttctagaaagcaaaagaactataataatagttgtttttaaatttatatttatccttttacatgtaccaatttgaattatatgggcttttgtatgttaaattatattttgttagattgtaaaacatttttggaaatattttttttgacttagagattattataaatatttgagcttttggacagaaagatgactggtggatttattatacttgtgaataagagatagtgtgatggttggttttagaaaaataaaatattataataaatcttaacttaataaatttatttaagattagacgttttattatttaaaaaaaaaaagtttcagagttttttgattgattgtcagtgtggataggagtaatccttagggtcaaacccttggccgactatgtaggtgaatacccaattatacccacatgaatcagccgtcaatcttacaaatccaagggcaaagtagtcattccaattcaaacaaaaccaagccatgattcatgaaaactgctggccacagctcctggtttttcccaaactttgggcaccaaatccaaacccatctcttgctatataaccaacccaccttcacctcatcttcttcatcacaacacaactaccctgatttacagagagattttctatatccattcactactcagaatcacctctttctattgttgattgttgtttgggtttcggagaaagaaaattaagaagatgagtcatgtggggaaagcttggttagtggcagcaagtgtgggagcagtggaggcactcaaggatcagggct

SEQ ID NO: 11969 - DNA, 1111 bp, Vitis vinifera
  Intron number 3 from transcript GSVIVT01016413001 (locus G SVIVG01016413001) derived from phytozome v7.0 (chr-ID chr1 3; pos 4149937 to 4151047)
tgtatcatcataaggtgtgttttaaagtatataaatgaataattttctttaattagaaatgattaagatgttttgttatttgatgattttttactattgggtgacgtcaatattcacctttgaaatgcttcaattaattctaaaattttgatgttggtgaacccctagctccacatgaagcctaaaaaaacaaggggcttttatcaggtatcggtgagatatctcaccagtgagacttatcatggttgaaatatgcggcatttttgtgaaaaaatttccgatttttcggtgagtggtcaccgcggggtccagctgaagccattctggtcaacgcttacatttacactttttgtttttccattgcagccggagtgctcaccgtgggtcagctgaagccattccagtcaacgcttgcatttacattttttgtttgttgtgcagcgcctttataaacatggtcctcttcatgctaatataagtataagtttttatttatttattaacttatataaaagatcctttaactaatgcatttcaatattgtgtcttaatcttttgaatattataattggtaatacctttgtgaatatatcaattaaattatcactacttctctagagatcatgcatataaatgaactttagtgaaatatgtttgttgttgtcttttttttctaatataacctcatttaattatgtatgcaacattatctttataaattattcctaatttcttttagatcgaggatagtatacatgatttctgaatatgttggattgtagatattggtcatatacacatatgtattaaccttaaaagttttaatttaaaatttcaattgtttatatgtaattttaaattctttatttttaaatttcaaattatttgtttgcatattctatttgttaaatcaaagtactaataactttaataaaatatgcaaaaattctaacaaacttatattgaaaaactactatttcaaactttaaaatttgaagtgatttttgaagatataaaataaatttatatttttaaataaaatattaaggttattttttgttcttagaaaatttgagaaaaaatataaagaaaagaaaatataaagaaaaat

SEQ ID NO: 11970 - DNA, 12329 bp, Vitis vinifera
  Intron number 10 from transcript GSVIVT01026461001 (locus GSVIVG01026461001) derived from phytozome v7.0 (chr-ID chr 4; pos 23180109 to 23192437 reverse strand)
gtcctgaggcgaaaaccagtaatgattctcactcagtagatgtcacttgtataaattgttttttttttttttttttttttgtctattattagtacttattctttattttgcaaaattatttagatcttctgtttggctttcatgtgcacaccattatgcaatttctcttcttatttacattttccatggtcttttattgtcacaataactcatttgttctcaccatcatatactggtaaatcagtgtaggagttttgttgtgaattgatcaaaatagctaaaactcccaatgatcaaagtccaaagaaactaagaataaacttagaacataggatgacgtcctaatgatgagagtttaatggagctaagaataaacttagaacctaagatgacatccttatgatgggagtccaaagggacgaagaataaattcgataaatcctacgatggtgtcccaatgatgggagtccaaaggaacaaataataaacttagatagaacctacgatgatgtcctaatgatgagagtccaaaggaattgagattaaacttagatagtacctaggatgacatccttgtgatgagagtcgaaaggaacaaagaataaacttagagagaacctaggatggcatccttgtaaggaacaaagaataataggacgccatccttggtttcatctaagtttattcttagttccttgggtttctcatcatttggacaccatcttaggttttatctaaagtttattctttgttcctttggtctctcatcattgggacaccattgtacgttttaagtttacatttagttcctttggtttctcatcattgggattccatcctaggttctatccaagtttattcatagttccttttgactctcatcattgggatgccatcctaggttccatctaggtttattctttgttcctttggtttctcatcattaggatgacttcctaagttctatctataaacaagggttaagtgttcgccttagaattatttcaacagaaatccaacccatactggtggtttgttagcccactcctttcatctcaagggtggtcaaacaccttcaagggctcccatcatcgtgatggagtgtccctaatacctcctccatattctcagtattcataatagaggtcagcctcacgtaatgtcaatgctcatccagcacagcagtcgctacctaagaaatggaaggcaccctacacctgctcttcaagtgtgttgatcattagatagcaagttgttacatctatgatacccacttcttcactacacatgaaggtaactcacaacactttgcatgcctaagaactactactcatcccaatcttagtatcatgtacactatgccatcaccatcttgtggcacacttggtaatccccttcccttttagccattgatgttataattttgtcaaccagttgctctgtcatcgtctataataagggcgctacaatgactaccacctaacatagcctgaggcattttttcctgtcgttatctccacttttcttaatcactccacttgatctcctcaagttggggtaggcaccctatttctatcattgtaacatgtaacattcatggcccatatactatacatttttcaggggcatatacatattaatattgtatgatatattattatgactgctttgtcatttataattctaagtcacctatctgacgagacatcttagtaccgatggttgtatcattaatgatagatattggacaactatttggcaagggcacatatacaaaaaataggcacaagagaatctacaaattcaaaatgtaggagttacaacaatatgtatcttagggatatggcaatgaaataatatatataacatatacatttgtaattatatatgaccaaaatcaaatttgttgagctctctttctctctctttgtggttgtcaatcaaatcctcaaaatcttccactcttattattgaataagggtcttgctttgctttctaaagcaatatgttatttttaaccacaccatatcctaaacaaataggtagtcttctagatgcacaatactaggaaatggtctaattttttaaggaatatttttgagtttaggatatttttcattgtgtttggccataaatgttgagcaatttgtgtttgcacatattgaattcagacatggccactatttgaagtatccatgccttgaactatatgcgtatatataatgtgtttattgctagaccattattatacatttctccttcaaaagtgattgtaaaatatcttcttaattggatgtgatgtgttgttgaactacattgtccatccaagtagagaatgtccaaatagaggggggaaaaaaaaacaaatccttttttttatttttggtggaagacaaaacctatcttagtctcgattttgatggatttataagagagtgagttaatcaatccccctctaaggaatccttcttttatacagtcaaatgtgcaagattcccctgtatgcaagagattgggtggatttttatattcaaatgagtgagagcaaagtttttcttaaagcctctaagaaattcttcctaggttgaactttgatcattgcctgattattttagacaccaatccatttaagtgaggacgaacttcttttaaatttgataatatgtggttgcttaacttagatttcttggaaaaatttattacttggtggagatagcttcatagcaaagggtgggcaggttataggttcatgaagaatctataattttattaaatcaaaattgaaagaatgaaatgaggtgtttcttagagagttaaaggaaaggaagaagaatatgatattactaatactactagtcttgatgttattgagtaggaagagaatctatttcctaagctttcagcgcctagggccttgagaatggggagttaaaaggaattgttattaaggaaagaggtgcattggaagcaaaaaattagggtgaaatgggtaaaagagagggattgtagtggaagaatggaattagggaagttatgattttgtataagagaattagataatctcgtgatcaaagggatttgttgcaattgagttaggaaagtttctaatttaggtgttaggattttttgtacatattatatatatatatatatatatgtgtgtgtgtgtgtgtgtctatagaaaattttaattttgtaagaaaagagaaattttcaccctttattcttccatctctcttttatacatgaaactcatcaagaaagtaattggagacctcagtgccccatgtagttggactcacctctactttacgttgtccgtcattgctgcaaataaagatcattgtcacaccactaagtcttcttccacctcacatcattatcaaagccctcactgtcacctctattgtccactttgttttcaccttattctgccattgtcctcacctcgcaccgtagtcgtctccacctcatgttgccactgttaaaccctagcatcccaaagcaaagagctttgcttactttcctccgagttctatttaaggatttgtttttatctccttaaaagaaaaagtttttaaaagtttgtttttatttcttcataaaaataaataaataaataaatgaataaaaatttctaagctatcacaaactactgccttcaccaatccttctgaaggagtgaataccactcataacatgggataattgcaaaatattcaaatgacatacatacttaatgggaagaattatctaaaatggtcacaacttgttcatacattttttaaaggaaaaggaaaattaagtcacctcctaggaactagaccaagaagaaaggaccctcggtttgatacctgggatgagcaagactcgatgattatggcatggttgtggaactccatgacacttgaaattagtgtcacttgtatgttcttgacaactgctaaaaacatttgggacgcagttcactagacatactcgaaggcattagatgcaacacaaatgtacaaaattaaagtcaagactggagcaatgaaacaaggaaacaagacattcacgaagtatgctaatatgttaaaaaacctatggcaagaacttgattactattgatatattaagacaaaatgtcctgaggatgccgcaatcctgaagaattatattgaaaaaaatgaagtgtatgatttcttagtttgtctcaatgttgagtttgactaagttagagtccgaattctaagcaaagagcttctgactttaaatgagattatttctattattcgagtagtagaaagcaggagaagtatcatgcttgaatgccagaatatggaaggctcggctatggttgctaacaaaaggagtgatcaaaaggctagcactgctgataataaaaagactaatcgatcaagagttttaaaccgtgaaaacatggataacttatgatgcacttactgccagtagcctaaacatacacaggagaagtgttggaaacttcatggtaagccaaccacatccagcaaagagtagggttaaaatggagggtagcaaagggataatgggcaagccaacttgtcctttgttcaaccagttgaagaaaaatccctggaacaaggtggattcaattaagaggaaattaaaaaattaagagctttgttgggaactcttgagaaaccttcaagtaagaaattttcaagtacctgctcatttgcactttcaggtaagtttcctatttctattggattaaaagtctcggatgaaacctttgccaattttgggttttagattcaggtgccgtagatcacatgactcattcatcacaccaatttaataactgtaacctttgtccaagtagtaagaaaatattcacaggagatggttcattaaccactgttgcgggtgtaggagatgtccaaattagtcctacactcacacttagaaatgtgtttcatgttcccaagttatccactaatctcttctctatacaaaagcttacacgagatttaggttgcaatgtgacattttaccctattcattgtgtatttcaggaccaagacttgaggaagatgattggacttgctaagcatcagaacaggctatgctactttgagacatcaagcgagtcatctgtatcttttccttctatgcatcaccttgtcaataaagaaaaaatttggcttcatcatcgtagacttagacatccgtcatttagaactctgaagattatgtttccttctttatttagaaaattagatgttgagagtttctactatgatgtattgtgaacttgccaaatacaagcgttcaaccttcctcaccaataataataatagaagttcagggccttttcatctaattcatagtgatatttaaggcccttcccctgttcctaatatatttagggcatgttggtttgtgtcttttagattttcttacttgatgtgagttttgttcttccaaactttcataacatgataaaacactagtttgtgtcactatcaagaggttttggtccgataatgccagaaattatttcaatcaagccctaactccatactttcaacatgagggaataattcatgagtcatcatgtatcaactccctacaacaaaatggagttgttgagaggaaaaatggtcaccttcttgatacaacacaagcttttttgtttcaaaaatatgtgcttaaatcttattagggggaagtcgtctaaaccaccacacatctcatgaactgattaccttctaaagtcttaggtttcaaatgtccaatggatatactttcattgttttatcctaatatgaggaccacaatccatttcatccctcagatattttggtgtgtgtcctttgcacatgttcatagtccaaacaaaggaaagtttgacctaaaagtagtcaaatgtatttttgtaggatatttctcaactgaaaaggggtataactattaccatgcaccatccaaaaagttttttgtcttagcagatgttactttcagcgagaatgagtcctatttttctgctccttatcttcaaggggagaattccatcaaggaagacaaggatcaggattcctatctcattagtcccgttctcactaaccctcctacagtctctggtccagtgtttgatccagtatctgtaccgcacttctatgaacccgagtcgtctctgcttaagcttactcatgggaatcaaatgactagcaaagttacttaaggaagaaagttgcaattcctaaacttatacaagttcaagaatttgaaccgacttccagatatgaggtaacaatttttcatccttcctcacaaaccaaatcaaaacttcaatccgaaaaatctattgatcagaattgtgtgagaagatttatgggttctttgaaatcaagcaccttggaaggcaatcaattgataagatgagtagcagttaaaacagcctcccccaatatgtctttggaacattcatttgaaaaatcaaggctctagttacctctaacaaatgtctatttttccgttcaaccacccccattttattgtggtgtatcggtacaagaggattgatgaacaattccttctttttcaaaatatgatgataaatattggttgaagtactctcttccattattggatctcaccatttggattttggcatcaaattgggtttttaccattttatgaaaagcaggaaaaatagtgttaacatcagatttgtgtttcataagaaatactcatgtaatccttgtgtaatcatcaataaaagacaaaccattttgccccataaatactttgaatttgagtataccaccaaacatcgttgtggattaggccaaatggaatagaacatttattattccttaaagggaatgacacatggtggtgtttagcgaattcacacacatcacaatgaaaactttgaatatctagttttccaaacatagtagggaacatcctttttaacaaagaaaaagatggatgaccaagacggaaatgggataaccaaacttgattcttattggtagtgtgttcttccgacatgtaggatagagggatagaatcatatttgtcacttttaccttcaagaaagtgcaacccttctttctcagtagcatgcccaatcatcttccccgtgaaacagtcctaaaaaacacatttagaagatgtaaatatcactgagcaattaaggtctttggtaatctgaggaattgataacaaatttgcagacaacttgggaacatgtaggacatttttcaaggttaaggatggtgaaatggaaatatttcctcaaccagctatactgactaaagttccattagcaatctttatttttttgtttccaaaacaataagtggaggacttggaggaactggtcatatggtttgaagcccctgaatctatgatccaagtgcttgtgtactgattctagaggcacttagggcttgggaatacttacctgtttgggcaaaataactaggaccctctggtttttcaagctgtgaaataaactgcttcagcttattgatctcctccttgttgaaaatttctcatagcagcagtgttttccagctgtttcacttctatatcagcaacataactttggagcttataacctgatttctttccaaagaaatttgaaggcttgccatgtaacttccagcagtttcccctggtgtgacaattcttgcagcagtagctacaccaaagtgagtcattttcacttggttttcgtctctccatctttcctgaatttgcagcattagtagcaacaatagtggtagtcatgactccgtcattaatacttgacttagagataaacagtgcagaaccatccataggatcaaacgttttcagtgttacatttattcatcactcttctcctcttacaatagaaaatgcttcattcaatgaaggcaatggatctctcccaagaatctggaccctaacttgatcaaattcaccattcaaaccagccaaaaaatcaaagagtctctctttctcaagaaactcttggtatattgttgcatctttactgcattccatcttaaaactttgataatgattctactcaagccataatccctttataacactgtaatactcagttatggaaagggtaccttgtttggcatcatggatttttgtctttgagttcatatatctgagcagcatcccacaccttggaggaggtttgatgaattgcatcccaaatttcctttgccatagaaaggaacatgcaagtacgacttattttcagctgcatggagttccataaccaagacataatctgagaattttcttcatcccaagagacaaaatttggatcatccttattgattttaggaccaagaagatgacttagcttcccctttcctttaatataggttttcaccaattgagaccactgcagataattttcactattaagtttgaaggaagtagaaacattctgataatcaccaagagttgtgctctgggttgtgaattggttggttgtattagtactaatttcagacatgtgtggagaagaaaaatagtttgtctggaagcctattagtattaaagaaagttgagttaccaacaattaaggttggtctggagaaacaacaaataatagtaaaaagttggtctagaattaaaggggtttctgctcaataatgaagattgagctggcttatggctgaggaatgaaagtcgaatggtgggaagatggatcttggcagagagagttttcaggctttgataccatgttgactttgggattttttgaaaatttctctcccatattatttcaatagaattacatcaagtgtatacaaattgtaagaggtcaaaaatggaaaaaaggaatgagcttatttcaagcctagaatatctctatttacaaaaaagaatcaatcaactaaactaataaggaaaactagattaaaaaatatttcctaattagaaagtcttcctacgggctgtccatattctccaacaaaggtaataaatctaagcaccaatgccaccttcattgcacttatgtcaaaaaagagtcaaaccaatgagatcttagatgtcaaatctattaacttgaccacttacttgtataagattataactaaagtcctatcagagcttatacaaggtgttcttcatgaaacaattcatgtttcccaaggagcttttgttcaaggtaggtaaattttggatacgttgttaatagcaaatgagatggtggatgagaaaaggcgttcaagagaggaagagttagtcttcaaaattgattttgaaaaggaatacgaccatgtggattgtctacgataatcctcaaaattaattttagaccatgtactactaaggaagcggtttagtcctaggtgaaggacttggatgagggaatgctcatctacaagaaattttgtaatcttagtgaatgaaagtaccaaaggatgggttaaagcaaccaaaggtttaagataaggaaatcccttatctccttttctctttaccattgcaggcaatgtcttaagcagaatgttaagagtaaaagggactaggttattggaagattttcttttaggtaggattaagactacaatttcctatttgcaatttgtagatgacaccaccttttttctagagcctgtttggaagatttgcaaaacctcaagctaattttgttggtttttaagcatgtatttaggcttaagatcaatctagacaagagtactctctctagtatcaacatgggctaggatcagatcaataggttggccttgttacttgaatgcaaggtctttgattaacctctattgtatctaagtcttacactgggtgggggagaacctaaagactagtgccttttggggtctagtgattgatagaatttcataaagattggatggttagaaaaaagcctttttgtcattaggcgaaaggataactttcattcagtcatgcttttgtcaatttcctagttatttcctctccctttttaagataccatcattagcaatgttagagattgaacaaatgcaaagggattttctttggtgaaggttcaaggagtgtaagactttaggaatcatggtcttttggggaattggctatggaggtttcctaaggaaagttaagctctttggcatcaagttaatgggtgggatggtaataatatagtcaagtggtcacattgttgtccctaaaaagccattgcatagatctttttgtttttttcatatatgtctattttgtggtggatgatgaggtaaaaatccatttttaagaagacctgtgatgaggatgcaacttttgtgctcacaatttccaggtctatttagaattgttatagttaaaatcttcctgtttcattagttcttagcatctcttctcctttttcttaaaacctgaattgtcattgtaacatctctgacttgaaaataggagatcttgaaagacttacgccccctctaacttgtgtgtatttatctcttgccatcccagatgcgagagtttgatcattatcttcttcaagattatttacaattaaagtctttctttttagtcttgtctaatccattagatttaattcccttttatcaagctttttgaaaaaaaaaaatgaaaatctaaagcctcatctaaggtcaagcctaaatgatggtagtcaaatgccataaaatgcttagcctaccctccatggacaccaattggtttttagataagatggtcaaaacccgatctaagaattagattagtgccatggtcatgagtttaagccatgggagtgttattgtgggatggggaagggagggggtattgttggtgcaacaatgacccttttaagttcaatgaatgggtcacccaaataatgatggttaaatgccataaaagacttagcatgcccttattggacacgaattggttttcatatgagatggtcaaagcccaatacaagaatagactccctattaccacctgcaagttgaacaagagtaggaatgccaactccatcatcagaagagaagaaaaccaattagctcatgtaggatgaccaaacttatcctaacaattgtcaaaggtatgattattcctatcacaatgtgagcattgtttgtcacttctaccttttcctgctcctaaacctcgacctcagccttgaataggaggatcacctttatcctgtcttgtggatgtaagtgcaaaagtatccttaataccattccagatgaaaaggactgtagatcaatgcgttgaagacaagcataaacattgctaagagatggtaacttctcactagcaagtatactatgtttgacttcaacatatttagaatcaaggctagaaagaaatttagcaacctaaaactcttgccattttcttctttgaacctcaatatcatcagacaatggttgatacacattcaattcttcccaaatccctttgagaaatgcatagtgctcactcaaaggtttcctattctgctttgcactaaaaaaatatgttcatacaggtgatggattttttaaatattttttttcttgagaggatacctctttaactgcaccccatatttactttgcagtttctaaaaaaaagaaattagcactaacataaggtcccgtattgttccacaaccatgttaatataatgaagacatcttgttgtcactcatcaaaactttaagattcttggggaggatcttccactagatgttttttacttttctctttgccctaatatatactctcacaactttaacctaaaataaataattaggtccctttagctttattgaagtaatttgaataccaacactatctccagatttatgattactactagacatcgcacttgcacttacaattgaaacaaagggatgttaggatacctttagtacttacacataccctatacttgcattgtaaaatacaaccaatcacataggcactagtattggagataactgtagcaatagaacactagcaaaattgtagtgtggtgtggcactgtggcaatattgtaccataacactatagtttttaaattttttttaaaggttagggttaggcttctagatcaaacacgctctgataccatgttatttgagagaaagaaaagagtgtcttatccatcaaggaaagagtacaaagaatatatagacttttacaaaataaaacacgatgcctaaactaccccttataaaataactagtaatcgctctttaacaactttcattttgcatttttattttatgatttccataatgatcagttcttgtagtttatatttcctggtattatataattattagtagttaatcatagtactcctctttcttataaactattatactcctctacagg

SEQ ID NO: 11971 - DNA, 9023 bp, Vitis vinifera
  Intron number 10 from transcript GSVIVT01034780001 (locus GSVIVG01034780001) derived from phytozome v7.0 (chr-ID chr 18; pos 21382043 to 21391065 reverse strand)
gcaacttctgaacaggtaagaatgtttcctattctattcctgtaatcaaggattttaattttgagaaatttcctcaagctttggtcttccgttttttattgtaaaatatatcgtgtcagtcttaaagaaaaaccagcaaattgaatcatcttctaggctgatttggtctatgaagctttcgaaatagatccatcaagtagggcaaacatatgagctggtcatcaatgtgtttactacttgccattaagagctatttaaaggggggaaaaaaaagaaatcatttgtgattatgattattgcttctgattaaaaatggaattcatttaattttcctttggcagtcaagttgttaaaaattgtaaaactttttcgtctgtcaactattttcttcttgaattagcattacagatggcaactattggtgtcatcattttccccataatgagtatattatcacattctctctctccgtctctatctccatacctgtctctgtttctgtctctgtctcttgctttccatctctcttagtttctttctctctctcatatacatggatttaatattccataagcctatttgtaacatcctgtgtagaagtttaggcatcttctaaaaccatgcagtaactttcatgttggagtaggttgtggtatgcattaatccattgattctaaagtggtttggctgggaaatgtgggttggcacaaatttaatcatagtttaagtttagaaaccctttctttagaggtttttatgaaagtgcatatatagaaaggggtgccaaaagagtgcccctaagcatataggaaatatacatcggttgcctaaaggcagagccaaaagcaaggaggggttgcaacaaacaacaccaacccttacctagaacccaaccaatcaaagaagttgattaaagacaaagaccatcatctataaacaccttagttcaagatcacaaattacaaacaagagagttcttcagcctttggtatgatagctcctcattttcaaaagcaattctatttctttccttccaaacttttcacaagatacataagggggcaaccaacatctattaaagacaaagaccatcatctattcctttttgcgtttcttactcttgaaggaaccatgccaaccaaaaaaggtctctctaaactgtgttgggaaggactcaagacacgccaaagagagcaatcatagaaccctaatctttcaacaatgaacaagattgtggtcaatgggttcttctttgttgtggcaaaggaaacatttatttgctaaggaccaccccctcctctgaacctaatccaaagttaagacctttccccatgtcaccttctaagcgaaaaaactcaccttaagaggcacgcaggatctccaaatgacactcattggaaaagggactcaatctcttgactctagagcaagataaagagttttgacaaaaaagtttctgctctttgactttgtccaaagcaccttatcttccacatccctaatcaccatcttctcttgaattctcaaaaggaactactccacaattttcatctcctaatcattgaaagaccgagagaaacaagggttccaattgctttcttcaaccgaatagtcctaaacatctgccattcatgcctcttttgaaacaatcaaggcaaatatagaagggaaagtaacacacaacggatcatctccacaccacttattcttccaaaatcttaccctttgaccattacccattatgaatgaaattttactacttaaaaggtcccaatccttccttatggctttttataacccaacaccatacccctcctgcattgcatgagagcgccacccccttcttctcaatatttccccttgatgacttgttctcaaagtgctcccttttcattaacaaacaccaacaccatctacaaaggagggtgctattgagtgctgaaagacccaaaccacctttccttttatctaaacaaacaaccatccacctaagtaaggtttccgagtgagagccctccaagcccatagaaagtccctctgaatttgctttaaccttaatttgacctaccttggcatgcacaacaaaggcataaagtaaatagatatattagaaaaggtgcttcgaactagagtaattctcccttatttaggaatatattgttttttccacatgctaaccttttgcaaatcttctcctctatccctttccaagctgtcatggatttaaacaaggcacccaaaggaaggcccaagtaagaagaagggagggcgcccaccttacaaccatactctaaggacaagtcttgtaagttctccaccctccccattggtaataactctcttttatccaatttaattctcaaccttgaaatgacctcgaaccacattatcaaccaacctaaaaaaaccatctaatcttgtgaaacctcataagaaacaacagtatcatcaacaaataacaaatgagagatttgaacccctgcaccaccctttccccttatcctacaacccaataaaaacctccactcaagccctcttaataaggtaactaagaacctttatagcgttcacgaataaacagggtaagagaggatccccttgcctcgaattttccaaagaggataattcaacagtttatgttctacaattggtgttggactttgtgagagaatgtgagaggttgtgtgagaatggctgcgaggggaggccgatgttggtttgtattggactcaaagtcctttcatatttttgtagaggtgggtgggggggaagttgggaccatagttgtgaaaggcgcgcctaggctcggggtggcgcgacgccaccctccggcgcctcgcttgaaggcaggcgactccccttcacgaaggtgccgcttaggcatgcaaggcgcgacgcgatcgcctgacttgcctcctaccaggtatgccctccttctcctttttctgttgggttgcagagggttgggctaagccctatttttttttttttttttattttgtgggtccaaaatagcgtcgttttggcctgtttttttttttaaaggaacaggccaaaacaacgtcattttggagcctgttcctttaaaaaaaaaaaaacaggccaaaacgacgccgttttggactgttcctcccttccagcacccttttctagtctttctcaacccgagaccactcccaatcgtgccctagcctcagccgtgctggaaaataggggaaaaatagagggaaaatagggtgcgcctcacttcactaaagcccgcgccttaggtgtgccttgtgcctcaggctccaggactactttgcgccttagtgcgcctcgagccttttaaaactatagttgggacacattattgtggaaagagcagaggtcttttagcttggattaggttcaaggattggagtctatggtgcttgttggaaggggtggaagcttgcttcagagatgaagacttggtgaggtggagtaaagcttggtaggagggtgggaggaagttcaagttgaagcgttgtttgaatggagtagggaggtttttgttttgctttttgtggctgaggagatgaagagattttcattgatcttccatgaagggaggggcctccatgaggggtggtccactatagcagagaagttttgtttttctaggatttgcctccttagctgaggctaagagagccgtatcctctatagaagtatagattttggaacttaatgcaaatgtggctaggaaggagtaaggacttgggtgtggtgggataagctattcgacttcagattggggagagtgaggtgaagtgttgggaggaacaattgcattggtgtttggtagggtggtttggagaggtttcaaacttgtcattggaggtagtctcattgaatagtttcatgactaatatttggtcttgaaaggggagaggaggaaagggggaggagggggagggagggaggtgaagatctcaatttttgggggaaccttttgtttgattttgaagatagttttgaggctgagagggtgctagcaagaggttcaagaaagcttaaggtgaaagttttgcatttggaatggactcttaaggttgggtgtttgcttaaggggggtttcgctaaggaagtatgggtgagagtgttgggactccctttgcatatgtgaagtcaggagttgcttaagaagctaggggacgtttgtggaggttttgttgttgtggaagaagacgtaactcttttgtctcatctatagtgggtgaggattctagtaaagtttgatgggagagccatgcccaactcgttgatagtggtagtggggttcttcaatttttccatttagttgtggttggtagctccacacagtttttcggtggtggttctgagaagcagttgcagtgagtcttgcaagttggaggaaaggggtgatgcaaaggatgattcacacgtcagagtgggagtgggaaaagaagtgcatccttgatggtctacagacgttgacttattgccttagtggcaggccatatcaagtaggtgagagtgcaactttttgttttgcaaaagctgtaggagaggggtgaaaacctaggtggcggtgagaggagtacaactggtgacgggagggactgtttggatgatccttgctttaaaggaggccatggtgggctgagtttgggacctaaaaagtttgggctaacaggggctcaatggggcctaggaacctagaggccgtgtttttgaggcttgagacccaagtgggcatgttgtttcaaaggccattttggataatagttgtgaacgtgggagaagggttaagtgtaggccaagctaaggaaaagacaagtttgactattgtgggggtcttaagggagggtcgtgtgtcaatggacttgtttgggggagaggtgggctcattagggcttctcaaagggagtaggttttctataaaggctcatgcgattgagcaatggagatgcgatagtgtcgtgggagagaggaaggagtcgttgccagcatcggtgatggcatgttcctgtgttgcgatcattgacgaagccctcttagtggaggtgaacaggttttctagctcttcttcccctctcctttggggtctttaagctcaagagatgttgcttcaagatgataatttgttagagttttggggagtgctgtgaatggtactttgggaaaggagttggtaggtaagatcgaggagttggagccctcaaaggctttggagcttggttctgatttagtgggggaggatcttgttagccttcctagtaagttggtcaatttcagcaactacttagggatgccagttgcgggatgtgaaaaagagatcaactcccttttgagcctgttgaggaaattggagtctagaaaagggcatgaggttaaagtcttagggagaaagaggattcttccttcgtcattctgttttgagagggaaatatgaaaactagagtgcttgattaattataagagttctcctctcactagcaggggaatgagaaggatcaccggggagtgaccactcactttgtgagattgttgtcttgctttcagtttttggtgagggaaatgggttgcatctaggtttagggggatttgtgttgtgtttctggggtctttttatgtttttgggttctcttgatagtgtcagtacaactctcttgggggttggtcaatgtaagggtggttggtgattgctttcttgcttgccttgtggccttttttatatactccgcgtgtactttattgcaccattttgcaagcgtttttaatatattctctttatttacttataaaagaaaaggatccttttgcctcaaatccttagagttttgaaaaaagccagatagtgtgccattgacaagggagaaccttgctgtagaaatgcaccactttatccaaccaatccacttctttccaaaatccatcttttgtacaaccaaaagctggaagtttcaatatacatgaccataagccttatggatgtcaagcttgcaaagaacactacaatcattacttttcaatattgagtcaatgacttctttagcaataaacaccgcatccaatatttgtctgcccctcataaaggcattttgggacttggaaaccattttacctatcaccttctctagtctaatggctagcactttggccatcaacttataaattccaccaataaactaatagtcttaaaattgctaaggccttcagctccctttttttttttttagaattaaaaccagaaaagttgcattcaagctctctaaaaatttgccctgcttgtagaattctttcaaaaacttgtcacctcgtccttgacaaattcccaactaaactatcagaatgccatagagaagccatcaagatttgacactcccttaaggtccaaaagggcgaacaagacctcttcaattgagaatgactcctctagccttgcaacatcttgttctcctatccatcaaaagataaaccattaatgctaggtctctactcctcaggattagccaaaagattttgaaaggcttgaaccaccccgtctttgatttcattctcttttgaaaaccgagttccatttattttaatcttgtccaaaaagttcctattatgagcattaaccgtcttatggaaaaggctagtgtttctgtcgccctcttgcaagcacacttcccttgatttttctctctaggaaatgtccttcagagggacccattttttgaaatcctcttttgcctcctttctggtttccacctcctccaccttcaaggtgttaaacctatcctttgaatcctaaaaagccacttgttgcatagccatctcctttctaacatcttctttgtcaagcacttctttgttccaaattttcaagttggacttcaaaactttcaattttatttccagaataaagttgaaggatccactaaaataaaacccctactggtagctttttagcaaccctttaaagccctcctccttcaacctcatattttcagatttgaaaggagtagggcctctccttagccctcccacatcctataaaatggggaaatgatcagacaccggcctaggtaatacgcactacacaatcccactaaagtgacgctcccaatcctcaaataccaagaatacgtagcttgattgttcaaaccaccccttcaagtaaaagcccccttattggaaaggaaggtctcttagttccaagtcctcaatgacctctaagaatctcctcatggttaaggacaacctgcgttctctactatgtttgcttggatatctaatcatgttaaaatcatctccaatgcactaggggtcattgcataacccctaatggcccctagatcatcctagaaactctctacctctcttcaacgtaaggctctacacccttgtaaaaatcgaaaagaaaccatccttgcaatttttaaactggcatgatatcaaacattgacccactttgattccaatcaactcaaaacccagttatctcaaaacactaaaacccctcttgttgcacccctcaaattcaccactccccaatctaatcatttgcccactcctagacttcgcaccaaactagtagatatttcttgaattttagtttcatgcaaacaaactaagtccacctttcgtgatctaatcattggcttaactacattccttttatcacagtcattgacccttctcacattccaggttaaaattcttaatttcatttgtaacccgatacacaagccccccttactctgccaagcccgctctccctgcctatttcattgtaattcactgaacactctagtttttttagttctcttttaaaccttgaagacacagaaatagtcctccttttgccttactctctcctcgttttcatcctcttaagaaggctcaaaatctccccctggaacccctctgttggcatacgtaagaaattgctaaacttaggtagacaattggaggaccaacaatttgaaaggccccactttccctcaatggaccaacaactctcatgaacactctaataattggtagaactcaaatttaataagcgtaagtgttcaaacaaaccatgagacttggaatatcaagtttacaaaagttcttttatttacttttatttttaatttcaaggacttgttttgaagtttgagatctcgattgacatattcattgtctatttctagtttgttggtggaatttttgtatttttggcaaaaaataagggatcttatcttttggtcactttatatcaaacaaaaggataactcattgtgaaaccatggtttgaatagtttaggaggagctggaataacctgttaaaacagaaaaaatgctgtgagatggatgtgaatcaggagattcagaacaaaactgagtgcttgaataaggggtgcttgtctctttaacatagcacatggctgacctctgttggttaactttttcgttattttgtataaattgaagtaagatgctcttatttgatgtgtaaagaatgcgccttaccctttactgtgtgtacccctaaatttagtgaaaatatttggtgaggtttgtgtgcttatatttcctttcatttttcactgcctaacaagcagttgtggttgtgcttgattttagttttcagaaaactgtgatggtcagaataggggagaaagatataatgtgcttgaacttgaaaccaaaatatggggagcttttgtctgagtttcttgaatgaaaagaaaattaaaataaatttataattatttgggtttttcccctctatctttttatattttattttttttattattgttatggtttctaaaaaatggaaatcgcttggaagcttcttctactgtatgactaatatttactttgggcaaggggttcgatgccaccttagccacgttccatgctgcttacaacttacaattctagtatcccttgtggtatgttattggcatttgattcccagggctgcaaatgcagattattattgattattttctccggtcatttgcagaaactcatatttgagaagccgcctccta

SEQ ID NO: 11972 - DNA, 9431 bp, Vitis vinifera
  Intron number 7 from transcript GSVIVT01012904001 (locus G SVIVG01012904001) derived from phytozome v7.0 (chr-ID chr1 7; pos 13221690 to 13231120)
ttgctaaatacttcttggatcgggtatgggttatgtgcttttccctattgtttcatcattaaaatatttgaagtgtgtcgcttacttttctttacctttttgtgctacatatattgattatttttctgccccttgtttgattaatccttcaatactacaacatactcaacaacataggttgatgccaactacttttgatggctacatgaatccttttttccctttcagaaatataaattgataacctccattagatccttggctatcatgctttttctcagtgcctctgtaatgtattttctgagtagtggtgcataatgccattcattagtacatttgatctcttgttttcattcgttttcttctctataacattggtccacagtgtttttctttcctctctctctctctcttcgctgcatagattcttttaggttcacacttttgttgtgtcaccttcccactggtttcattagtcttctgtcattgagatgatctaaatatactcatagttgtcaaaatgtgtatcgtaacgtgtattgttttgtcaaaaaagtgtatcgtgtaacgtgacatatcgtgtatcgtatgttgctaattataatatatatatatatatatatatatatatatatacacatatacatatatatgtaatctatatattttacatatgcacatatgtaatgttccaaaaaaaaactctattcctttctttagtattatataaatctataaaataaccaaaagtatcaggtaagaagtatagaaaaataagttatataagttccaaatcacaaaaaacttcctaaacattcaaattttcctatctcaataattcttcaccaaaagtatcactattatcatcctctgaagccaacaattcttcacttcctctctcttcttcaacttcttataacgctttatcttcatcttcatcttcgtcattgctttctataacttttttctttcttttagcttttttgtctattataagatctctaggtcctataaataagtaatataatcaatatgattaaatgaaagcatgaaatattaattaaactctatacttatattatatgtttcttaattcttacctctcttcctttttcagctactttctccttcttcaatgtcaaagcattcactaacattcatacatgtaatgtcttcaggcaatacttcatcttctcttttagtaatccactcatcatcagattccatatttgatagtgaaattggatcataagtttcacacttgtccttctttgatgccttgcctctaattgtcaattatacttgacaaaaaaaaaatgcattcaatctttgttgttccaattgatttctcctcttagactgcacctatttaaagattcaattatttaaaaaaacccacaattcaagttttgatggttcttattcacaataaatataaatttgtatcatatttcatacctcatcaaatgttctctaatttctttcacaactcgtggcactacaagttaggctaaggatgcgaatggcaagttgttggaattctacacaacatcctccaaaggagtcccaccataatgctatcaaaattcaaaatcacattattaattactacaattatttaattaacacgttgtgtcagatcatcttatttgtataatttacaacttaaattaaattttcttgattgcttgttattcctcatctggagtgccatgtctatctcacacatcctttcagctttatggaagatatccaattgtctattaattttctctcatcataggagaagggcacattctttgaatagtttcatagagccccattttgatctcataatctgcatgaaattcaagagaataatgaaatctgcattataaataaaaatttgtttattaaaggtcaaagcctaaaacaattatagaagagacaaatatattgagagcgcaaattatatataatgtttaccttggattaagataatatgtagctgcatgtagggggttgtgcaattgcatgtcctatcttctattaacaatatcccaaagaggttgataattttttcactccatgaaagcttttttgtatttgttcctttgccttatccattgcttcataaatatatcccatagcaggtttcgcattcctatccacaagtcttaatactttcactaatggtagtacacacttcaagcaatatttaatggatggtcgacatgtttgattagctagaataatatccctaacttttatgtcatctgccttcttggagtattgactcctttgtcattcttcagaagcaaacattgcccttaacccaatcttagtctcatgccagcacctcaaagtcaaatatgatgttgcaaatcttgtgacaccagctctcactaattcctttttttggtgtgcttcctcataagatttagcacccaagaatgcttatagatatagactgtaatttttcttgccttagacattgtatcattgtgaataggaagatctccaatatctattaaaataaggtccaagtaatgggcagcacatggagtccaaaacaattgttttctctttgtcgttaacttttccctagctttcatatatgctaaagcactatcagttactacttagacaacattttcttcaccaatctcatctaccattgtgctaagagttcaaataaattatcaacattttttgagatgtttgaagtatcaataccttttagaaaaacaatccctcttggactctttaccaaaagttggtaatagatcgattcttcacatcagtccatccattagacattagagtgcaatcatttttcttccattctatcttgtaattttctaacaaatccctatttattatttccatttcttttttcaaaaatgtgattcttacctcatgatatgaagggggcttcaaccccttaccaaataaagcaatagattccaacattactttaaaatatgggtccttcaccaaattgaaaggaagagcactctgcataaagacatctacaaatatctagacatgcatcttctcagtctttttctttaacatggcattaatggtattctgagatgctacagcttgtatgtcatcattgtccttgacatgagcatctatttgcgtctttctatcactcaataaatttttgaaaaatttagtgacctccttgctacacttagtaaaaggagcaacgccttcatgatttctccccaaatgatttttcatcctagaaatactaccctaataagagtttaaacaatgtaaacatttcaattttaatctcctattttttccttcgtccactttttcacaatgatccaagttggatcattagctttcactttacaagtgtcttccatattgagcttcaataaatagaaaaaaaattaaaaaaagtattaatgtaattaaaaataatgttaattgtaggggaaaaaaacaaaaaaagacttaagactatgataattaaataattctaaaaactcattttaatagcccacatttttaattctaaattgaaagaaaaatataaaataatgaatttaataatgtacatgagatttggaagcaatggatttggtagcaaaagttgacaacaataatactatagtgtacacctcaaaataactttttaaagtgttaagcaaataatcaaataataaaataactatttttaaggttgatagcactatattgtagccttctcttagtacatactagcagaacagtagcattaacacagtttcccatggctcaacctctccaaaaaccaatattgctatgagtctaataaaaatatattttaaaaaaaaattgaaagcagttgctgcagcactcaggctgcacttacacgcttcccatgacccatcatctttaatatgagtgtccccagtaaaaataatatttttaaagcctgaaagtagataaaaatattttttttaaaggaagacagtagcagctacagtactaaggctgacaactacaactgtgaggtccatactttcatttgtgaggcacatactcctatagtttaagctaacaaagactaacacgactacctatactctcagttgtgaggtccatactcctatagtttgacctaatagagactaacacaaaactagaagccttttttttatgtaaaataaggtctctctcatagcaaaaatgagagaaaatcaaaggcaaaaaaaggaactgaagatgaggacaaaaagggagttggatgatgacaaagaaaaggaaaggaaaaagagaagaagaagaaccggagaatggaacactcagagaactcacctcacagtaatgtcgtcgacgtctttctcttttggtcctattcttcccttgcattcaccttgcgtcgagagtcgaagaatcgtgataaatgtgccaaagttagaaaccaaaaaaacctaaagtattcttttcttgaaagctgaaatgatcttgttttgaaacagtattgtttttttagattttgccttagtatcgttgtaacgtagtatcaaatgtatcgaaatgccacagctggtgtcttaaacgatatggtatattttttgatacattatatggtatgtatcgattccactccaagatgatacgtattgcacaaattgagaggtatagaagaccccaatgcatgccttgtatgcatatctccacagtcgacacctcagataatttacccttgcagtcaaaggcttaagaaacgccaacgattgatgtggtcaacaactgactcatcattccattgtttggtattggtaagctccattatgcttacagttcgtcgagtgttatagaagcagttgaggaattaaagctccatttggttccaactgataatgcactcaagtgcaaggtcagtataccaatcaaaggcattccctcagaaggatcgaacaaattgttttaccaataggtcaccctctatacttgcattgttgcaagtttcaatgaaatggacaatatgttgcttcagatttccttttccatcgattgatcggaactttggaggttaataacctttaggcatatgtaggttatcaattcccttattgtaaggcttagagtacatgagtgtactttgttagagtccaccatactgcactctaatggtgttagggatcatgtcctgaagttgttggacagatagtgacaccaccaaggtggattcaacggtttgccccttgacttgcactgacttagacatatatggtgcatcacctagagacgcaatctttggagagtaagtccttagcttgactcaactatattttgtgtctatgcctcaacctgctcatgagggatgctatttgtagatctttctcatcgatagtccggatgagtttggcaatgacacaagccattgttcttctataatcatggtgtctgttgtcattatcagcatagtcaccacaaaggaagaagtaaaagagttggaatggttgaaggagttgtcctccttcgacatcccaattggtgatccagagtatgagtaggtgctggagttgtcattggcaataaaggagggggactttttcctagattcctttagtgtggaagagcgtttttccctacgatgaagattgaccctttacccttaaagaagctaaggtgatgactggttggtaactatcatgtgtccccactgttttcagcaaacgagtgtgctcgcttgctaactttactgaaagtatagtagtcaactttgcttttctatgagtcacaaggcccgtataggtactatgtgttacttgagtaatgacaatcttatcatcacgcttgttgacatgcgctacttgactcattttagatgtcattgtcttagtagtgttcactttcttagcggaagagatgagaggcaaagaggtcccaccgagtgtgccaaagtggaagtcctgcaaaacaagcaaaaattataggaaaaataatgcaaacaaaaattttattaaaattgataattgtagggatacaatctttgtggtgatattcttttacaaaagaacatttccctatgattcttccacctcaatcacaatttgaaagatgaaggaaacgtttttttttttttaatttcgaagatcaatcgagggccacaagtgacttgttttggaataaactcattgaatggcgatgatcgcatgtgtagatgatgaagatgatttctttgttttgcaagttagtcgagggcctagagtgacttattcccgaatgactttgttgaaagatgagaacatgtgtattatagttcttccacgatttttcgaacttgcagggagattttgtgaagccttttttcccatatgaagtcatttttgttgatccaaagtcctcattgaaggaagtcaccattatttataggtgaaattagagaattaaatttggaaaccttgatatttgatttgcttaattcaaagaattttgtttcttgatttttagtaacttgtctcattcattaaggaaaatttccaacaaaggaatatttattttaatcatttttttacttcaattggaagagttatttcctttgcaacaatatatagatatatatatatatatatatatatatatatatatatatatatatatatatatatatatatatatatattttaattctcttttgatttcaattggaaattttgattttatctgtaagaccaaattttgtagtcttccaaattttgccatgtgtcaccttttaaatatatgtcacatgtcaaatgtgtctgactcattagttgtcaagcctaaattttgttgaattaagaagccacaattttgaagaccaatttagtgataatttaattcactaaaaaatttgatgtctatagttccattgctgctttggttgatgacctctctattatggaactctgagaacacccttagtagatcgtccttaatcgcgtcccaacactcgtggaatgctgcaatagaaaaattattaggtccaggggccttttccttgtctaattggaaaacaacatcacgaacctcctccatggagaaaagtctatctaaccacatagcattctctattgcaatgggagaccaatcctttaacctctaagaaactcttaggggcttaaagcatagctttccaaaaaaatgtactatctcctcaaaagtgttttcaatgtcatctagaatttctcccttttcaaacataaaagatttgatgaatttcctatttctcataccattagccaccctgtggaaaaattttagaattacaattcttttctttggtccattgaatcttagattttgtctccaacacacctgttccttaaacaataactcctcaaactcccccttccttaaagcccttaaaactaattgcttagtggttaaattcccttgctgatcactaacatcaatgttgacaatatctgtaaaaatgttcttctttttctccaaatctccaaatgtcaccttattccattcttttaactttgatttgataaattgtagctcttcatgaacttatgaccttcccatcaattaacttgacactcactccaccaaaatctgaaacttgtcttgaaattagggtggagcaaccacatattctcaaacctaaatagagtcggtccccacttaaatggattggtttctaggacgatcaaacaatgattcaaggtcaatctagggagagcctcctagagaatttgaggaagcctttgctcccactcatttgtgtacaaaaatctatccaacttcttgcaaataaggaatttttgcatatttgaccaagtaaaagatgcttttctcaaaggagggtcaattaattcattttcttttaagaatttgtcaaaatccctcatgctagtagttattttggatatgcccaatttttcataaattcttcttatgacattaaagtccctcttgaagcacaatttcagaaaagttaagccaaaaagagggtcttgtaattccaactaaaagtctctcaaattggacttattgtggccataaatcgaggtaagccaaaaagtttcttcttcatctgaatccagctgacttgtcactgaaaatgatgcaagtactacctttgagcagttgaacttgtttgaggtctcaataatcccaacccctcctgatgccccacatgccgaaaggacagcccacttcttatttctagctttccacacactacccacaaatctcctatcccatgactctctctttgttacttgaagcatcacaatatctaggttttcatggcaaagaaaatccataatggtccttttctttcttgaacccagacctctaatattccagctaatgattttcattggatagtagagggcccaaaaatcccacccctacacttaacatgttcatgtcaacatgataggacatgggtgtgggcatgggattctcgttgaatactcctattttgcttccaatatggatgtttgattttggttgattttttctttttttctttttttcttttgactccctagaagctagttacattgaaaatgagtttactgaaaagagaatttgtataagaatatttagagataagaaaaaaaggtaagacttcaaaaaaaaaaaaaaaaaagaaaaaaagaaaagaggtcatttctaccacagttttacttttgattgatgtctaattgattttttcttttttcttcttttattaatgttgtgtccaattgtctatatgtggtgttaagatccctttactaagtcccacatcccaaatttggaggacttacggattaaatatctagacgtgccggcaccttacatctgcacctgaatctgagcaacacagcctgataacattacaaacttttatttgacaatctgcctgttgaatgctctgaattcatttgatataatcactgactaatcaagttcacatctaggcctatctgatccatcaaaaagctaatcccattgcaaactgtaaaatatgcctatattatgtgttgcattttaaaattagatttgaaattttagtatcaaatatttgtttactatgtattctacatcagcatcatctatattgtatttcattctcttaaactcatctatccaatacaatagcaatgtgactggattagatcagatataattgaatttgaatttgtaatataagaaatgttgaatcaaattgcatcaagattgagctaaattgttgtctgtgatttgttaacttaggtttcatatttgttgatcattttatggtctatttgtaatttctttagtagtgttaataggaaactgcttggcataaaaatgcacttctcttacctaaggatggagaaaaatgagtgaatggtggagcaaccttaacccacctaatttttctttattactgcacttctcagttttcagtcaatatttgtgatgaggcttatgtactttcttcctgtaggctattgagatatcaagca

SEQ ID NO: 11973 - DNA, 9784 bp, Vitis vinifera
  Intron number 16 from transcript GSVIVT01015557001 (locus GSVIVG01015557001) derived from phytozome v7.0 (chr-ID chr 11; pos 4876218 to 4886001 reverse strand)
agtgagccttctcatccacatgctcattattttgttgtttctgaaggtggttgtttttgccaatcttaattagcacaagatgagtatgaattcatgctgtcaagtcaagttaattatgggaatgcatgtattcattgctagttatagtaagtttatttggacccaaaagcgcaaacatacagatcgtagtttctgaatccaagcggtgcctggattctcggtatccagcctacccagatcagactggagatgaatgtccaaaatagtgactgctgagtatcacctcaattgtccttgcttttaatcttgaccaacatttagaattcctttaataatagagatatgtaacttcgaagtatcagagctttggtttgtaatgttgcctttaagtgcctattattagtcttgcttcgtttatcctcctttaaaactcctcaaatgtccttgcttttgatcttgactaacattttgaataatagatacacttgatcgtctttcctttaaatttctctattatttattctccccttttttgatcctatgcatgaaaggaggttaaacataagatagttgataaaagaaagctaaaatttcatatactcaccttgaaagtatgggaaaactatacaaatatatagagtacattcctatatccaaaaggaaagtccacctcataaatatatagtgaaggattcctatttcaacaaggaaagtccaactcatggaaaaggaagaaaatacttttaagaaaaataatattatcttcaatccttttttaacactccccctcaagcttgagtataaatattctcaatgcttaacttggaataataaagaagaaatgggctcttatgcatcactttagtgaagagatcaccaatttgatcttctgacatcatatatggggagacaatctcttcagtcatcacaacttctctaatgaagtgacagtcaatctcaatatgcttagtcttctcatgaaaaatcggatgactagctatataagtagctgcctggttgtcacaatacatgactaaaggagttttaattgtaattccaaactctttcaataggtttctcagccacatgagctgacaggcaatatgagccattgcatggtattctgcctcaacacaagacctgactacgatattttgcttcttaatcctccaagtgactaagtttccatcaataaggttacaatacctgcctgtcaatctcttatcggacttagaaccagcccaatcagcatctgagtagcttactatatccaaaattttacctctcttgtataagacacccataccaattgtttgtttgagatatctgaggattcgacaagctgcttcccattgaatttgtcttggactctgcatatattgagtaattgcacttactataaaagtaatgttggaccttgttgctatcagatagattaatttgcccacagggcttctatatttctttttgttttcaaagttagaactaatctcatcatcaagttataagttgggatccataggagtatttgtaggtttggaccctaacattcctttttcaattaggaggtcttgaacatttttcctctgggacaaaagcacttctcttttgctatgagcaacttcaatcccaagaaagtatctaatttgtcccaaaatttttgtttgcaaatgttccttgagttgacttttcacctcctctatgccattaagatcattgccaaagacaatagtaccatccacataaataacaataataatgataacaagtatgctttacaaacattgaatgattagaatggcagcatgcaaagctaagagattctattactccacttagcttatcaaaccaagcttgggttgattgtttcaaaccgtaaataactttctttaatttatatgccatgctagactcccccttagtaacaaatttaggaggttgctccacttaaacctctccttgcaaatctcctaaaaaggcatttttaacatctagttgatacaaagcctaatcatagaaactgcctaaggatataagaacacgaacagagttgagtctagcaattggcaaaaatgtcttgaattctcttcttgcgaatctcctaaaaagggatttttaacatctagttgatacaaaggctaatcatagaaactgctaaggatataagaacccgaacagagttgagtctagcaactgtcaaaaatgtctcaaaataatctgctccataagtttgtgtatatcccttggctacaatttgagctttcagccgcaaaatagacccatcaggttggcatttgatggtaaagatccatctacactcaacttcttaacccgtaggaagagcttgtattccctggtgctatggtcatgcaaggctttcatttcttcccccatagctaccctccagccaggagttataagtgtttcctgataggttttaggaagagagataataaaaagagaaaaggtgaaggatcaagatgaaagtgaaagattctccaatgaaacatagttagcaagtggataccttgtggtggatctcttacctttctaaagagcgacaggtaaatcaaggtcagagaactcactatcaggagtaggatctctaatccgagattggcttttgagtagaggtcattaagattgggaaaatattagttttgctggtcatcatgctgtcctattctcctccttgcataaacttgaagtggttttgatgacaaaactataggattagggataggagtaggggaaggaaataattcagaaccaaaaattgattcagaggttgaaaagaaaggagcagactcgaaaaaagttacatctgcacaacatagttttaaaaggcgcaaggcgcacctaagacgcaaaagtctcctatagcttaagtgcaaggtgcaacacaaggtgtgcgcttgagtgaagtgaaatgagacctagaatacacatcaattttgtaaaatatgattcaaaatctaatccgatcaataaaaaatttaagatttgaaacatttaaaagaagcattcaataaataagtaatgaaattatatacatttcagtatataattagaaatttcaaaaataaaagtgtttacaaaggaagagtaaagctgacaaggcacactttttcaataaggcacatatcttggcaagcaagtgctataacttgggagtggtggcgccttgagtctaggcgcacttaaggtggttcaccaggggaaggtacaaaatatggagttttaaaattcagaactgatgaaggaagtgtattgatctgataacaggcagtgaggatagcttcatcctaaaatctaattggaaattacatatgaaacatgatggttcctgccatgtttaagagatgcttattttttctttcaattaccccattctttttttttttgataagtaagtacaaaattaaaaaaaaagaggcaaaatagccacaaagtatacagggggtatacaaggctactaaggcctcacaagcaaaaaaccaaaaaaacccaccaccccttatctggaggctaaccagaaagcctatgagggaaggcgactcctctccaatatacaatttagcccaacctcatatattacaaacaaaagaatatttaagtctctgaattgctcatttcccccgtaaaagctagtttattcctctccttccaaaccgtccaaaaaataaacaacggaatggaattccaaagttttttcctttttttccccacaaaggatcccctccaactaaataaaacctcctttacagtttctggaaacacccactgaaccccaaacaatcccaaaactaaatctcacagcactctggccactgtacaatgtatgagaatatgatttacatttttctcttcacaaccacacaaaaaacaacaattgggaagctgccaccaggatatagaaaactggccctcctcccattccagaatttctagagatcttttgtcccaataaatcaaaatgcctcatgccgatccaaaagcatccagggccttctagtttaagaatctttctgaccctaaacttctcaccaccctatcaaacaaaacttgaatttttgtctcctgaatgcaaatcagattcaccttctgcttccttacgacagacttgattactttccttttagagccgtcgttcgctcccctcacatttcagctcaacagtttgaggttcattggacaaccactggctaaccccctctgccttgaagagggcatttcttcttacctaccccctcgtagttaattgagcactccaacatttttagctccctttcaaattttgatttttccaagagacctttactgtgaatcctttcccgcctttttctaattttgaccaagaaactcaggatttccttttccaaaccttcagtcgagaaccccaagaagtggctgaacttcgctaggctactttcttcccaattaagttccctttccccccttccttcttgggactcagattaagctgaacccccctccgaaaaccttgccactaaaataggaccgttaaactcaaccaattccaagcagccattgccattcacaatgggcccagctgcgttttggaaacttagcaaatttccattctggcaaacctcccttatctccccagaatggtcgtaaaactccccctccagagtccgactaaaagaaaaagagatagaaggagaagtagaccccaaatcccttaagccccccaaatttgatagggacccatacctcgaatcttctcccgctaacacgcagtctgtcaatgagtagtgggagtccacctgctgctttctcccggcttccttctctcgcaggcttataaactcaagctcaaaattgctttccttgcagaattcaggttgagaagaggagcaaaccttcacagaaagttctttatcagtaggctgaatctcggatgggccatggctgtcccttaacagaacagaaggcctaataggctgcaccccaaaagccttaagttgggttagagacgggccaagtctgttccttaaaggaacagaaggcccaaagggcggcccgttctccacaactgcgactttctccttacccttagagcccgtcggcccaaccacaggcccaacccctccatccccagccccttttaaaatttcaccctctgaagggccttgcaaaagaggccctcagccctcttcacgcccgaaagatcctcggcaaggccagtcgaagatggcccagctactgaacaatccataggaaaccaggttgccaacccgaattgaatccagccctcagtcaagtcactgcccgccccgtccacctgcccttcagtcccatctgctgtcagtgacagcgcctcaggccttgcgtttacccgctcttccacttgtgggccaacgcttgcaccaccgtcacccctaacctctccactggaacgaccagttgaaccacgatagccccccgagttctgtctgaacgacggcaaaacctcccaccaaaggggaaggtgataggttgtctcctcgaccctgatctccagcgagcttggcagatcttctccgtttgatttaactaggatcctagcccactggagttcctccattctttctgtctatgggttaatagctaaaaaaccgccgcactcttcccccactcttctcaaaatggacgggacccaaagggagtttggcagacccaggatcctcacccatgctttgtttcttatttccccttcttccaagcacccgtaccttggattccagaactccaaacctacttgaatccctcttgccgaccttttcccggaggtgaggactcgtctagcttcttccacaagttcgaattccaaaaggacccattccttttccagccttgccaaaccaagctttcctttcaacccctaagaacacgccattaaccatcccaacctctccagattctctcctcctgctaccctagggttccagcttccgactaagcaatgttccaatctactcaaatttctactaatttcctccccttctacctccactctgaccaaatttctatccctgcttcccagcctcttccccatttctacttgcaaccttctggaggtcttcttttcctttttgttctccttcttgtcgaaactagcgatcaatttccgtaagacctccgccatagctaaccatccccccctttcccttttgcctttcgggatacaaatactatatctcttctcctccgagtcgacgacccctaaccagagaaaacaacccgccctgttggcttcgcgcaccatagagtaacttctccccttttccttccaacccttctcccatttatcttcattcccattcttaacgcactgatccagaccctccagaaagagcctaacacttgtcggccctagtcggacccttgacgaaacccctctcttgctttccacgatgaaaaccagggttttgcctcttctctcctccactttgacttcaaaaaccttcgaatccaccccaaagctactcccctgccattttcttcacctccccgattagctttctccctcatcgccatcgccctcgctctctcgcttgctctctcgctccttcaattaccccattcttttgtggggtgtatgaataggatgtttggtgaacaactccattctttgtgcagacatttgaaatagaagcattagaaaactccaaaacattgttagaacgaagtattgtaatagataaatcgaattgattcttatttcattgagaaaagattggaatacaaaagggttatgtttcacgggttcaggtacaggcatcgggtgcatgtatgtttctaggtgttggatcctttgcattctaaaatctggattcaaagattcagctgagaatgatctcaactataggtgtgggtacttggataaaacatcaagcaaaaataaattaacacaaaatatgaacatagtatgataagtattagtcattataatattacatggttaattgtaattgaggaatatatttattatatcttttctattttaataagatgcaaagcttattttacttttgaaaaaccgttgtccagtaaggtaatacctagaggggggtgactgtgtatatctaaaaagattataatttaagagttgaattatttacccaaattaattccaagacgatatcagagataaactaaacaaaataactaaaatcaaacaaataagcaagggacataggaaatttttacgtggaaaaccctcgtactatctatggaaataaaaaaccacgggatctaagacctatataaaatccactatttcagatcaagtcacatataaattacctggttgcttacccctaagatttactctccggaacctacaacttgatccatgtctgtgatgtagcaatttccaattgctctagtgaattctcctcaaccttgttgaagggatgcaagtcttctaacaacccaagatttaaacttggaagtcctaggagattcgaatatcccgaattttccaaatacaatattcgtgaattttcaaaaaatatttttccatattctagtagattcaagacgagcgctcgagtgcatttacccacccctcgagtgcctcagacgcttgagtgttgaataagcgcttgaatggttccaatgcttgagcgttgcttccatcgcttgagcatccttgtttttccaaaacattaatttaagtattttaaagcacaaaaaatatattgatccatatttaccctttgagcacctaacttgccactaaccaaaactttttaggcttatttgtgactatccaattgagccaacaacaaccttggatcttcattgaagagtaaatcactatcttaaaagtttcctaagccagaaaataaattggaagaaaattgccaacaaacaatgtacttgactcattgtcctaacaactttgatgttactactatttgtcttttagtttaataagttgctaagaaaaatatttaagacaatattataccaacaaattttgatttgtttaaaattttaaaattttatcttggttttgtaattttaatagattagatattgacaaaatatgattcatatttaatttcttatcaaaaaattgaattttatattaattattataattcatctctagattttttaaggtattaatttttatatttatctattagttattatatttatcattaaattttatttaatattacttattatatttatctttaaaatttatataaaattaattattttattttattataacttaatatttaaaaaaattaagaaataaataaaacagtttagttacaagagttagaaattaatttaaaaattatttattttttattataatttatttatagtattattttaaaaaaattaagaaagagataaagagagaaataaatttatcaattttaaaaaaattaaggttatgtttggttacgagaaagtgctaaagaaagaaaaaaaaatgataaggaaaattattttatcatgtttggttgtgttgtggaaaatatcaaagaaaataaaatataattaaaattagttagaaacttatttattttcaaattatttaattttttatagaagagttaaaataagttaaataagtttgaagtagcatataaaaataatttattaattttaaatctattttttatttttattttttcacttttctttccttttacttttcctctctattttctttcttttgcattttccctcaaattttctaagaaccaaacatagcctaaagaaagagatagtacaattaatagtcatatcatatgcaatatatccatatcagtcatagatctcacacccgcaccatgtcgacatggatattttggttgagattaaagtgtccatgtatcaccagcaaaagggacttttgactgctcttttaacaagtataaccaagtagctcttgagctctcattaagaaaacacaaaatatttgaacccattgacattaggaattttacaaagtccccacaaatcaaatgaactaacaaaaacaactcaggactaactttattgacttgacgggcaaacgaagatcaatggtgtttccttagttgatatgactcacaatcaaaggatagacttgaagtaactagaaaccctaaaatctagaggtcttggaggagggtgctaaatatgaaatgcccctgtgttggagagacagacgaagagagtgcgtattgagtagacagtatagaagctgatagaagatatacttcattcctttcatgccctccaccaattatctttatggtgcaaagatcccaaaatacacaaaagaaggaaaaaaggcaattgaacagtcctttttatgagttgactggcaaataaagattaataagaaaatgcagaagatataaaattaatgaaagaggcaaagtagtaaacacttccttcacctgagacttgacttttagaaccatcagaaaagataactgaggattgtttagaaggagaaaagtgactaaggaagataccattagggttccaggttttaggagaaagtatggttctttattaacttacatgaaaagtaaggaagatactgttagggttccttgcttgcatccattcaaaatccattgtttattatgagtgtccatcataaagggacttaattatgtcatagtggctcttgcatcttgtgggtaggcttcaccgtctgttgacattgttattagttgctacattcactcttctagtaactttttatccttgataatcaggcttgtgtcagttgggaatttagaaactgctgtta

SEQ ID NO: 11974 - DNA, 6078 bp, Vitis vinifera
  Intron number 4 from transcript GSVIVT01008214001 (locus G SVIVG01008214001) derived from phytozome v7.0 (chr-ID chr1 7; pos 4582318 to 4588395 reverse strand)
caagatcacctccaaaaagccactaagattgaaccgttttacaccctcaagaatctttaagtattatcatgctctctctatagtacaatgaagaagacacactttgaaacctttcacttttgttctctaattcaaaaaactcaaacacatctttttctttctttttttttcacccttttatacacaagtacaagaaaaaagctaagcaaacaagtatgctttcagttagttaatcaattaacttttcttccatggccaatcaattttggaccaccaaattccgcattctttaccttggttcataattgattttgaattctttggatgaagatccaacttaaacattagttgcgcattacctgaatttgcttactagtaaaactttagttgccatgtcggatggattatcagttgtggaaatcttttccagcttcactgctcctaagcttacaatttctctaatgaagtgatctctaacatcgacatgtttggtcctttcatgaaacacgagatttttacacaattgaattgcactttgactatctaaaaatatttccactacactattcagcactccaagctccttaacaagtccttgcaacaagatagcttctttcatggcttcagtagctgctatatattcaactttagtggttgaaagtgccactatcaattgtagttgtgacttccagctaacaggtcctccaaataaggtgaaaattataacctatagttgaccttctcttatcaagatctcttgcataatctgaatccacataacctatgataccaacaccctctttagaagatctaaacttcaatcctgcaccaagagatcctcttacatatcttagcaaccacttaactccattccaatgctctttaccctggttagccataaacctgctcaaaatacttattgaatgagcaatatctggttgtgagcacaccattgcatacatgagtgaccctgtaacattagcatatggaacaaaattcatctatttcctttcagcgttagattgaggacattgtgtcattgacaatatgaaatgtcctgctaatggtatacttacaggttttgaattctccatagaaaatctcttcaaaaccttttctaagtagtccttttgtgacaagaataaagtacgatcctttctgtttcttacaattttcatgccaagtattcttcttgtgttcccaagatccatcatgtcaaattctgactttagaatccttttcaccttttgaatttgtgacatattagaagaaacatcatcagacttccttgtaaattcttgtaatagaaataaccattataattgctccttttgaaaccaatctttagtataaaggtgtcaaaccttttataccactgtcttggggattgtttcaatccatataaggattttttaagtaaacacactagatgttccttttctggctctttaaaaccttcaagttgagtcattagaattttttttctaagtctccaagtaaaaagccagttttaacatctagttgctccaattcccaatcaaactgagctacaatggacattaatactctgattgaggtatgtttcaccactagagagaatactttggtttagtcaatgccttctctaagagtataccctcgatccactaatttagctttgaaccatatgggttcattctcagtggcaccctgttttctcttgaatatccatttacaacttaccacttttttatttggctatctttctacaagcacccaggtctcatttttctataaggattcaaaattttcagtcattgttgtgagcaatttcattgattcattgctgtttatagcttcttggtaagagagtggctcactctcttcattcttcatagtagtcaatagagcataggcaattagatctgcaaagacaaacctatctaggggtttttaggttcctcttagccctatcccttgacaagagataatcaagaccagcttcttgtgagttagttctgacaccaccttcaacatttgaacctgtcaccttagtatttttttgtctctaggacaccatgtgctaaatcattttgttgatcatgaccatcttgagatgataattccacctcaaactcaaaatggtctttgtcaagtgtcaaggtctttgttagcccaagggttctcctaatcaggttttgatgataacaaaatatgattaagttactaattggtttgaattgtaaagaatctcaggtattagtttagaaattcatcaaatgacctaacggatacaagatcaagacgtttggaaaacatttaatcataggaaacaaatgtaagatgaatgtatgggtacacttatgttttacatatcatttcatgcatctttggaaaactcgatttattccttaaagttaaagtttcattaatacccaagttttatcaaatgtaccttaggcaaaatgtttcaaaattggcatattaaattacctaaagaccttgcctaagtgttagaagagaaaagaatagaaaaaaaaaaaaggttttctcggccaaaatgttgaactaatcgagacactgggccaaccagttcaaccggccagggtaccggtcgaccggttccctttgccccattgaggtccggtcaaggaatgcaaaaacactttctctcttctagtagtcttctcttcccagtcgagatatcctccttcccggtcgacctccgatcgaggcccgattaaagtaacagtaacttgccaaagcattaaatgctccaatggcacctagtgatccggtcgacccctaactcgaccggttgaggctgctttttgtttttcttggctcccgaggttaaaaacctatgaattgagagctccacttcatttatgatatagagaatacttgcatttatttgtctacccacttgtttttgccttaaaaactctcatttctttcttggtacattaaatcttcacttgcatatcctttagtgcacctttgtgattcatcctaactttgatttgtatttgagctatcattgaactaggttgggagattcattcttgtaagattgagtgttaaagccttcaagtgagttgaatcttgaagagattatgtaagagttcattggagttggaatctaagtgtaaaggagattagaaacttggttgaagtttcaagttagtggaaccctcactcagttaggagcttgaggagagtggacgtaggcaaggaagtgtcgaaccactataaaatctgagtttgatttctctaattctatctctttatatttgtttctattgtgcttgaatttgttgcattgaatttttatttgaaaaacccaattcacctccctcttgggtgtttttctcatttaagattaacctttattttctcactcttgttttcagaatcttcctttatacctgcagtgttagttctcatagaaagcatttcattttcattaaacacaacatcatgatttattattattttaacactcggagattccttattccatagcctgtaacctttaataccctttggataacctaagaagatacatttcattgaccttggttctaatttttcttcactttggtgaacataagctttgcactcgaaaattctaaggtgatcatagttagaaggctttccaaaccaaagctcttttagagttttaaagtctatagcattagatggagttctatttactaaatagaaagctatcattacagcttcaccccaaaaatgtttagataagccagaactatacaacatacactttattttatctaacaatgtcctattcatcatctctactaggccattttgttgaggtgtattcctcactattttgtgtcttaaaatactttgatttttacaaaacatttcaaattcctcattgcaaaactctagcccattatctgtctctaacacctttactcttttattagtttgattttcaattaaaaccttccactcttaacttttgttaagatagtatgttcatctttagtttttaacaagtatagccaaacttttctggagtaatcatcaatcaaggatagaaagtacatttttccacagtgagtagagattcttgtaggtccccatagatctgaatgcacatattccaatacatcctttgacttgtgtattgcaactttgaatgccaacctctcttgcttgccaagaatacaatactgacaaaaatcaatattgctgatgttatcctcacacaataggccttgcttgtgcaatttttttagacctcgatcacttaagtgaccaagtcttctatgccaaagaactgttttatcagtttcagttcttaacactgatcccattaaacctttcaatgtgtgactttctaggatatacaagccatttctcttctgaccattcatgacaaccatggcaccttttgaaattgttaatttcctagtttctgctttgaagttataacttgattcgtccaaagttccaagaaatattagatttctcttcaagtctggtacgtgcatgacttctttgagagttcttgtcattccatcaaacatgttaatagccatcgtgccaattccaaccacactgcagctcatgttgtttcccagcaacacttttccaccattaacttgggatatattacaaatagtagttggattttacggatatattagaaaatatcagtggatattttttaaaataaaaaaaatgataaatggaaattaattaaaacttccaaaatggttgaaaaaacaataatatatgattggagttgtaaacaaaaatatataattaaagttgttttaaggaagaaattaatacatacacgatgaatttataacattaaacaataatgtattgagtttgaaaatctattaatattaaaataagaatgtatttaattttttatttaaaaatattgaaaattttatgtataaatttataattatcttgtatttaatttattatataaaatacatactaatataattaaaattaacttatttataaagtttttactaagaaaagtatatttccatatattcatatcaataaaaaatcataaaatataaaatacaaatttcaaatacttagcactttttggtcaaaggtactatctttgatcatttaggtattacatattttttaccactttaagcacttcatttgattgatgacctcatgaaatttgaattatttttagagaatttttattttttaattatttttatataagtgcatgaaaacactttttttaaataaaaaaatttatgatttatgatatatataatattatttatatatataaactacatgtgtgattcaaataataaagcacatttggttagcgagggccagtttgtttcacacaaaagacccaggtacgaaccttggtcttaagctttttctgtcttcagccctttaagtggcaatcccacatcggattcgcaatggccatctctttgttagggctaggattgtgcagcctttagccaagctgtttcacagctggactgggccgtgatccacatcttgaggcccaaagagttctgggggtcactgacgtgttgggccattgacatatcgacgccagatttccatggttttaaccctaaatttctatcaagaggccgccgcgtccatgattttgaaaaaaaaaaatatagtaatttgaaaaagcattttttaaagtgggcatttcaaaaaaaatatttttaaatttattaggaggaatccaatttgtagttgtctatgaagaagactttgggcttatcaaaagacagttgttaaagggagactggataagtttgtactttcaagcttacaatttgttttctagtgagtgtaaggtcagaaggagcgagatgaggggtgggtggtggctgtgagtcaaagcaattgattgagctgagtttcaacgcgtccggattttaagtcggtggtggcggccaaaccaattgattgagcttgagctggggttttcgcccagttgagaattgaccaaggagcatatcttgtaattgaaatgagaaaatctatcatatgagtcaagattgttggctaaacctttatatcatcgtccccttt

SEQ ID NO: 11975 - DNA, 1619 bp, Vitis vinifera
  Intron number 1 from transcript GSVIVT01013231001 (locus G SVIVG01013231001) derived from phytozome v7.0 (chr-ID chr2 ; pos 6499898 to 6501516)
cctcaaaacgctgcgtttcaatccatcttttaccggtacgcctccaactcaattaacccttcttcttcttcttcttttatttttattttttaaaatattttttctatcgtgttttggtttcaatttatgctctgtttggttgccgagaaaatggttgcagatacaaaagtgaatttggaaattttgagtccgacatttaggttttttttttcctccaattatttcaaatcgtgcaaactgaggcaactgctaacttcagatttgaaaattcttattattttctttttgtttattttcgttggttttattgggaatcgagcggagggataggttgaagagcatgttcaatgttcaatgatttttgtgctttctccttcggatctgcttatgttagggcttgtgaagtttttttcttttcgtgaacttcatgcgttttagtgttgtctgcattgaaagatttcaagtgctggaatggagacagttgaggaagttttaggattcttggtttgagattttggacttaaaattagggaatttaagcccggattctctggtcttgttggaaaaacaaaaaatgatgcagaagggaaaattgatctcaatactgtcgattctgatttaaagacttcgtttaggggacatgcatgactcccgacttaccctggaagtaccagaactcttgaaaatttcccaagcttctggaaagtttcccttcatcaaggagtgcaaaaatccaaaacttatgacttattcacaaagatatcaaattgtttgaataatcaatgtatgttctatgaaattcccaaattatgccagataattctagtttgacagcttctatcattctttctttgaatttctttctcaatttgatgttatcataattgttcccaataaatcatttttttattggtaattatcaccccataaatcatgtttgaataattaatgtatattttatggattccactaccaagaataaaattaataagaaatcaaatagctttatttagtatcacgcatttcaaaacttagaataataatatgcatcacgatctcaattctatgaataatgtatttcaaggttctcccatacacctacaccacctgcagtagtgtcttccactcttcctagaggacacttcaggggttttcaccaatggtcctactagctcctttttgggattcgcactataggagcaaatcaccccgtttatatctgcccactgcacctagaatctgtctctatttcataatattcaagattgaaattcttttctagaaaatcaatgaagatatttcatgaatgtttaaatgttctgtgttttatgacaacctgtaaggcactccatgccctgtctctgggctgcaactggctttgtgaaggattagatcctaactaatgcacaagcagagttcatattgttggtgcaaaaataatttaaaatttgataatgaactattgttctacaatttcttcaaagcacagtggtgtgtgagtcttttaacatgtcaccctattcaattgctacatttacctgttttcctttgccctggcgccaaagatctacttttttttacttatccccaccttatcatgatttcagttattaccccat

SEQ ID NO: 11976 - DNA, 9813 bp, Vitis vinifera
  Intron number 3 from transcript GSVIVT01010955001 (locus G SVIVG01010955001) derived from phytozome v7.0 (chr-ID chr7 ; pos 2669975 to 2679787 reverse strand)
gcggtgagagctcataattggaagtgagctcttcaaaatatatcttttaattaataccaaaaaaatatcataaatttagaaaatgcaaaacttgaaaaacaaattattggtttctttactgcgttttcttctaaatttggaaaataaattgtaaaaaaagacactcataatctcctttactaattcataaaatcaaaccgccaagagattgaaatttgtaagtgaattgactggaaacatttcgatggataaacctttgacttaaaccctttttctctgacttttcttgaaaatgagctctaagaaaatgcgagaaaatacccaaagccttcttgggttggggtgggccgtttaggccttttttgtggcccaaagccaccgttcattaaaaataataattttttaaagaaaaaaaataggttaaaagaatttttttggaggaaaaaaaaaccgctccctttaaaattttcttttaattcaaaaaccaaattcaaaattaaacccaatttgtattttttaacttaaatcttgaattgaactgctttaaaattagaaattttaaagctgcttgactttacctatttaaaaataattttaccataataaaaattttaattttaattttctcttaatagaatttttttctctattatctttttattttttaacttcgataacatccattcttgtttttttctcataataaaactaaatttacttttattttattttattttgttattctttactttaaaatacatcaaattacttagttttcatttgaatgtcattcctattttccatttttaaaattagaaaatagtaataacttttatataagatataaaaaattttaaatgcttatattgaaaatgtaatagttttaaaactatttaaaaaaattaaagtatataaatctcaaattttaaattttctaaaagtgatttttaaatattaagattaagaaaataaaggataattttaatgaagaaaacacccgagatgaggggtgaattgagttttaattttttgtatttttcaatcataacaaattcaagcaaagaaaacacaaatataaagagataaggttagaggaagtaaactcaaattttatagtggtttgacaccccttgcttacgtccattctcttcaagctcttaaccgagtgaaggtttcactatacttgaagcttcaaccaagcttctagcatctttacacttggattctgacttcaatgagtttttacacaatctcttcaagtctctactcacttgaagcttataacactcaaataacaaattcaaatatctcaacctaactcaacaaaagcttaaatacaactcaaatgctaggatgaattacaagggtgtactaaagcatatgcaaataaagatttaatgcaccaaagaaagaatgagagttattgaggtaagaacaagtaagtatacaaataaatgtaggtattctcttactcataaatgaagtagaattctcaatttagaggtttctagctttgaaagccaaaaatgtcaaaaattagcctcaaagagtcgggggtcaactgattgactagccattgggcaataaatgcatagaaagtgatcgttaggcctcgatcggtccttgatcagacctctattgggaatgcatatctctcgatcgggaatgcaagactattagaagatagagaaatttttttgcatctctcaaccggaaaggtgtaaccgattgactgatacactaactggttgagccggttggctagtgcttcgactggttcaccatttttggtctgtaaacctatctttttctattcttttcacttctaatacttagacaaggtctttaggtaaactaatatgtcgattttgaaatgatttttctaaggttcatttgataaaactcgggttttgatggaaatgcaactctaatgcataaatcgagtttttaaagatgcatgaaaatatatgaaaatcctaagtgcacctatgcattcatcttacatatgttttctatgattaaaggttcttccaattgtcttgatcttgcatcaattaggtactttgatgaattttccaactaacacttgaaattctttataattcaaaccaattaacaacttaaccatgatttgttattataaaaacatgattaggagaacccttgggctaacaaagataaatatgtacttttttgaaatgtcttctttcgtttctcaaaggtgaagtaaggctaagctcatgtggttattattttgaatcgaaacaagttgataagatctttttctacttcctcgtgtccttcttacatggtcatgaactaaaaaagaaaagaaaatgtgaattaaaggctaattcactaagaaaaatagtcaaaagggagggtaaattgaattttaaaaacttttttgaaaactactcctaagtaacaattaaaagaacaataaaagtaaaaacacaaaagtaagagaaattgcaaacatggtttgtagtggttcgacaattctcgcctatgttcatttctccttaaactccttccaagtgagcgttcaattagtgtgaagctttaaccaagcttctatgctcttacaattggatgcacgactctaataggcactataaaccattcaagtttacccccaacttgaagattaaacactcaaccttactttaatcaagagaatttggaatcactcaatcctagtacagttaatttgcaagtacaaaagaaactaggatgaaaacaaaggtgcgccaagcatgatttgcaaatgaaagtttattacactaaagaatgaaaaagagcttttaatgtgagaaacaagtagatagagagttgaatgcaagtattctctatatcatgaatgaatgagatctctttatttataggtttataacctcgaacaccataaggttcaccaataggcctttcccagttaagctccggttcgacatcgattgactagctgttggacatttaatgcttgataggtgaccgttaggactcctctaaacctcaactgagaaataagataccatcgactaggaaaaggtttctctcgtttaggagagcaatcattttgaaagaaagagaaagtttttgcactccttgaccaagaaattaaactaattgaccaattccttaaccggtcgagttggttcaactcattttcaatcggttggacatttttaactcaaaacctatctttttcaatttcatttttttttaacacttagacaacatctttaaatacttttataaaacaaatttaagtagttttgcctaaggtttttagatcaataatcgagtttataaaaatatgatttttaaggcttaaaacgagcatggaaaagatgcattcttaaaaagaaatactaggtgcactcaagtacttatcttacgtagggttcctaagcttgatgggtcttcatatatacttgatcttgctctccatggatcctttatgattcactttgatttttcatttgattttcttgattaactcttaaaacttaacttgatttttgatcattagcaaactaaccatgatttgttatcatcaaaacatacttagggaaacccttaggctaatagagaaggatgtgtttcttcttacttttagcatagttgatcccttggtgggaggcctacacaacgggctattagcttagtagtacaacatgctataaaactaaggaagttaattttgattttgatgataacataacaaagttgaaaaccaatgatttatcccaagggtgcttaggtaagaaaatttccataaaagcaattatcaagtagaaaaaaaaaatcaataataaggataataccttaaaaaatggtatttaaagataatttttatagaatccctttgtaaagttattggcctattaattcatattacatttcatttttacttaaacacctaaagtcattaaagtactaaattgttttgcattcttttataaattagatgaaaaaaattgatgtaaggaaaaatctaagttttaatgtgagtaaaatatttttaaaggtttgaaagattgaggagctattaatcgaggtttaccaaccttaattcaatctgaaaaatgtgcaatccattgaggtacaagagaaccggttaatgcggttagactcaactaattgaggagagcaaaaatgctcaactttattgaaaataaaatactaaaacctaaatacttgataactctagctaagaaaaaccagagatagaattaccatggcttgataatattttggggtgtcatcctttggaattatctctaacgtgtttatttgtttttagattaaaaagattaattatttgtttaagataataaaatcataatttaaataaatagggataaaatatcaataaagatttcttgaatattaaatgaactaaatcaaattaaaaaaggaatgttccagagagtttcataatctaaggtcaaatccttagaaggatagcattataaaatctagggtgtaagatcaaagtcaatccacaaccaaattgaatcctaagattaatgttacatccaaaacttagttttttttcttttttaaaacatatttctaaaaccatcaagtgaatgagaataaaaattaattattggttcaaagtttgactttttgacatttccaactccttgtatctttgttttaagaaaaaataaggataaaaaagactaggataactaaagattagaagttaccaaaaatcactagtaacgggtaataatctactgtatcaatccccaatacaaactcacaatgataggtgctagtcaattttgattttcagttttattcaatcaaaggctatatccatctttgtagatttgacccttaaattcgttaatagtaagatcaaattatagtaattagtgatcaatgtcttctcaataatcactactatcttgataagaatcatttgtaatttatctacagtgaactcacgtaaaagatttattcttatcaattaaatcttgaaaacataaagaaaatcatactttgtcgtgttattgcttttttttttttttggattcttcaccttcatcatgttagcatatttggattaatcaagttagccaaacatgatggagggcttcttcttacaacccatgtttggttgccgagaaaataaaatagaaagattgaaaaagaaaagaaaaccttaaactctattaaagacttttaagaggagattcacttcctacactctatctttttctcttcctccttcaaaacctagaagtaaaaaattttaataaattcaataacctaacatgtgatacacttccattggccacttattacaaagaaaaattataaacaacctaaaaaaactctaaatattatgagttctaaatgagtaaaatgcattttgaattagattaaggcatttgaaactcatttttagtatgttttagagctataactcaatcaccaactgttgaattcaaaattgaggtgagttccaaatcaattttgagctcataaatggatgaaaagttccaatttgaaatcaccatggtgagttcaaaattcactatgaattttgaacttacctactactatttcacttctaatgcacataacttcctcatttcagttctaatttgcacatcatttgaagtgttagactcttgacttcccaaacttcgaaatgatacataacatgcttaaaaatgactttgggaagtcctccaaatttcacctcaaatttagagtgcttgttatagccaaattttgagttcctaatttccatgtgaatttgattgtatttgcttcaaacttccttcattatgatttatttccttctatctcacttcataacattcgttactagtatctcatgcctattgttttttcattatgctcttattcggactatttatggttcaagagtctgaagtctctcatttatgtatatttaaccttttctactcccttggttgagaatgaaatttgtactaagcattcttttcaccccttagatttggaattaggttcaaaaagggaagttagatccatagttaggattttagcatcaatttaagttaagtttgatgatttgagctttttatattgtataaattatattatatatgtgccattggagcacatattttggctccaatcattggcataaccttgattcaactaggttaaactaagtctcaatcagttgagtttgttaggaaatggtaaccttgatgattagtagttaatctattggttggtcaattagtactcaaattatatctagtggctctcaactcttctttgaacgagaaagagctctaaattattttttaatataattgaagcaccaagagagtgtttttagatatgcatttacttttaaacttgcattttattttaatgtatcattcaaccttaattttattgttttgaaaaatggaccgaaccggccggtttaaccatcgactgatggcttttttggtctgatctagtgaaatggaccgtcgttggacaaaataaatcgacaattcaatcgccaaaccagacaaactatccaatttctcatgaactagtcaattatggtttaaccaaattccaccctggtttccacaattttctagctcatttctcactttcttccaagcccatttattgtattatatggcaatttactttcacttatgatgtaaaggtataaatgctacataaatgctttgtagaatttcaatgtgggagaggttaggccttagtaataataaaataagcttcacatggaggggaattgaaacctaggacatgtggtttacataatgagtggtcgaccaccaacttacatagctatttggtcaataacatggaaaatacgtatatatcctactttaaatttttatcatagagaacatttaaataaatataaatatttatatctaccattattggtataataattattaattataaataaaaaaataacataaattaattaatataatagtttttaaaattttaaaataacaaaatacatatatatatatatatatatatatatatatatatgcaattaatttaaatattataattttttatcttgaatatatcctcatatttaaatattgttctatttaataaaatttaatatattaatacatttatatttatatttatcatttaatatttaatttgacatatcaaatataaaatacaaaatattattaaaaaattatatatatatatatatatatatatatatatatatatatatatatatatatatatattaattttattaaaatataaattatatatttataatatcaccgatttgaccgcggttaaatcacatgttcgaccggtgaatcgataacttttttggttcaatatctgatccaattttgaaaataatgctttatattgaaattttttgttataaagaatatttaaaacaataatccaaaagggtatttggagctagaagtccaagaaagttgattggaactatggtccattgtaaacttgaaggtttgagttagaaaccttattaaaaaatctgtcccctgattgaaaacttgaggaaagtaaatgtaagttgggttgtgtcaaattgctgtaaaatattgtgtttatatattttttttcctctttattttttatttatttatttgtaatttgttattatattgatttttattatatcattttttttatattgtcacttacattctttaagtttcaatttgcaaaagtgaccatcattgtattcaccatataaggtgaagaccaaccaaactcatgtcattattatgttgggtgagaacaaattgataaaaccttattttacgtcctcatgtctctcttatgtggtgatattgaagtaaaaaaagacaaaagaatgatgaagtttcactcgctcttggcatggtgggtccctaatggaagacttgtactatgaactattagcttggtggtacaacatgcccctgataattgtgttgttgtgccaaagttgtaagagctgtcaaccatgtagatagttcaatgactcattaatatctctacttttgtacaaaagtttctaaaaataaaaaactaagaagtgtatctcattgaatatttaaattttatacatttgactcaaaaataaatttttcataaattaataaaattatcccaagaaataaaagaatataattaatataaaatatttttttgtcattttctttactttctaaaaaaatattactaaaaaataaaattaactaatttggataaaaagtcaatctgaaaaaattcacaattttctaaaattgaaatatatatatatatatatatatatatatatatatatatatatatatatatatattcatatatcatgtatatgagtaattactaataagtagaatttaacataaaaaaactttacgtgttttttacttaattgaacataattagaaaccctaattatcatcttattaccaattttttaagtgatcccatcattaatcattataaatttttgtattacaatccattttgatattttaggatatttagaaatatattaaattactaattttcaaatatttttcttagttatataaaacaacaatggagtaaattttggtattttaggattttctacaatttattaaattaattttattttaattattgtttttcaaatatctttatcctaaaatacaaataaacaaaatacatttttttaaggataaagactacttatttacatacaatatacaacattaataattaataacattcaaattaaggtccatttgagaattttaagatcataaaaattaaaaaaattacaagttttcataatttcctaataaatgagagttcatcacatgaaaattttcatataaataaataaattttatatctaataagtcaataactaattaaaaatatttagcattattttagagtttattaatttaaaaatatagttttactagaagaaaagaaccaaaaaagaaaaagaactctaatcaaattttacctaatttattttttataatggattagctaagaaaattaatgttgttcaataaatttttaacaatttatatgattctaaaatgatttttttgaaaaaaaaattaaaattataataaaaataacttgaaaaaattaatgacgaaaagagttgtcatatttagacaacaaccatgtgtgccatacacaaaagcaatttgaaatttgtgcgtcttagacattatattagttaatgaattctgaagaattctatctctatgaatgtaaagtagtaataaccaatgttatcttctttagatgagagggagagagtacattttccattatgaaaatgaattagacattatgttagtttatgaatttgacaagaattctatctctataatataaaggagcaataaccaatttccttttctatcaaggggatgagaaatatcaataattttattttttttaattattattattattattattatgaatcttcttaaatggagaagttttatttcatggtcctttttttttttatcactctatgtcgtgttcattgaacttttctttaatcataaaatagatgatacttaaaatagtcaaagatagaacttaaactattaaaaaaatagtatctgaataattgaatataaatttgtatttttttaaactcggattgttgtgatttttttgatattatattttccaaacaaggcctatgaatatatgcaattcatcttagggtcaaccatcataggcttcctgtgatctgtgatgttgcagaaagaatacgtttaacacgtgatt

SEQ ID NO: 11977 - DNA, 3217 bp, Vitis vinifera
  Intron number 18 from transcript GSVIVT01022846001 (locus GSVIVG01022846001) derived from phytozome v7.0 (chr-ID chr 12; pos 18820566 to 18823782)
aagacacttgcaaaggtttcttggaggttgcaaaggtctgttgaaggttacttcatatttatttattttgtcttttacttttaaaatttgcttacatattatatagcatgccatatttttgtgtgcgcctccagtgtttcttgttgcaacatttacatctcttggtcttctattccaatatcaatgtacatacacctctatgacttgttgaagcttgtaatgatttagtggataaatgtgcgtatatatccttctccttgtgcttggttttaccattggtttctttgagtatcgaattgctttaaattggttaggactatcttttattagaggcatttatatgccaataagaaagatatacatggcttattaattggctatttcatgatgacatgataatgaatatggaacataaggcgatgaagaaaaatgacataacataaacatacgagtctgtagacatgaagggctcttgaagtagagcccatatgacaccatgcctgatatgaagtgggccccactggacattgtgtataaaatgcagctaaccacatttttatctttatccatcttgatgcttaatgcttggctagatccatggcaatatctgaggaatgctaatgtatttgggactggttgccagttttcttagtttaggtaccttgctgaaggtgaaatggcttggtggttgggatgaagctagttgtctctagtgttctataatcagggttggccaccttcttgccatcgtcctttgagggaaattgaggagtgaatcacaacaaatgtctatgtttttcatattatacttgtttcatgtggcattaattgatttggcaagaatatcctggaggatatgcttacaaaagataaatatcgagccttcaaggataggtatttgtcttcctatcaataggctctgagcattttgaaattttcagggaaaactgtgtcaagtatttgagaaaaagctttacaattgttgtagcgcaaatcccaacccaaggacatcttatatcaaaattactttaaatcacagaagttagagacttgaaatgcagtccatggagctctttgtgaacttttgaataaaatattagacagcagaaagacaggctggaaagatccttgtgaccctctcactactgccatcctcaatacatttttgcctcactttactcccattgattttgtcacctcattactgaagggctactttaccactgcaaagtcaagtcattaccttcaccattgcaccttaacattgtctgtatcttagcttagctccccaataagagagtcctaagatagagggattcatttcagcttaacattagaaatcaacaattattctttacatgattttgtgtaaagatgcctctttgttgataggagaatgctataatgcatttggtggtttgcaaactgaactcgatgaaataaaactggtttttcctttgaattcattccactgggctttaatcttaaaaaaaaagggttttgttatcatatcccaatgcataatttgtctttttttacatttgtatgttaataatcttctgagtttctacaaacagctatttttacacatcttgaagtgaatgttttcaaactccattaatattttatcaaaatattcatcaagcattgaaatgtgcttctacaaaatttttctgcaatatccacattcaaacgaatgaaatttccagcaggatatttagaaacttatgtgcactatgcctcaaaccacaaccaggatgtgcttgtaaatccatcctgagattagtgtggtagtgacatgtcattctattagttaatacttgatagagtttcttttattgtctaggtttcatctctagaagaattactcgtgaatgcttactttcaacatcaagtagctacttcctatgaagttttcgaatagcttcatgagttattgatttttcgtcttctcatgttaccatggtttgctttatgactatagcaatctgtgccatggttcaaagttgtggtatcggtcattgactcggagggtcctgaggcatatcggtctcggtgtctcaattcgatatcgggcgatacacaaaataagataattaaaaattttaaaaaattataaaaatattatgtaaattataaaaaaagtatatataattaaaaaagcttaaaaaattaataaaaacaatttttttttcacattcaagtcaaagttatttaggataatattaagaattggggatttaattctcactttgccatataaatatatttaatttatcattaaatcccatccataccttccatatcattttactttaccaatttgagctaccaatctcccacacaccaccattgctgtcaagacccacaacagacgacaccacctgcaattgcaaatttacaactatgcaagacccaacactggagggggagcaatctgactgtgagggggttgccttgccgatgtctccgatgaaagattcagtccacttgacgagtcaccactgtcgacaccaaagctctgccctccaataatgctcgatttttaggaaaatcaggtaagtaaagcctaaatcatgccctcatgcttcagtggtttctcctcttatctccgaacgggtcatgggttgggttttttcttcttcatcttctttgatcctctcattgatggtttaaaagttctaattttagaatgggtatttgcttttgaaaggggaatctcccattttttatttttttttgaaaatcttctgatattttgttgcagttggaaagaaaaattgaaaaattctctgtaatctaatcgagttgaccgagttaactcagaaactcaaacgagtcaaccgagtcttaccaattccctgctgagtttgtgcattatatcgtatctggtagcagtctcgtcgtggcaggtgtcgaggtgtagatgcaactcggctgagttgtatcggacttggccaatactttgaaccctgatctgtgtgcttaactgcagcaataaaatagacacaaaatagatttccatgttaaaaagctgatattaatttattcatttgttcaaatgtggaaaatttggtctatatcttcatgtaccacttggaatgttatagctattattcatattggatttagcatcatatagcttggagaacattttttattaaattgcttattgatggtaggaagctgtgcatcaaactgtgagtgttatatttga

SEQ ID NO: 11978 - DNA, 10742 bp, Vitis vinifera
  Intron number 12 from transcript GSVIVT01021264001 (locus GSVIVG01021264001) derived from phytozome v7.0 (chr-ID chr 10; pos 3177758 to 3188499)
gtttctatcgctgaaaagcttgaacaagagaacctgtatgtaccaccatgctattttattatccctaattttttctgtcatttctaattttttccttcattgcagagtttaaatggatctaattcttaacgagcagaacctcttatctaacttaaatactaaaacctttaatgacaggactaccattgatattaatgtatgctataacttttttctgttgtgtgtgtgtgtgtgtcaaagcttgataacttctccatccacaaattgcataattaaaagggattgaccatgttcacaaaatctagattcctttaggggttagtgatagcttatttaaattttaggagctttgagctagattgttgaaaaaggaaaagactatgttaatgtttggttgagatgccatttttagtttagttttttttttttttggaaacaggaaataaattaatggtttccattttgtttctcatatttgagaaaaataaatgtgttctttagtcacaatcatttcctatttagaaaaaaactaaaaacactaaaacacattaagataaacctaaatatcaacctttcttttgttcggatggcactaggcaataatggttgttggataaccaaatttcctaagagcttaagctgatagaatttaggtccatagtgtctatcatgctctttaacaccctccctaatgtgtgttccatacccacacatggagaaacacaaaggctgtaggcaaacaaccacaattagtgtttcaaccaacattaagcttaataaattgggaaataaatactctgagatgaggcttgaacgtatgatctcccatcaaacgggactttgatactatgttagtatatcatgttcttttaacaccttccctcacttgcggcctcatacttgcatatgaagagacacaaaggcttgtgggcaaacaaccatgattagcttgtaggatttgattttacaatgtatatcttgttctttaacaatgacaatgaaagtatagtggagggatggggctgacggttagaaatgtgagcaaaggacgccaaaaagccaattaagtagttactagttacaggtcaaatttccaatttaagagggattgagtcataatggacctaacctcgagctcttttgcatgaagtggctgcccacaggaacaacctgtgttgaccactcaatccacttgaaatgtattcatatgaaagaacaaatttgttggataatatattttttttataagaaaaaatgattaaaaattgtgaattatatgtaaaaattcttgtttgtatgaaagttaaaaatgaacaagtttttgttttttttgttaattttttttttttaaatttttttattttatgagaggcaattaagcggaatatgttccttcataaatatagtttatggactcatacttacaaaaaaggaataaaaaacttatattgaaacctaaaagagctcccgccccttgaagatatagaaaaagactaagaggatagcatttcatgttgacacatttgaagaaactagcatgctcaaagtttttaaaatgaaatgactgtaaaagtcattccattaggaaacaaaaataataatattatgttttttgatgggcaataatgattttattgaaaagtgcctaaaaaagggttgcattctatgtacacaagaggtatacgatgagtggctaaggtattagcaatgccttaaacttgtctaaacgatggacttaatctagaaaggattcaaagttacaatttgacatcgtattggaccatgatagtaaagtaagagtgaatagatttttcaatttcaatttgaagctctttttgccctcaaaacgtctattgttatcctctctccaaatggactaaaacaaacacatagggataatcctccaaaacctcttcttactctttcccacaaagtttccatgcaaacctaacaacattgttgattgatcgaggtaacacccacaccaaaccaaaaagagaacaccatggactataaactttgctccgccctgcaataaatgagaatatgattggcccaattcctcatcttgcttgcatggaaaacactgacccactaatgaccaaccctacccattaagctaattcaaagtaaggattttctcttaagtagcctcttgcatgaaaaaattgacattagggggcgccaaaggaacctaaacttccttggcgggaaaatagtcttgcactcaaacttatgaagtttaagatttcaccaaacaatttcatttctattagcttgcacaatccttactccttgtcaagaaaatttctcctaaaatgaggaaccaagtgttatactcaccctccctctctcaaggtgttgctaccatccatcatggcaagtggagaaataccgaacaaaattgagaaaaaatccttcaacaagcaatcctcacaccaagagtgaaacccaagcctaatttgaggtccatcaccaacaataatgcttgtaaaagcttgaaatgtttcccaaccttttcaagtagtcttccagagacccaacccatggctaacccaataatggaagtttcataaagggagtggattagggttactaaatgacaaaaaatcttctttctaaagagatttaattcaaaactattatatgttcgaggtccactattgaaataattttagaggcttacccttctctacctagcattgatatgtaacccccttccatatctgctttggatgaccattctacacaaaaaccttgttattttgcatacctccaaatccatttccctataaagttttgttgagcttgaaagtttattgattcccaatcctccctcattttctctcagcacatagtttatttaaccgaatgatacattttttcataattaccaccttctataggaaatccctttgaattttctccaatccattcctcactacttggggggtgaaaaatatttggcatatagtaaattaggaggttaggaaaagtgcttttgattaaagcaagccttctaccctgggacaaagttgccttttccaacaagttagcattcagttaaacctttcctctgctgaaccccaaatagactccgtatgaaaggagcattcaacaacaatcctaaataaatggaaggcaatttacctactttacaatcaagaattgccataagtagctccacatttgccacctcccttattaggatgagcttggtctaatagaaattaaggctagggactgcctcaatgcaaaacaaagtccaccttatgaataacaattgatttcaatctacatagaacaatggggagtcatttgcaaaaagatgggggtggggggggaggagttaagaaatctcaaccccactctacctttgatccatattaaagcctttaataaaacccatcttctctagccttgctaaaagaacaactttaggcaacttaaaaaaaaaaaaaattgttgtaagcttcaaaaaaattgaggtgtaaaaaagggtatggtgatagaatatttgacaaaaagtaaggtatgagtgagaatttttaataatttgatgaacatcgatatgcaatatatgtacatgtgtatacaaattattatatccacaaaaataatttcttgtatttcataatgtgtaaaaatatgtttaatacaaagaatactattgtaaactatttaccaaagtcgcttgggtggtggagtggattgtataggaagcgatgctgcgacggtaaagggggtggggaggtgttccattggaattcgagaccgtgcttctccaaaatctttaatgattaggagttgggtatttgggtcttttttctcaagattgcatgataagtcaatgaagagggaagtcattgacaaaaaaatttggaaggggttgtagaacaatgcttttttttgtttctttgtcttggagttaggaaggtcaattccttttccttcgagcatcatgtggaactcttgggtgttgccaaaaattagtctttttttattttttctacttgggaggctagttggggaaaagttttgatgatacatcaactccaaagaagagggtggtccttggtgaatagatgttttctttgtaaagttgaaggggaatcgattgatcgcattcttcttcattgtatcaaatcaaggatcttatgattgttttttctctttacaacaagactattagttttttcagtagtaggatggggtccaaatcctatttgtcaaaagtttaatttgaattgtgtgtttttaattagttattattattttattttgttgataggttgctgctgtcctggggccttgtttgtgactttattagactcccttgccttttttattcttttgtttgatcaagtgtgtatagggtttgctcacttctttttgcacttattatttatgctatctatttacctatatgagaaaagaacaaggtcaaataatgcctaataagttccaagatagtgatgaatctctgcatcttccaatatccaaataggaaagctgatttacttgtttatacatttatttattgatagctacaataagatgtaataaaaactgcgcacaaaccaagggcataggaattatacgaagtgcgctagaggcaaggaacaataatgagaaaataaacacagattaagcccttcgtaagaaaatatataaaatcaatcagggtgaagaggctcctttgtgggcaagaagaggaaggtggcgtggcttttggggccgttatgcttgttttgggttatttggaaggctaggaattcaattgcttttgaggacggtgtgctgtccatccaaaagctgaaaatttcttttgtatatttactttggtcggaaaccaaattgtggataaaagatggtcctttgaccttaatagagtttattgattgggtgtgtatgcattaagggagagggttttttgtgctttcttagtggcttgggttcttttgtaagggggtgagttgttctacattgtatctttttgagtcgcttctttagtgcctcttttgcaatacacatattacttactgataaaaaaaaaataaaaaaaatcgatcaagatttggcaagaccctagaccaagtgaaccaagtttcaaaaatgtgttcttcaacaccaaacactactttttattgtcctcattgtgggcccctcactgttgttctgtaccctattgctgtttgaatccatgagatagccgtggatcatgagacacaaggtcgagtggcttgtccgtctaaaccaagcgtagtagatggactctcaaacaaccgggcaatgaaaatagcacctgagatgcatccaagcattaattgcactaggcagttagtcttgattgacacagccgttacgaggctaaaatgtcagtctttaaggctcatcaaggcaagacaaccgttatgagttgacagacatcttttctttgggtctttccttaatcaatagataaagcacaagggggataagcctccaaaacctcttttgactcctaatgaaacttgcttgtcatcttagcaacaattgctttaaagagtggggtagcacccaagtaattccaaacaaagcaaaaactaagggcccacaaactgcacaccaactctgaatggataagcaaatgattcccttcttccttcttgtcgagataacatctactagctaaagccaatacctcttcctaagctggtctgttaggattttctcctagaccatctcccaagcgcaaaactgacttcagaaggtccaggggggattgaatctcctttgctaaaaaaaaattacaataattggtgacgatatgaacctattttatacaatgttattcataacaggttcttttatgggaaaagtttgatttgtattgttttttttttctccatttaatactcaattaaagtaggtttgattgagaaagaaggggaaaacaccattctaattctctgtttacttccatttttttttcataagttactgcccttcattttttatggaagtttattcttcatttgtactttgacttcttttccttgaataaattaggttgcaaattggggtgtgtaacctttaacttttccaatctagcatgataacaactcaactcataccttttcaagagaaacccctaagatcctatgtaaatgtttgccttttactcaaaatgaaataatactttgcaaaaggagttctttttccctcaaattattctcacaagcggaacatcttcaaaaagtgaaactatgggagaccatttgctctttttagttgggaatatgtctcaaatttctaatgatgttgaaggatgacactttttctgttaagaccctttacaaggcattggagctaggaaaacagggcgtttttccaacagttgtgatttggaacccttaggtgccaaaggtgggtttctttgcttaggagattacttgggataatgttttaactttggatcacattcaaatgagaggtttggtatttggtgaacagatgcttcctttgctttatagaggaagaatccgttgattacatcttcatccactataagcaagggttttatgacatcttttgttctctctgtttggcgtgttgtgggtgctcccctctttggttagagagacacttttaagatgacaaggttctttcatgggtaaaaaagggaaaaggtgtagcaaattgcttccttatgcctattttgaacaatttgaaaggaaataaacagtagagtgtttgaaaatgaggaggttcaatggcttaaattttctttcctttgtaatttttgggcatggtgtaagttgtttatggttcctagtcctttttccactgtagactttgttgactggttgggtttgggttgaggcggttgttttttgttattcctcattttttgtggtgcctttaggcattctttttatacttcctgtatgctttaggatgctcttttagtgttcctcttttattttataatattcttctttttacccattaaaaaaagaaaaagaaaaaaaaagagaagagaatctctaatttttgttgatattccttttcttaaaaatcttttgtttacgtttttcttgggaagtgcattttggagaaagtggtgctagtcttgtgttcaggaatgactcatttgttcttgtctggtgggactatcttgattttggagtcattttagcagcttatccactatgtggcagttggtggggagtaaaaataatttagtatgaaatgtccctaagaaaggatgcttttcagtgaaatccttttgtatattgccttttatttttcaaaagttttttcccccatttttggtttgggaggtgtatggttcaaatgcttcttcgaaggttggtttctttatttgggattctgcaggggagaaggttcttattatcaaccaacttaggagaagagggaagatcattgttaactgatgttgcttgtgtaagcaaaagcagtcaagttaaccatgttcctattcattgtgattatacatacttttgttgtgtattatttgccatctttggagtagcttgggttttgactcactcaattatggacatgctgattagctgacacagtagattgtgccctcatttgtcaggcctgcgtgtgattgttgtatactttttgcatgccaaggttaagtcctcatttgacttgacttatgattagaacagtcatatggtttcatgttggttaattgtgtcaagttccccttgttgaaaaagaactcatgttttggttgattgttatcgcattcttgagaattccattggtaattttattcctcacacttccatgaggttgatgttttttctttgtttcttacccttttttaaatattttcacctgcttgatcataatctttcttgtctgtaatcaaagcaaagtttgtagataattctattgtaatcaaagcaaagcttgatcataatctttattagctggcatgactataatctattgtccatctttatggcatgagtaaatgtttttgatatctgctatgaattgtgcagagattgttacccatataggcctaaggaacacatgacatgtatttattgtgatcatgataccacatgtcacaagaagcttcctatagggaaagaaactaaacatggtgttttatcccacttacgggctttggtgttctctctatttgaagtgttttaggtgctttcttgagtcattggagatgtgttgcatagttggcatattgctcttgccaaaaagacacacaagattgatcatgttgcagatcttctctcaactaccaatttggatttaccttatctgagcattttacttggtccaccatgttaaattttgccaaataaattttaactctcttttgaccatcaatttctttgaacttaaattatttcttaagcctatacaacgagtcccgaaattactcacattttaagtttccattgaagtcaggagcattgctcctcaatcctaaatcactaaaattctctagagcttgcataagccattcctcaaacttttctggtgcatattcatctgaattactcagatttgattggaggaatgtgattcatctacttgcaacagatcaggttgtccaggtcttgtgaggaggtacttaagagctagcacccactggacttggtccatgattagaaagatgatatgattcacattgcttaggctctgttggtgcactgcttggaagatttaaaaggtctttttgacagtaaaaactcttttacagggtgttttattgcatttaagaagttctttgagctacacaaattagaaagtaaaagctttttcagaaaaagttacaacccagtagctctttcgaaaagatcttcaatgaggtagactttgtttgaagaaattattttatgaggacctttataaccttgaaactttgataaaagacatttaaaattatcagttttatcaatgacaaagttcatttatttgtttaaaaaactacttttaaaaatgtagcaaccaaatacttcataaaactctttctaataagctcttttactcacagatcttttaaaaaaaaaagactattagaaactatagccatgctgaaggggccgtagttatattaaacgcctgttgggggtttctttgcatgcttatagttgtgcatgtttgtgtgttttttaatgaaattttcagttttttagttcttctggtttttttttttcccagttttggaaatatacataatttaatcttctgtactagtgaaacttgttgctcatctaattcccatggatgtagtcatgtttttcggtgaaccaagtaaactcatgttagattcttaactgattttccacctgccaatttaatcccgattaatccctcctagatgtcaatgatctggtgttagaggaactcaaaaatctattacaattatggtgttagagcttgatgtggaggttaactgcaatagtggtgaaaactctgttgttaagtgttgagatagcataattcaatagaaagataatcaactcatagcaggttatggtttttccgcccctatttaagctggtgctctaaggtgttacaagaatgatggagtcaattttgtcagattttgacattaattggctgtggtggagaagatggctcaaggcttggtagaatttgaaccaacgtggacattgttgtgaatttggtcaaattcttaattttgttactattcttttttttagaaaaagttctattgggattttcttatgagtacagaagttgcttatggaaccctatattgaaggaaatggttataggatttgtgctgcacttttgagagtgagctgttaagatctttatgtggctcgtctgagtgaggtcttacaaacttgagatctgctcttgttagactttgccttttggataagtcgatgtttttagcaagcttcattactagtaaaacttggtgattgtcttcacatatggagaaagcctctttgttggtgagttacccaaaatgcttggaactgtttttgattcttttctgttactttttaacctgttgactaatctggattaacaagcctgttgcaccagtacaagttgtttattctttttctttgaagttttcatacaacataggtgaataaggaatgaacaattggaactgacaacctcagactatgtttggtttaggggctaggtaccttagcaagaggacaggggtttgtgccctgtttttggtattgcagtcgagtggtttcagtcagcatctatgggggagaatcaataaaattgagccaaaaatactagtagtaagaatcaataaaattgagcaaccagtttcattcatgaaaggcttcctcacaaaactaagaaaaggagaatgttttcctttattttgcatgattataaattttatcatcaaccaagtatcaatttatttatgctgtgaagtggctaagcctgtgaaatcaataagggtgttagtttctcctaattcactaaggagttacagtggagtataagttggttctgggaatgttcatgataaaatcctcttcttttggtcttggcatgaaccttcgaatgtgtctcctataatcttgattgattagtgtttattgaagcatccttccaaaaatgtttcttgtatacattgcaattttaaaggattcctgtgaaataggttcatgaactttgaataagctctgatctttatctattttacaggagattggaacctagatcaagaagtttgctgtgtt

SEQ ID NO: 11979 - DNA, 13662 bp, Vitis vinifera
  Intron number 8 from transcript GSVIVT01008298001 (locus G SVIVG01008298001) derived from phytozome v7.0 (chr-ID chr1 7; pos 3492792 to 3506453)
aaggtatgggtaaaattctaaaagttttcacaaggctatgcttttcaactttctgtgctgtggtttattccactcctcccccgattcttttctttctttttcattttttccttaaatttccttgaagaaaagcattttaatttgtttgaatactgttggtgtgggacactgaggaatcacatttggctccctaggtggctattcctagaggcaaatgcagtttcatacccatattgaaatctgttagactctctgtagtctaaagaaagtgtataaggtttctccttggctatatgtgaggattaaaatgtctagattgacagaaatatagactgtccagatgtgtaggatgacttgaaatttccattgacaaaagaaacaattttagggaattttcaaaagaaatgatcaaaatatgaaattcaattggaacttcagaaattaataacataaataactacacactatttggactaaaggaaaaaaaaattcatgtataagttgaaagtgctttcatggataaggtgaaaataatgagtaattgatgtatagggtcagttcatgtaagctgtaagggtatgtataagctgtatattggtaaaaaagaaaatgtagttgaacattgggtactagtttagtgtgtatcattttatttcattatattttgacttagagcttctgtttgtgttaattttatctgtgtatcctcatatttttaatctctttatgctttatttatttatttatttttattagaatctctttatgctttattgtcatcatctttttcaatacatataaaagggagaaagacattcaagctaattggatgtttttatttatttaattttttttctctggattggatatacttatgggtgatgtgtatgttaattggagcttaatgttcatttatttttcattctataacactttttgttgttaaaggcattttttctttgtggtattagatttttattctggtatataagaaattttaccaatgtcaaaggaatagaaatgcaaagcaaattaatactccaccgtaccaatgaagttcacaagggatgcaaattatgtttatgaggtaaatgggtcattaggttaccctgcccagaaactgaggaggtttctcttcaagaaactgagatggagcttatgtcttgggatgttgtgaggagtaatgatgtagggtgcttgttggtttgggcacccttgataagggttcatgcctatggtattttggttataaaaggtggtcctttgaacttaatagattttattgattgggtgggttctcggtgagggaggaggtgttttttgtatttcttgttgttttggttcagctgtaagagggtaagtgtctctatactgtacatctttggggcgctattttagctcctcttcgtaatacaatacttctacttatttataaaaaaatggtattttggttatatgggacaaaaaggtggtgttgctgattgggctggaggtgggtatcaattcagtttcttgtctgttcaagaactaataggatcattctgtatggcccttcagaggggagggttctggtcattttccttttctttttcacagtggtggattgaggcttggaaaatatctttcattttgagacaagtggccaaggagaagtttggggcttttattaaagattaattgaacagccttcattttgcaaggggaccaagtttcatcttaactagtaaattgaaggcttgaaggacttgacaatggggaacaaggctgtttttgacaatttagaactaggcaagtgtgagccttggattacattaagtagcagaatgtgaaagaaagtgctgaatgctgtctaagtggaggcagtgggtttcgagtatgaggctttgaagaggtttggaaggataaagtttttgaggaggttgattggagaaagaaatctggagccttgtggtttaggaaggggataggaataccaatgttttccatagagttgttgatgcccagagtagaggcatcacttaagcaagagttcttggttatttgaagttaaagatttttagaaaggggtggtttttttttttttttttttccaatgcttgtgttggaatcacagagttacataacctggcattggttaagattgtcttttcttctttatctataaggttggcttgggctggcaaggtcttttgaggaaggcccctgatgatttactttgacattttggcagcaatctatgggaccttctcggtgctggttctttttagagtttgaatgctatttttattgcctgtttcctgagattttaaggactatagacccataatttctgcagagggaagtatgttgggtaagaattagaggttgtccacgtgtttgctgatgatgctacgtaattttgtgatggagatagaatactattattgtattgctaatatgtgctgttttttcaagcaatgtggggtctcatgggcaattttgaccagagtgggatcatctagactaaagttgttgattgtggaccttttcatctatatcaggatgtaggtccatttacatcccaatataaaaggtgtaaactcatgcttatcacgaggcctttagccagtctcccagtggaatttatgtttgctttcagtctccctggctctgttggtaaccatttagaaaaatctaatgaaatattctatatgaggtggtgaagaagatgtatgatttggtaaaatattatactgtctgcacctcaaagaaaggagtttcgagcattagtacttgttcttggcaaagttatgcttagtaaattgttgtggagatttgcaattggagagagaaactgtagaggtatgatgatcaaggagaaatttgggtttggaaaggagcattgtagttgagggagaaagggggccaataagccatggcatttgaaaagctattcagaaaagttggaatcttttccaggcattcactgagatattggtggggatgggttgagaagtaaattctggcttcatatttgatgtgggggtcagtcttctgaggatcgcttcccagtcgttttctgtttgctggctgataggtcagctgaaggttgtttcaggttgaaagatgctcaaagtgattaaaaacctagcttcttcagtagttttcaatattttaagctcaagactcttcatggtctctgcattcatagctatagcatcagaatggatgggattccctttgtggaaggtgtcatgataggggtgattcttggtttagaattttttccctgggttgccagctcccagcatatcattcgttcctattcttagtgatgtggtataacattcttgcacacccacagttctcacttgcttggaaagcagcttagaggaagattctcacatggattagctaataatgaggtggactatggtcaattggtgctactagtgttgctgagttgagtagtccacaaatctttgttctccattgcaagttggctggatctttgtggcattacatctcattttttggcatttggttggcgttgctttttccatgaagtgttccttgacttgttggcatggtcatgctgtatgtaaagggcaaaatgaagtgtagatgcagggtcatagctggaataatgggaaagagtttttggttcaacttaaacgatgtgtctaaaatccttgttcaagtgatctaatccatccttggggttgacagagggtactgtctcttctggagatcattgagagtttactgttggcttaactttgtttttcttctttttctggggtttttcctatagggttcatggtactttaattatcatattttcctatttaaagaaaaaaaaaatcatatatcatgagctatggcaatattgcaagtagtttctaagttctagcatgattattaagcatctgagtggggaaactccattgttgatatttgctgctcagatccataattttgggatgactgacaaattatgctgtcacttgggacaacttgacaatctaacatgcccaaagctactagaagagtgtaaaagtgcttggagaatgggtgagaattaatgaagattaatcagcattgcttaaagattaatgtcctgaatgaagaagaggaaagggtgaagatggaagcttaaattaactgttggagtgctcccacaaactagtcagtttttagcaatttccatcaaaacaaaggctgtttttaggagaaattgccaaaaagaaaaagaaagtataatattatttatcaaattcatccctttgatttacattgattagcctatttataggcttctctaagaaatccaaagtctactaggactctaataacctattatgattctaattctaattataacatccaaagtctactaggactctaataacctatcataactcaaattctaattatattataactcaactagctaatcctaattagacttcaacaaataccaatcctaatttaattccaagtaataataatcctactttaattacaactaatactaattccctttcttgatatatatcttgaatattcatcctcatcaattccccctgacttgaaaaaaactcgacctcgagttttaatgattttccacgatcaattgaaattccgagcaatgccttccaccctttctttcttcgtcgtctctttcccatggtaagacaagatctcaagatctcttgaacttgttcaatttcatgcaagacaaatattggacttcgaaaaactttttgatgttgtacaacaagttgataattctcgaaataattatgtgtcttcaacaaacttgtggaaagttgtttcccacactcttcttgtaaattgttttgtggaagaataagattcttgaattccttatattcaaaagaaatttcaacagattcttcatgtttgccaccactcatgataatgtttggccttgggaagtcaaacattgattgttctgaaacttcttcaacttctttgagctcttctattggttgatctaagattagtttcatcacttcttgctttctagattcatcattgatgatttcttcgtcctttctagtaacttcgacttgctttttaataagaatatttgatggctcttctagtttcaagggtgctactttttcctctggttgcttatgtggtggaatttccttcattggacgaaggatcttctttcgcccattgcgcacaagtgtgtaagtgttctcatagccatcatgttggaccctttcatcaaaaagccatggtcttccaagcataatatgggcaactttcatcggcaaaacatcacaccatgctgataactcaaaattattattgaaattaaacgtcactagacaacgagaactcaccaaaatagatgcgtcatttacccatgctatttgatagggatttggatgatcttctgtctttagattaagcttctcaacaagctcctctgaagctagattggaacaactacctccatcaataatcaaagtgcatagtctcccttgacaagcaacacgagtttggaagatgctagtacgtcgccaatcctccttttcatttagccttggtatgttcaccaatggctgcataaaaaagttgtagccttcagccatgtttgcatacgttgctccactcctcaattacatatgccttcatgccaagaattttcactctgataccaaaattgatgtaggacaaccctaggatggttgcctacactcaaggataggtgggctagggttttatttttagggtgtaaggagaggaacaaggaataaactttatggtagagaaaattataagataagaaatagagaaaaagaagaaacaatgaagaaaagatggaaaaccttagagtctcactaaggccttctaggagtctcacctagaagaaaatcaatggagtctcaccattgagggttgcaaccttgcaatgaaagaaaatataatattattcatcaaatccatccctttgatttacattgattagcctatttataggcttctctaagaaatccaaagtctactaggactctaataacctattatgattctaattctaattataacatccaaagtctattaggattctaataacctatcatgactcaaattctaattatattataactcaactagctaatcttaattagacttcaacaaataccaatcctaatttaattccaagtaataataatcctactttaattacaactaatactaattccctttcttaatatatatcttgaatattcatcctcatcagacttggccgagaatttgccgctctttgtttcggtccaaaccaccatatcatctacatctccaagcactctcttcccgtgaagatgctccaaagatattttcgcctcttccacctcccaatcatttaggactcttgaaaagcaaggattccaacccccctcaggcaagggatcccaaacatccaccacctaagcttccttttcagcggacaaagcaaagagggaaggaaaagattcacacaaaggggaatccccacaccatctatccctccaaaatctcgccctcctcttgttgccaacactgaaggaaattcgtgcgcccaccaactcccagtccatccttattcctttccaaagccccacgccatgtgcctctctcacttcgcgagagcaccaaccctctttatctttcccatatttccctttaataacttgattccacaaagcctctctctcagttgcgaatcgccaattccatttggaaaggagagccttattgagaatggaaagacatttgacccccaatccctttttctttttacttaagcataccacctcccatcttactaaaggtggttttcgctccaagatgccaccaccccaaaggaagtccctttgaatctactctagtcttcgtctaattgaacttggtaatctcaacaaggacataaagtaaataggaagattcgacaaagtacttcggattagagttgctttccctcccttggataagtattgtctcttccacatagctaatcttttacgaaagcgctcttccactccatcccacactgatactgacttaaacggagcacccaaaggaaggcccagataagtggatgggagactacccactctacaaccgaagtctaaggcaagatcatcaatattctctaccctccctactggaatgagttctcttctccaagttaattttcaaccccgatacggcctcaaaccacataagcaaccaacttaggtaagtcagctggtcttgagaagcttggcaaaacaccaaggtgttatcaacaaacaacaagtgggaaatctaaaccctttcttcgttcctacccttcaccttacagcctaacataaaacctcccttcacagcccttttaaaaaaagagctaaagacctccatggcaatcacaaagagataaggcaagagaggatcaccttgcctcaatccccttgaactttgtgagaatcccttagacgttccattaaccatcacagagaaacttgcagtagatatgcaccacttaatccaccctattcatttatccccaaaacccattttctgcataactgtgagaagaaaagaccaatccacattgtcatatgccttctctatgtcaagtttgcacatgatcccattttcattattcttcagaatcgagtcaatggcttcattagctattagcactgcatctataatttgtctaccctccacaaaaaccccttgagccttagaaaccatctttccaaccacttttttaagtctattagctaaaaccttagccaaccacttgtataggcttcccactaagcttatgagcctaaaatccctcaaattttcaacccccaccttttttgggattaaaaccagaaaagttgcatttagccttttgacaaatttactgtgttcataaaactccttgaagaagctcatcacatcctcctttacaaagtcctaagcaaactgccagaaagccattgtaaagccatcaggccccggagctttatccccactacaacccaccaacgcgccatgcacttcctcttccgtgaacgacacttccaaagcatcagcatccaaattttgcaacgtttcgcactgtagcctggataaaggagggcgccaatcccccaaattggacagcaaggatctaaaggcatttactattccttcgctaatcccattctcctctgaatgccaaacaccattaatcctaattcggtccatattgtttcttctcctatgagcgtttgccatcttgtggaaaaaacctgtatttctatcaccctctttcaaccacacttctctagatttttgtctccaagtaacctcttctaataaaacccattttttgtattcttccatcgcttctcttctagcatccatctctttcaaagacagtttgttagtcttctcttttgcatcccaaaattgcagctgatccaaagccaaattcttcctgtaatccaccctgccaaagacatctctgttccacttcttcagtttaaacttcacaatctttagtttttcagccagaataaagcttgtagaaccattaaagttgtccccctcccaccaggcctttaacaaatctttaaacccctccaccttaagccacatattctcaaatatgaaagaggatggtccttttctcaaaccccctccttataacagaattgagaagtggttagacattggtctcggaaggacacattgccttgagccactaaaatgacaatcccattcctcattgaccaggaagcaatctagccttgagaaagattgattattcacccctccgctctaagtaaaaggacccccaaacagaggcaagtcctttaaaagtaagtcttctattgcatctgcgaatcttcacatgtctgaattataactccctcctcttctgcgctcttcagggcttaagatgacattaaaatcaccagcaaccaatgttttaaaaaccggaccggtcattgaaccggaaaaattaccggttcacggttcactggtcggaccggtggtcgaaccggtgatgtcataaatatatatttttatatattattaaaattttaaaaaaattataatattattttttatattattattaatcaattaaatataatttaaaataaaacaattaaaattagatttttttttaatgatgaaccttaacaaattcaaagagtatcatagtctaaggtagcatacattcaactcaagccacggttttgatttaataaaaattacgatgaattattaataattaataattatttatatggaggaattctctcgctcgaggcatcaagaaggccttttctgttttctgaagttgccctcccctccaggcgacacaatccctaaaaggtaaaaaagccctactttcctctgccgctctcaatccttgcagttactagtctaatcatgtttttgtttttttttctttgcaacccctgtttgattcccaagaaaatccatcccccatttgatttccgggaaaattcatcctcgtttgatttccgagaaaatccatgcaaaacccccaaggaaaaccaacaaaattgtattttttttgctccctattttctggatctgttcttggggtctctttgcttttgtgcgaatggatttaaatttcacgaaccctaactccaggatttttgagaaatatcgccaaaatttttcgatatttcaaacactgccggcaataatgggaacagccgcgggggatggggggttgagtggccggcgacggggctttgcagcattttgggggagggctttccaatgcatgggggctgctgccaacgggacgacactccagtgaccggcgacaatgggaatagctgcgcgaatgctgggaggaaaaaaaaaatttgagccggacggttcgaagggaaccgaccggttcgtccggttcggcggtctgatcgtcagttcgtccggttcgattccagctcaacctctttgcgggccaaatggccggaccggaccggaatggtgaccggtcgacggtcggaccggccggtccggttcggtttttaaaacattgccagcaacacaccacggcccattccaaagaccataaatgacccccaactcattccagaaacattccctatctctcctcatggtcggaccacagacccctgtaaaagtccacataaagccatcctcacagttcttaaaatggcaagaaattgagtgttctcccttttctaactcgatcaattccaacaccctattatcccaaatcaccactataccacccgttgtaccccttgaatccacaattccccattctaaacgtctccccactcctaagctccgaataagaccccttgacatctcctgaatttttgtttcatgcaagcaaaccaagtccaccctattcttcttaatcaaagctttgatcaccttcctcttatcacaattattagcccctctaacattccaagagagtagacgaatcttcatctaaacttcgaagaactgcccctccccccccccctcttccaatataattcacagtccattccagtttcctcaactcccttttgaactttgaagattccaattctctttttcctaccatcgagcttccccttcttccccttctgaaatttcatttctttcattcttttgagcagaaacagaatctctccttcaaagccctccgtcggcattccgaggcattggctaaacttagccaagcaactggactgccaacacgactcccccatttcgttcccctcctccatactctcttgagtatccctttccaaaacgtcctccgtcccctcctcgatagtcccatcagccaaccccgacgacccgaggacctccgcctcccttccatacaccatgatcatccttagaggacccaaatctactcccccaactatttccgacctacagtcccgaccgcaatccccatctgtggcgacaagcatcccatcccgcctagaaagagaagaagaagaagagaaattccgcttccccaacgagaaaaaagcccgagaaagagaaactgtgtacctggacgcctcctccattagagcttcgtcggtaagtactttggtgtttggcgccggaggggacgagccttgttggaagtcgaaattgaccccttctggacacccacagaccaccgctcgacatcccccgtaagccctaactccagaggagtctttgacagtgggtcgccccacctcaactggacctttagttgaatccaaagtgggtcggcccacttccatacaattatgcgtgtttggtagtgggcctaagtgggacggcccacagtcctcagtgaaaacgaataggccctcctctagaaatttatctccatcatgattgaaagtgggcctaagtgagccaacccacatttgtctttgttgccaagcaggccctcctcattgggcctcctttccattgccgtctccaaaacccagcccaaagttccattaactttggctgcaggcccaaattttgaattgttccccccaccatacttctacctttttttagatgtgtccgcttctgcccctcttgtcggcatcaagtcagaaaaaaaagcctccatgtcttttctgcagcgtttttctccatcttcagatgacacagccacttttgcaggctgctcagttgactgcatctgctccaccacatagccggcgcgtgaagcccctccttcttcttccctaacctcctgctcatttcccgagccatttctggtcactggaaacacttcggacacccttggcagcacctcccaccacaattgaatagcaaaacaagtagtgccgattaccacttgcagagaacttggccattctaacccctccgacttcactaatattctggcccattggagttccttaaatgcaacagtgctttcatccactgcaacaaagccctcacagcaatttccaatctttttgaaaacttccctgctccaaaggtgcagcggtaatcccatcactctcacccaaactttcttgagttgtttacaactttgagaacaccccacttttgggtcccacctttccaagtgcagaatcgaatccttaaaacaccggaaacctctgagtaacactttgtctgcctctgcttttttctcaaactcaaacagaataaaagggccccccatccttgctaacttcactcctcctttgggtttccagtgattttttccccaactttccagagcacacaggtttggaaccgaaaccaaagcctctccccatctcccaaccaagcatcggtccaacagctcctttcctcttgacacatcttcttttcctagttgtagccacgctgcttcccctaaccttctcactcttgagactcctcttgtcttcaccgcttcaacgtaggaattttctttcttccccttagaatccccatctttgttctcagtcttagaggaagcaaaaacttccctaggctcatcacatgtcgatattccaagtgaacgaagtttttcagccaaaaaggtccagcctcctaaaaaacctcttccttctgggaacactaaacaatgtctctttgcatccgagtcaaccactgaacataataagaatctgccggcctcatttgctcgacattctagtttaaacttcctacctccatcctcccagcttttaacaaatctctgtgcaaactcacccctacagccagcctccactcccttcaacagccaacacaagctggagctcccaaatctaattcatgaagtgaatcctctacttctttccacaataatcccctttagtttcttcctaagcacatccacagaaatttcaaaagacttaagagtctattgcaaaccagcaactccctcctcttttccccatagtcctcaatatacacaaaccaatgcctacagttcatatattagttctggaaacctggttatagtataaaaaaatcttgctgccattactactagtgaacatcaagaagggtaactgtccagtgtgcataaagcaataacaaattcagcaataacaaaataaggaacaacatcaatttagggaaatgaccatgaccatgattttcctgaggggagaatgcagatgattactgttagagtgtatgatatacattatgagtgaaaatcctgcaaacttaaacttttagaaaaattggtagttcaacatggtattagtcttgtttagtgaggtcatgtgttcaaactcacaactatatatttaaatccccaatttatgaagtaagcccaaaagatgctgattgtggttgtttgcctatggacttgtgtgtctccctacatgtaggtataaggctgcgcaagaggaagggtgttagagtgcatgatataatattatgatctcaaatcctataaacttaagctttttaggaaaattggtagttcaacagttaccataaaaagtctgcatattgcagttgattcaatcctcagccgagaggcagattgtgataacaaatctctcattggaaatgtaattatgatcattgctaacccctcatgaaggtctcacacacacacacatgtacaatcatggggctttacttttgatcttcaccttaggtaaaggcagcactaaattccaataagtgttctcattgtagtatcttttacatcccatggacctgcaggagttactttttccagtt

SEQ ID NO: 11980 - DNA, 6729 bp, Vitis vinifera
  Intron number 7 from transcript GSVIVT01032195001 (locus G SVIVG01032195001) derived from phytozome v7.0 (chr-ID chr1 3; pos 21673110 to 21679838 reverse strand)
atatcagagaacctatagagtatggtgacttcatttgacacatttcctttttttttttttttttttattctgaaaacttttcttttgattataacaaaaatataaagatgttgctagaacatttaattattgtgagctggagatggaagttgtttcctcaatcattttggctccttctaattggtcggatgaaaatacttatcaaaaaaaaaaaaagttggatgaaaatgcttcagtgaaggagtgaatttggaacagtatagcaatatttaatctttctcttaagcttttgagggcagcggaaaggaggtttcccttttaggaagatttgttttttagtatgctccctctcaaaggaaatcttgaccattgacaatttagcatgaaatgctacttattgatttttatgtgatatttcttggatactttctgcattttgtttctcacttggttttagctgttaagagtaatactaatatatgatcatcatttcttttaagtatattggttgagggttggtaggaacctagaacttcttaaataataatatttattatgggacttattggaacttgcaatttaagtttattggaactctcctgtatctgttcttatatcaatatattctccttcgtttctgatcaaaaaaaaaaaaaaaaaaaattaagtttattggaacttctgaaataataatatttattttggggattttatgataaaacaaacatcatattttgtcaagtaggcttcattgatgccttagaattgaatgttgatgtctgtgatgtatcgatgaataatcttgtttacctctatggttttgggaatctcattttcttattgggctcagtttttcctattagtctctgcttacatctataattttttaaaaaaaaaaatttaggctcatacaattacttatatacagaatatgaaatttcagtatctaaaaaatatatttcatgaaaataatatttcccaataagtgtgggagaaaactaaattatgaaaaatgtggagttggaatatgcttgcttgaaattttttaattctaaactgatcttaacttcaactgtgctcttgaatttcttttctttttaaatataagttcttgattacatggtgtagaaaatggaacttgtttaaagtgtaatgctttggtaaggtgacttttttgataggtgctttagtatggtgaacctgaggcctaagtacgtgggcttggttcggatgtgtgtctaggtatttgatcctttatatctcaaattttaggatatagagactcagttgaaaaagatcttgaatggacttgaatattatattataaaaaaatcaatgagaaatcaacaagtaaaaaataacttacccttgattaaaaaaaaagaatcgtttcttctcttttatccatatttgtttttagaaaaaaagatcaaaataactatattgacaggcaaaataggagtgtccaacaaggatcctacacccattctttgtcatgttgtgttgacaaggttccattggacaaagttgaaaagttagagtatcacaacactgagcactgttaagtacatattttgcatttttatctatactattaacaaggtcaacatcccattcattctttcttccatcttttaccgaactcaaatacctaataggtcctactattaatcacacaagtgataaaacataaagataatgaagtaaaatcacttaaagagataagtcactgtcataaaatatgaaacaatttttctccctctgtcacttttgccaactttccaagtactcacatgctctccctctctcatatattttaagatatcatatgatgtgaatgctcagaatctatctaatatatattgggaattgggatattatatggtttagtgcatgcatggacattccatgctcaccacatctagttcttagcttaagtaggaatcttttgaatcttttgtttatgttatgtcatttagttatcacttttacatgtacattttcagaagatcattattgtaaactttttttttttttttaatcagaaacaaacacattttcattgaaaatgaaggtatggagaaaggatgagaaatccttccctacaatttttcagtggctacaaaaattgagagattgcaaagagattttttatggtcaggggttggggaagatcatcttattagttgggatgtagtgtgtaatccgaaggcaaaagggggattgggatttgggaagatttctataaggaatctcgctctcttagggaaatggttgtggaggtaccctagggagggttcagctttgtggcatcaggttattttaagcatttatggatcacactccaatggttgggatgccaacattatagtcaaatggtcacatcattgtccttggaaggctattgcacaagtcttttaggagtttttcaagtttactcggtttgtggtaggagatggggaaagaattcggttatgggaagacttttggtggggggaccaacctttgggatcccaatatccgagactatttacagtagtcacggataaaaatattcctatttcttcaactcttggttctactcgtcccttctcttggaactttaatttccgccgtaacctttctgattctgagatagaagatttagaaggcctcatgcggtcacttgattgtttgcctttatcaccttcggtttcaaattcgagatcctggtctttatcttcttcagggctttttacagtcaaatctttctttcttgccttatctcaattttctggttttcctccagttttccctactaagttcgtttggaattcttaagtccctttcaaaatcaagtcctttgtttggttagtgacacacaagaaggtaaatactaatgacttgctacaattgagaagaccctacaaagctattagtcctgatatttgtaagctatgcatgaagcacggagaatcaacagatcattttttcttacattgctttttgacgatgaggttgtggcgtatattattttagttagccaagacggattaggttcccccgaggagcatttccgacatgctgtccatcatttccgacatgtgtgttgggattttttggaccatgtgatggagaaaaaggggttcaatcctagatggaggaaatggataagaggttgtctgtcctcggtgtcttttgcaattctagtgaatggaaacgctaaagggtgggttaagacatctagaggtttaagacaaggagaccctttatctccctttttgttcaccatagtagcaaatgtattgagcaggatgttattgagagcagaggaaagaaatgctttagagggtttcagggtgggtaggaatagaacaagggtgtcccatttacaatttgcagatgacaccattttcttctctagtactcgagaagaggacttgctaactttcaagagcgttttgctagtgtttgggcatatttctgtgctgaaggttaaccttgacaaaagtaatatttatggcattaacctcggtcaggatcatcttcataggttggccgagttgcttgattgcaaggcttctgggtggcccatactctacctgggtcttcctctgggtgggaatcccaagtctggtagcttttgggatcctgtgattgagaggatctcgagcagattagatgggtggcaaaaggcgtatttatcttttggaggtaggataactctcattcaattttatctcacttatatgccttgttacttcctttccttgtttaagattcccgcctccgtggtagtaagaattgagaggttgtaaagagattttttatggtctggggttggggaaggcaaaagagatcatctagttagttgggatgtagtgtgtaatccgaagacgaaagggggtttgggtctcggaaggatttccttacggaattccgctctcttagggaaatggttgtggaagtatcccagggagggttcagcgttgtggcatcaggtcattttaagcatttatggatcacactctaatggttgggacgccaacattattgttagatggtcacatcgttgtccttggaaagctattgcacaagttttccaagatttttccaagtttactcggttcatggtaggagatgaggaaagaattcggttctgggaagacttgtggtggggggatcaacctctaggggtccgttatccaagactacttagagtagtcatggatataaacattcctatttcttcaattctcggatccactcgccccttctcttggaactttaacttccgtcgtaacctttccgattccgagatagaagatttataaagtctcatgcagtctcttgatcatatacatttatcatcttcggttccagataagagatcttggtttttatcttcttcaggacttttcacagtcaaatctttctttcttgccttatcccaaatttctggtttgcctttagttttccctaccaagttagtctggaattctcaagtccctttcaaaatcaagtcctttgtctggttagtggctcacaagaaggtaaatactaacgacatgctacagttgagaagaccctacaaagcacttagtcccgacatttgcatgttgtgcatgaagcagggagaaacagtagatcatctttttcttcattgccctctgacgatggggttatggtacagattatttcagttaacaaagatagattgggtccctcctaggagcatctttgacatgctatctaccaattttaatggttttggatcttctaagagagggattgtattatggcaagctgcgtgcattgctttattatgggtggtgtggcgggaaagaaatgcaaggattttttaggataaaacaaggaattcagagaacctttgggacatgattcatttccttgcttctctttgggctttttgttctaaggtttttaaggggattccccttaatgtgatacaccttgattggttagcggcgtgcaactccattgggttggcctaacttatagcagttgtctgtatctactttgtattttctcgcatttgtttcattgtagttttgtttttctttggtgggaggattcctcatccttctcttgtactttcctttttatcaatatatgcctttgtcgtttcctatcaaaaaaatagttttgtggcaagctgagtgcattgctttaatttgggttgtgtggcgggaaagaaatgcaagaattttttaggataaagtaaggaattcggagaatctttgggattctattcatttccttgcttctctttgggctttttgttccaaggtttttaaggggactcccctaaatgtgttacaacttgattggctagcagtgtgtaattccaatgggttggtctaatctagagagtttgtatgtttttacttagtattatctagtatttgtattattgtagtttagtttttccttggtgggaggatttctcatccttctcttgttcttcttttttctatcaatatatccctctgttgtttcctatcaaaaaaatgaatagaagtagactagatctcacatcatttcgtagaactacacttgtcctcaaagatccttgcatttctttccctccaaactattcaaatcaatgaaagacaagcaatttgccatagcactttgcttttggaagtgattctcaaacccctaaaagaaattgtcaacatgtgactaacatttttagtaggaacctgagctaaactagctagtttaagtagtttgcgccataactccaaggtcattgggcaatgtaaaaaaagataatctatttattctccactacccatacatagagcgcaaaacattcgggctaaatgctttgaaaggccttctcacctaaagcaagttgttggtgttaacctttttgttggtcactaaccaagtaaacgtcttgacctttgatggatcttttgatttccaaatgaaaagtgcaagggggaagaggacttgagaagattaattagataaagttaagaagaaatatttattgtaaactttaagattaggtgacaaggaagttggcgctactttccttgattagagaaattaatgaaggttttttcccctataatatcaaaaacaaaatatttatttagtacaagcaaaagatgttttaagtacaagcaaagaatgataaatccttctaaaatacaaaagatgattcaaaagaggaaaaacctaacaagagtaacaagatagctatgctgatgaattatggaacaataacatggacaaaatatgtaacaatgtacttaatatttcaatataattaaatcgttgtttctaataaaaaaaaggaaaaaaaaaaagaacagaaaaaaattaacaatgtacaactcgagggggtaaaaaatcccttacaaaagaaaacatctgtttggctccacatttggctaatcaattttctagctcattagcaaaatgtggggaccaagggaaggaacaatccaagctgctagctagacttaggtctagttgagccatagttcatttttccaaggactttttgacttagatactgatgagatcactatagaaaaatgtcccttcaacaacaaagtggaaagatccaaagccttggccagcgataagccctttctctcccttacccactctttcactcttcagtgttttcctttttggttgttctatgctgtatgttcaatcattacttggttggctgcaggaaacagaggcaggagaaagcagcactag

SEQ ID NO: 11981 - DNA, 7788 bp, Vitis vinifera
  Intron number 1 from transcript GSVIVT01018087001 (locus G SVIVG01018087001) derived from phytozome v7.0 (chr-ID chr5 ; pos 6361142 to 6368929 reverse strand)
aagaagctcatccaggtattctctttcctcagtcggttctatgaaactggtgtgttctggttattgaatccgtgtttccatgacacctggggattttttgaagtaaaagagaagaaaatgcttaagaaaagggaccattctgaagcattttctttttctttcatccgaatggtctttagtttgtggagaatattctcgatagggatgaactagtttttctttagaagattgaatcgagatttattacgtttttgtggtttggaaaatccttattaattggttgatagagtaattttggggatccatcattgatatcagacattttttgaatgaactattctgattcttacacgtctacaaagtaaccctaacctgaaacccgtgtttaggtctaacatgttcagactatacacttcttggatacctgtccaatgttcctcagaagtctccttacttatacagggatcgaatatctcttttttactagcttatacgaatttatgaatgaagcaatggtaagttagtataatttcttaggaatctgatcaaatagaatctgcctatccacctgctaaaaggattctcgaggctctcagagaattaatggcaaacagtaaggatagggagaataaggagataaagagcagaagtaagacagggtagctccaaaatattggggttgtgacaatgttgctctaggtaaagcatgactatgaaaacaggctcagcatgtgtttcccccaaacacttggattttgcctctggtttcacaggcttttgaagtatggctaggtactagaccagtgatagccccaaacactaggattttgcctctggtttcacgggcttttgagatacaagaagggactaggcttgtctataatattttgagctacttttaaggtttatggcacattttacagtctagttttcatctagattaactttcttaaaaaaaaaaaattaaaaatgagatttggttgaatatggaactgttacaaagtctagtatcttacaaacaaggtcttcaacttttggtcttctatgatcgcccaaattcttgacttatttttcctttaagtttcacttaatgattttgcaatctgccacacttaggaaatttgatcaagtactcaaaatttgttttgttatcatcaaaatgtagttttaggaagtctggaattaatgcaaaagggatgaagatatcggaccatattataaatttttatttaattttcattcgtgcttctcttttttatcaagtcacttccccacacaataagggggctttgaaatctaaattttctatttgtaacatgtgtctccctttagttttccaaattattggccccatatatgtgaatccttcttagaagttttaaatatattttaagaaactcattcatgcattgtccttattagttattgttgtgtttttttagggtctttcttctggttaagaattagaaccatgttgtgtatactcctattttcaaggtagagtctccaattgagttgattgttctgcatgtggcaatgcaaaatatggaggaacacggatcttaagaaattgttagtaatacaggtggaggatttatggcacattttttatcccttgattggatttgaaattcaatacaacaccctaaatggttgtttactagtgatcttatgtttctcttttgtactttcccaatgagatgtcttgcaacaataaatggctgcttagggcctgtttaggaatgttttcaaaaatttcttaaatataattttaaattgttttcaggaataattttgtttttttttttagaacttaaatgtgaaacagttttcttggcttgttctccatgaatgcactagaaagagtttttaagaaaagaaatgaaatcgtcaatccaatcaaagagaaaaaaaaaaagaaaggaagaaatcatcaaaatgtttcctagttcctgtcacttttgtgttgtaagaaaacatatacgcttgcaggcttggttaaaatgtgtgaaaatcaatgatacatatcaaggcagcttatttaaatcagtgatcaggttcatatttattacgtcttaggttttattaggtaagtagagacttatgttttaattattcttgttggtattatcctttattcgtaaaatctagaattcatatctgtatgtatatcatcttttgaaatacgttcatattgtttggtggaagtttgatgtatatttctgaatttactttgattagctttcttaagagggaatttgattaatgtgcttctaaaggattgtggactatgttgcatgggttggggtatgagtgtcaagtgtaggtatttgtctaattgttcaatccttcataactcaaattttaggctgtgaagacttggctaaaaaggatccaaaaaaggggcatgggcactaggatgacataaaaaaaaaaaaaaaaaacaattaaaaataagttgacaatgaaaatatcctctttaaaagctcccaccttttccctctaatcctgcttttttccgctttatccctgaatttcttactaaaattcactttttaactaactcttcttcttctctaatgtaattattaccaagaaagttgaaagaataaaaggatatcaatgaagaaatcaaacagccacaccgaaaataaataagagtatcctataaggatcccatacctgcacccatcccatgtcatgtcaactcaagtccgttgggtgaaattaaaggatccaggtttcatagattgtgaaaatgatggtttgagttagacaagtcataaataatggatacataaccatatgtcttcaattaactatagaattaataaaggacaagtatcatcattggaagttaagatgagaaaatgatgggtgcatggatgagttgaactacaagttatttgaatgatgtgttgtgatgatattgagatatgtttttgttcactactaagaggaacaatccttgggtgagagccctaacagaaaggagggccttgtattcctatgtggaagatcctagagtacctcaagaagattctatagggatatagtagggggtatttacatatgtctcgggtgagagtcccaaaatgtacactaatggtttatagtttactgaatggatgaatcatagtatataatgaggttgattaataagtgagaactatgcaaaatccctatgtccttttattggacatgtatgtgaggagttgagcccactattttgcataaagttgaagaattgtctcattttaaactatgatggtattatactttccatgagattgtaacttacagaagttgcaatgccttaagattttactgctgcgagaattcctatttgcaggagggtatatttcaccatcaatttgcacagggttggttagagatatttctaggttctaagaaaaacataaaagcatgttattgtttgctattattcaaacaaaacagttcttaagtagattcaccaagggaggaattctatgctattttgtaagctactcagtaccaggtagccatataggagaacacaaggatgttgttaaaatctattttgaggtgcctcacctcctttttacttgtttttctagtttacattttttatctgtaaagccatttggattgagtcttagaatgatatctgaggtaaagcaatgatgatgatatcctagcttgatgaacttccaaaaaatatgaatcagatgaacttgagggtgtttatttatgaagtaatcataacacaagttgttgctataagcttccattttatctattgaaaggtttaattgattgtctaattttgatgttgaattttctatagatatgatattttgatttatcctcaccatactattggtacttgaactatgtgacaacctccttaatatattactcattttctcccaagtcttattagatctttagatttaacttagtttagtatttcatgggaccactcccgggactttctatttttcatggggctggccaaacagatttacaggctgaaccgacatgatttctaaatatagtcttacccaaatggattgtaagctaacttaggaataagtgatatgactttaaagaacatggctctaataccattccagattgggaaatagcaaagatactagaaatagtaaatgtaaatagtaaaaataattggcacggtatttaaaaagtaatagtaaatagtaaacaatgatttaaaaataaccaatgttttttaataaacttgaaaattacttgcataagatcttgattttagttccttaggtgagagagaaattttgaacaatctgaaagaattaggaagggatacatcaattatagaatacaattgtggaatacatgaagaacataaggagaatgttacaagagattgaaagttttggttaaagtttatgcctcttcaagtttgtggaatttagaaggattgaagtccttaaaagctcgaattgttgagtagaatctcacaatcatgaagaatcttgaattattgttgttcttggtttatgaggataaaggaatcacttagaaagttctaaactgtttttcaagtcttgaattattaccacctcttgtcagtttgataacaatactgtacttgtaacttttgttgtccagatgaatattggattattcatattcttgactattgaggatagggtgtgagctagaaagtactaaacaatctttcaagtcttgaattatcattgtctttggtcaatctcagtcattaacagggacttgaatttggagcttagaggataccataacaattatcttcattttctggattaaatccagttgctaagttatccttggagtcttctaaatcactacctagttgagaaagagtagccttaagattttttttgtaggatttaaaggtgttgttggaggggtttttagaaaagacctttcacttttggattgtaaacagaaccattcttgaactccattaatacaaacatgagatatagagttgtaattttatcaccacttaatcttgaattctttacctaaatgtggagggaatggaaaatcctaacatacaatccatgggacctatgttgcatgggtttgggtttcagtatcaaatgcaggtatgcgtttgagtgtccaatcctttacaactcaatttttcagatacagaacttagttgaaaaagatcccaaaaaacaggcacgatattaggtaggacataatgaaagaagaatctattaaaaaaaaattggaagtgaatatatcctttttaaaagcttccatcttttccctttatttcctttttttttgttgcttcttattcctaaatatttctacaaaaattcactttttagctaactcttttttctctaatgtaattattactaagaaagttgaaagaaataaaagaggagtgtttgacaaggatcccatatccacaccatgtcatgttgttcgtgtgacacatgtatgttgggtgaaattgaaggattcgagtatcatggcatgagaccataaaatgggctatagaaaacatcaatattaaatgttggggaggagctttaatttgagattgaaagtaggagaatctctctttaacttgataagggaaaatatcttgagtggtttccttaataaagtcaccattcttgaaactgattgggaaatatgatttttgtaaattagaaaagaaatggaaaaacaaaaaatgatcaaaatttttgtaataaaaattattgtactatactaagtattattacaaaatttttgtaataaatatcaaacactttcctcctcccgaatccattccataaccagaccaacaataccttcaccctactgcaatcatcttcaacagtttaccctgaaaatttctttggtaaccgtgggaacctcatccattaacatgaatacatttctttttgtacgagtccttgtttttttgactttgaagataaacatcttgaaaaggagattagacaactgtttgatattttgttgttgattgaattaatatttgttggttgttggaaaagtcttgaatttgcattgcatgtgagtttgaatttcatggccaaatacgatagcaatcattctcattctcaggggtaaatccagaggttaagtcatttgcagagttatataaattacttcccatttgataaaaggtttttttgaggatattccttgagattagtactcctggaaaattttaaggtttctaggagatacttaatgtgctttctcatttttgactgttgtatgaaccaattttgaacttcattgctacaaatgcgatcgattgaatcatagttttgccaccatttaattttgaatttcttatccaaatgagaggaaatggaaatggaaatggaaccatcttagtcagagtgtagttctaacacactatcaatagattgtgagttgggttataaagagcattaatcttggaggaaccttgatatgactaaaagaaggaaataataataattataatatactatcaatagactatgaactaggccaaaaagagtgttaattttggaggaaccttgagatgacagaaaggaggagggaataataataatacactatcaatagactggataataataataataatacactctcaataggctgggccataaaaagctctgatcttgaataatacactctgaactgggccataaagatatagaaaaaggtagtatgcatgttctgttgataaaccccattaatgcaaagctttctccaaggagcacattataatgttctagcagattaagttccaacttccactaatattttatcctatcatgatgtgattataataataataataataataataataataatgttctagcagattaagttccaacttccagtaatattttatcaattagatgaacttgtgtgtatgatatcctagctgattaagttccaacttccaaggaatgtgaatcaggtgaacttgagggagtttatttctacatagttgaggttgcactcctagcagattaagtcccaacttccagtaatattttatcctatcatgatgtgattaagttccagggaatatgaattagatgaacttgagtgtatgatatcctagctgattaagttccaacttccaaggaatgtgaatcaggtgaacttgagggagtttatttctatatagttgaggttgcactcttgatgatatcctaacgtgatcaagttctaaggaatatgaatcagatgagcttgaggggtgtttatttcacagctcaggttaataacaataacaatgatagtaataataataataataattcatttccttatgataatgataataatatttaattcatttccttatacaccctttgagctttggggtcatgggatagatctttgttctaggtcaagcaatgattttgaatttcaaggtgtgacagggttgggggattggtgcagaaatggagactgcaaaagatccaaaaatgttcttggaaaagtttgggttctcgaatgctctcacttcggagctttgtatgcattcttcaactgtgttacaacattggtatttgagttctaatttggggatagatttggactatcatggtattgattcctgaatgacaggctaacccttaaaccacggatgctaattttattctttttaatcttatgttctttttatggagacatttgcttgaaaatcatgctactcttcattgttttcaccttttctgtttttctttttggtgtgtagcgaccatatatagtgaatcccccagagggaccaag

SEQ ID NO: 11982 - DNA, 8801 bp, Vitis vinifera
  Intron number 2 from transcript GSVIVT01006742001 (locus G SVIVG01006742001) derived from phytozome v7.0 (chr-ID chrU n; pos 27951794 to 27960594)
gcagaagggaaaccattgaggaccttctgagctatgtaagtataatgaactcctcttttgcatggatgttgatgttgaataatgcttgaggaattggtgacattacaaaaccttgtctttaatattgaacatattgatatattcttgtaggcttgggaaaattggaaagaagggacagctaccaatatagtagatcccacattaagggatagctcaacaagcgagataatgaaatatatccacattgggctcctatgcgttcaaggaaatgaagctgacagaccagccatggcttccattgttctcatgcttaatggccactctctgagtctccctgtaccttcacatcctgcattttttgtccataacagcagccagttggacatgcctttaggaaacaagttggatcaattctcagtagatgaggctacaattaccgatctacatcctcgataatttgtaaacaaagattataatcaaaagaatgtttttgttacaatttatatgataatagaagttatatcatatgtttttcttttctttctttcttaacatgtttgaatgcttacatataaaagagacaggccatgtgatattcagtacttgaaaatgatacatctaattcagtaaaatcatttaaggggatgtctaataaacatcaaatgtttgaaaatttgatttattttttaaactccctcttactatttctctgtagatgagatctcatatgatcatgaaacctaatatcattccaaataactttatatacgttgcttcgattgagccccattatcttcaaattcgtttttcctttctgcaaagaaagattttaaggcatggcccggttacagcctgcttctgggattttaaagtcaaagtgaaaggctcattaaacatgtattgagaagtgcaccaacaccaggaattgcgatattggaaaataatctcaatgtagacgactttcatcttcctccagtgcatgtgcatattcaattgccatagaaatttgtgaagaacagcatcttatgaaggccacgagcgacagcttcagtcttttctgggaattgacacattcttcttttgtgaaatttcaaagagaatttaatttgtggggttacaagttggaacactggtagtaaagggactggtccttgattttgttcgtcttcaattggttcctttcttcccttctctaagcagttctacctgttgtatgtgatcaatcacatcctcatttgtgccttggaatgatttagcagagagtggtggatacaatcccttcaccattacccttacaattttcttttcgtcaattaagtggatgaataccttcatggctttgatttccatgtcgagaagctagtgtagcagcaggaatgtttgacacccaagacaacagagccttcctactgctgttaatctcaatatttttgcttacgatcagcaaccacactgttaaatttgcaattagattttgatgttgttacctacccggaggagggaacaggtgtagaaatttcattaaatgatttggaaggtacaactgaaactttctgcatggagggagatatgcatgcagaggcgatgttaacactactgcctgccagagctgtgtgaaaacaacagtccaagtaatccaggaggagtgccagtataataaaacagctaccatatggtatgatgaatgcatgttacgttactcaaatgaggacttccttggaactatggagactactcgaggcttcttaatgtggaatgtgaacaacagaaccgatcccgatgaaggggatgttggcgctctatctttgatgaatgagctgctgtcagaagctccatattcggagtccatgtttgtggtaaaagagggaccgtccgttgataacgagtctctgatattatatgggctagcgcagtgtagtagagataccagcgatgttagatgcaataggtgtttggggaagctgtttttggagacccaagagtgttgccaagagaaggtaggatggtgtgttctgggtccaaattgcaatataaggtatgaacggtaccccttctatgttgaagtctctgctgatccacccgctcctgcgcctgcacagcggccgcctccgcctcctgcagaaccatttcctcctgataacgcaggtgagttaaatgtttgttttgggtggccaaaaagtattaacagaaatctcttaatcaaatataattaaattaattacttatgcattttttagttttataaggaaaaatattttgagaagcatgtaaacaaatttactaattagaaaattatttttatttttcttggttaatttcctctcgtttttccacggttttacgaggtgtaggatctagatagagcctaaaatatatcttgcaagggacaaacttagacatcattcccataaaggacccattaaccattagactagtcaagtggttggctggtcttgaccctagctaaaatagatatttatgaaggccagaggtggttagtgggaatctgggattggaataaatggtgaatggctaacacgtgggtttgagttgatccaactgaggtattgggagccgaccctgactagtagcaagatctggagtttgagctttgacggaactcatccgaacttgggaggtgcttgtcatgttgacgacaatgtaggtcccgggaagactcgagaagtaaggccttacatttggtgtatttggatttcatgttcacaccaggaagtatataaatataaggtagtgttgacttgggattttgtattagctttaagaagtaagttccagattttgttaacttggatttgatataggctcccaggaagtgtggccaaggttagctaaggatttggtgtgactcaaaccatataaagagaattagtttaacttcattgacaggcaattgattttctaatcatatgattaatgtcactaggttattaattcaaatctcaagaggtcatgttggaggagcagacgaggttcccatggttgagcttgcctgttaagcgcacactgttgaatatatctattaaattttgatgtcaccactgattcaggggagcagacaattgaagaaattctgttaaatgttttgggtcgtccaactggcgtacactttatgaaagggcatatgcatgatcaagacaacactggagaaacttactacttcaatttaactgccatcctggccgccacaaacaatttttctgattccaataagcttggagaaggaggttttggccctgtctacaaggttaaagaaaaatacataattcacattgaagaaaaatgatgatggaagtggggttcacttggcagcttaatatgacatttgatttttaatatagaaaaaaacttaattgccttgaaaagggtacctgagagagttacccaggcatatgcataatgaattggctatgaaccttgctattatgtgacaaatagtaatgcttggctcttgagatatgatataatttctttggttgtgaaagtttgaaatgctgttaggggaagctgcttggtggaagggaaatagttgttaaaaggctttcgaggaaatcaggacaaggtcttgaggagttcaagaatgaagttatgttaattgttaaacttcaacacaaaaatcttgcgaggctgttgggttgctgcatggagggagacgagaagctcttggtttacaagttcaaccggtcaaccggttgtgctcgtccgatcgatgaccggttgagggaggccaaaaagtttctctctctcccaatggccttctcttctcggtcaaggttgaacctcaatcggttgaggtccggtcgaggtccggttaaggtccggttgaggcccaacggtcacttttcctaacggctagtcaaccggtcgacccctagctcgatcggtcgaacccccaacagctagtatgacttttttcttctataaaaaggctccaaacttcattgtttcataagctaaaccttcccaaatctttcttgattatatttgagccttgaaagagtatttttgagtgcaccattattccaaaacttgcatatctttagtgcatcattcaattctagtttttcttgtatctttgaacctaaagttctattactgggattttgagagatcattatttgtatatctttgtgaggaattttctcaagtgaggggtatcacttgagaggttgttcaagagagggatatcttttgaagaagtgtaaagggtgcttggagtcaaaagtccaagatgatgaattggaaccataatccaattgtaaagagattggaagcttggttgaagcttcaagataatggaaccctcactcggttaggaggttgaggaaagtgaacgtaggcaaggaagtgtcgaaccactataaactctcgtgtttgcactctctcttccctaactcttttaaattatatgcaattgtgtttattttgtttattatatattttcatataattgtctcttatttttgcatagtttaaatttgtgaaaaagagaccatcaccctatttaccccccccccccccttagggtgattaccatagtttggattagcctcaaattcctaacaattttctttcaccgcttcccaaacatcaagtgcttgtagatgaactaccattctaacagcctaagtttcataattgtctccatcaagaattgatggtgcagatgtgagacttgactttccattgctagatgattttagaaagtgtttgggttcactcacctcacgggtctttaggtgtttaggcactctgaaaggtattcaggcttactcactcaactcattggcccctcaagataactatggttgtgataccacaatgttggtctaagattaaacacttatgcaaaatatatatttttgggctgctggaacacattttattgatgaagagtgctgaatttatacatgagcttgtaactaaaataacattagaatagcagaaaatcaagctactagatgatgaacaactacttcctataaaatagaaaccaaatcttgaccaaataaaaacaagaaaatatttggatgttgcagattttgtgcaagactgcagctgcaatatttaacttcaaaattcaaattccagtagatactaagtcaaaattcaacaatagcataccacttaacagtgcaaattgtttttttccttgttttttcgggttatgtgggacaagagcataattcaagggttatggacgttatcatatgtctttttctgtaaataaggctttaattaatgcccatagataagaattgtggatgcacgttattatgactgaaagttatgcttgtaggacaatttgtggactatctcaaagtttttaaacgtcaagatatgtgcaacaattcaattaaaaaatcaattggtgggtcatatgttaggacaaacgcgtttttaataaaacaagattgaagacttcagggagagttctgaaaacaacatattttttcttaatgggcaacataaaagaaggatagagacttgtgcctagaaaagtatgacgttagaaatgctctacctgagtctttcttttccaacccccaatacaattcagttattggccttgtcaattcttgcagtcttgattctgaaaaatatataaacaccggaaatctatcagtttccatatttgaaaattccaagcttctattagcatgctcccaccaaagagaaaagtcaatttgtggcagctaggtaaaaacaagtcatcctcaaggtttttcttgtcaagcctgctatagaacttgaggcccccaaacttgaaaaatgcctttttctctatttgcttctttgatttattcaaggtcgtatttatgctatgtacttctgctttgtttagcaaccatttcaatcagtcagtgagctataagactattatctttcatgtatgtcctctagattttcattcacctaaggatagcagtaggaatgtttgatatccaagacaccagagtctttccattgctgatcttaatctcaatcttcagccttatcagcttcatcaatgcccaaccaaactatgattaccacctctgtcaaggccaagacggtgacacggcaaacagcaattttgaaaccaatctttcttccctgttagattctctgtcttctaaggcttccctctacaacttctacaatgactccttcaaccaaatctacagcctctaccaatgcagaggcgatgtcaacactaccacttgccacacttgtgtgaaagctgcagctcaacaaattcaagagcgatgccagtttaataaaacagcaatcatatggttcgattattgcatgttacgttactctaatgaagacttctttggaattccagagacatatacagggtacttgctgtggaataataagaacagtactgaatcctctccaatacttgatgttggggctcttgctttgatctatgagctagtggaaaaggctcccaattcagaaaggatgtttgccatggatgagggagtgcctttggataattcttcttggaacatatatggactggttcagtgtacaagagatataaataatgtttcctgcaaagattgtttggtgaagctgctgaagaacattgaacagtgttgccgagagaggttagggtggcgtattatgagctcaagttgccatttgagatacgaacaaaccctattctaccagcaatctccagctaatcaacccatgcccacttcaggtaagttgatgttatattcattgagaaatttatcacactttgaagtcctcatgctacaccccaaatagcacaaccccgaggcccatccatatgaagtatgttctctgttttgttttatttataaaaagcgcagatctagtcttgggagataatgaaattttggtaatcattttgctatggtagtttatctataagaattaagagttcttctttattattcacttgtatggggagtgatcgatattctggggccagtcacaatgatctccctccaaacggggtaacaacataccattgttttggccatgctcctgtcttctttaattgatactttgtttaagaatcaaaatcaaacttataactgtatcacttgattgcaggaaaaagacgaaagggcacaagaaagattgtaattagtaccgtttcagcatttatagtagtagtaattcttttggcttgctacatttactattcagttttcagaaggaaaagcagaggaggtacatatatatatatatatattataatgcctgtaattcaacaaccacataggttaacttgtgccattaaatttaaccttattacctactcaggggagaaaacaagggaagatatgttattgaaagatttgaaacgtccaactggcaaaacaaaattcagggagggaggtatgcaagcaagcggcgataaggacagtggagaaatgtattacttcgatttaaccactatactgtcagctacaaacaatttctctgatgctaataagcttggtcaaggaggttttggccctgtttacaaggtttagaaatacaaactcttccactaaatttatactagtaaaaataatgtcatgaaagttgaattcactgtctttatgtcttgcttttgtgagatatagcagttgtcatggccattagtgtatgatttgttgatatatgataggatattctggttgagaaagtttgaatgactgcagggcactctgcttaatggaaaagaaatagcagttaaaaggctttcagcgaaatcagggcaagggattgaagagttcaggaatgaagttttgctgcttgttaaacttcaacataaaaatcttgtgaggcttctgggttgctgcataaagggagatgaaaagcttctagtctacgagtacatggccaacactagtctggatgcctttttgtttggtctgttccctctcctctcaattgaagggtcatacgattctcttgacttgaatggcatcactgtcctataattcatgtcttctcacctcatgaaaaaccttcacaagaagggcataacaccaatgtcatggactcatacgaatccttgaatcttggatgatttatggttcatttttttacttgtgctcctgcctgatcttcttaataacatgctttttcttctgtaaatctcaattgaaattttttatgttgctttcacaaggacagatccaacaaaaaaatgcaactagactgggctaagcgggcagccattattggtggcatagcaagggggcttctatatctgcatgaggattctcggctcaaaatcatccatagggatttgaaagcaagcaatgttttgttggatgatgagatgaaccccaagatctccgactttggcactgccaggatttttggaagcaaccaaattgaagctagcaccaacagaattgttggtacattgtaagtcatctcctcatcttttcattctgcctcaactgctaaacaataaagattacaactataaagaaatttccattgttactgaaatttcatatcattgtcattgactatcatatgcagtggctatatggctccagagtatgcaatgcacggccacttctcagtcaagacagatgtttatggctttggtgtgttggttttggaaattgtgactggtcagaggaataaccgtttccggagcggggaaaacattgaggaccttcttagctatgtaagtaaaggtgaataatgcttgagagatcagaaacacaacaaaattttgtctgtaatactaaacatattgttatattcttgtaggcttggaaaaattggaaagaagggatagctaccaa

SEQ ID NO: 11983 - DNA, 3264 bp, Vitis vinifera
  Intron number 2 from transcript GSVIVT01036934001 (locus G SVIVG01036934001) derived from phytozome v7.0 (chr-ID chr2 ; pos 17403714 to 17406977 reverse strand)
gcaagctgagggagcaagtagccaggcagcaacaggtattctgagttttttgttgtttttgttgtttggatggtgagaagaagaatggaaacggaaaggaaaaaaaaatgttaacttcaatgttgaaagtaatagctctgttcgatggtcggcaaccaagttgaattgtggcgaataaggtgtgggctctattgtgggacggctgatgttgtggtgttttggtttggctgctgagaaagagagaagaatgaaacgaaaaggaacttgataattttgatctttaagacttgttgctctgcctggatggactttgttcatttcatgtcaccatttttttttatgctcccatgggacgagaagaaaattgattagctcttccttaaaattatgatttttttttgttttaatgcaccgtttgactgccgagaacagagaagaaaggagaagaaaattgataatccctcactttaaaaattagtgttttttttctctcttatatactccgtttgactgctgagaaaataaaggagacaagagaattgatgtttccaatcttaaacctaaaatattaactcgattggacgttgttcttgtactccatttttttttttggctgttaaggaaaaggaaggaaatgagaggaaaatttgataatctcaatctttaagctaatagatgctcgattgggtgttcttcttctcatggtaccatttgtttttctcccccttcttttttttctttttttttttatgctcctatttggtaatatgaaaggatgagagactagaagaaaattgataatttatcctcaattttccttctatgctcagtttggctgctgagaaagaaaaagaaataaaagtagaagtgataaattcagtcttaaatgatctctttctttttttcttttatgtactgctttgctattaagaaagaaaagcaagggaaataaaattgataatctcgatcttaaaactaatagctctgatggattgaagctttttgcaattctgacgataatgctatactgtctgatttgaaaccataacatatagttgttttgctttctgttttcagtctctcgtttttatccttttctctttctccttcaggtttctcagctagcaaacagagtctttatagttacattgaataagatttcccaaccccctgaaattgggtattaattgttgtattgtataagaatctttagacagcttggataactttctttgagtatcagtagttattgtttatgactgaagcatatatagcttgtgtaattactagtaaaattgcccatatgatgcatgtgaattaaaaattaaattaaaattttcagaatgattttttccaattggggcttgttctcctcatggtacaattgtgacaacagtgatacaagttctcacgcaaaacaagattgatgttcctttatatgatattatttttagtctctgtttctattcttttcttctcttttcccttctgtcttctctgcaaccgaaacagaaaatttttcaacttcttgtaatcaaggcatgggttctattttgggactttcgatgttatagcattattttactgattttttatttttattttttctaatgctccatttggctgtcaagaaaagaaaagaaaagaaagaaaattgataatttcaatcttataactaatagctttggttaattggcccttatttttcccatggtaccttttttttttttatcttaatttttatgctccatttgactactgagaaaaggaaagaaatgagaatgaactttgtaattttgatcttaaaactacttttgctccctctggctgctgaaaaaagaaaagaaacagaaagaatattgattttttgtttttcagtttgtattttcttttcatttctctctttccttctattttcttggctacctaacaaaatcttatagcaaataagatgtgggttttcagactattgatgttatagcactttttaaaaaaatatatatatatgaattttggatattaattgttaaattttataatagtatggtgatggtgattttatatgacaaatcatttttggcaacctctatatgaaatgtatctagtttctataagtactagtaaaattgcatgggatacatgtggtttaaaaactatattagaatcataagtatttaaagcagttcaatattttatgtgctatgaaactcaatttttaaacaggaaaaaactgatgagaattcgttagaattttatggtgagaaaatatagggggaacagatgaagaatatgtagaggcagaagatggatgaaaaaattgcaaaaatgaaatgatgagatgcttatgttttaatgtctttaattgttaaaaacaatttttaagctggtacaagaaaatcatgagatattttatattaatttcatttaatggttttatttgttgaatcaatttgattgataaaattttgtgatgtgaagatgtagaggaagggaagaaaatgaatgaaactacctaaaaaaggaaaagaaaagttcagaagtggagtaagaagatgtggagaggagtggaaaaatttaaataattttaatgagatattttatatttttcttgtttgagtcaaaatttttagatgctgaacaaagaactccactcgattgaaccttattcttctcatgctatataatgttaactaagaatatattttctcattcaaaactactagaaataatgtcacatgcaatgcatatatgtaataattaatgcaatattctatttatatccatatttaaatttaaaaaaaggcctatcaaatgtattttgtttttaaataaaactaaaaacccaagaaacaatatatgaccaaggatgaggatatggttttaggtagagctagatgacaaaaaataagtcatcaaactggacatgatgaccatctgcccagcgtgttgatctctggagattggtatcatacattcaaaatccagagattcttgtcattaatttaatatcctttggattatctacagtcatatctgatatttttggtaattactactactgttatgtttgccactagcaattcaatggaaaaagaaaccaaattgcattattctcaaatttattaagtatagaaatgacatttttttcttgtatgcttatttatttatttatttttataatttgtgtcttttgtcatgttgtaatgtttaactgtttgttatttttcaggcagttctgaaacaattgggacattttggtattga

SEQ ID NO: 11984 - DNA, 7093 bp, Vitis vinifera
  Intron number 6 from transcript GSVIVT01010258001 (locus G SVIVG01010258001) derived from phytozome v7.0 (chr-ID chr1 ; pos 18508044 to 18515136)
atattccctcaaactccaaggtcaggcttgcttctttttggtttctgaattcggggatggatctggtatattggacctgggcccttacctgttttggggcttagcatactgtttcccttatttaccttgatgtgtgctgaaggaacctctaatgcgtgtcttttttttttttttagtaataataataataaaaaatcaatccaaagtggtatatctttggtttgacaaccatgcctaccttcatagatgagaagaggattccactacaaaacaatgcctactttcattgatgagataggagtccactataagatgtagaaaattaatgcaaaactttggaagtctcactcctcttatctttgccacattcggagccatgaataaactcatgcttatcatcctctgcaagagccatgagatgaacatatttttttatagtacataggagccatgaaacaaacttgtgctttcaatgttttgtgagttatctttctacagatctctctctctctctctctctctctctctcatctcatgtttatatcatcttggaaggtttcacttgaaaaacttatgtatagagagaatgaaaagaatgagctgtataagaaaactccagcataagttctgctctacaccaatccctagactcagatttctaacaaaatagaaaccctgcagagataggaacttgagataaattccaacattttctgccttggctcaaattgtgaagtcaattttctagtctgtacatacttccaaagtatgcctctttaataccctgatcaatgcagtcagtgccataccttcaactgggaaacttgtcaaacttaggaagaatcacatgcaaatgttttgccacttagacattttaatatttccactgcatgataacatgcacacacctattctaggttaattgactaaatactccatgtatctcattcaatgacaaaggaattgacaccaccttgaatcaaaatttcttttacaatcctcttggattccaaatctctttttaccacttcagtgtccaaacacacaatcaactcaaaattagataattctcgtgttttagcatggaatctccaaaattcccgcttcttgttgactgcactttggatttgaattctctagatcttggttcttgatcttctccaacattcgctttagacttctccaacctagctttcgtcatttgttatgcgccaattgaagctttccacttgttatacaatcatagtcaataatcaatgtatgaaggaaacaatacttccattgcactgtaaaactatgtttaccttcacaaatgagattaagattctactacaaattacttgaaaaatgatgaaagacagagaatactgatacaatactcctaaggcttgctcctagtattttttttttgataggtaaacaaaacaaatatattaaaagcatttggaaaaggtgcacaaagtatacatgaagtatacaagtagcagccgaatacaagcaaaagaaaaggaagaagaaacaacaaaccagagccaaaacatcaaacaaggacaatgacccttcacttaagtacacgctaacccaacttgaaagattggacattctaaaaagctcttcctttaagcaaaccacgtccactcattgcgatcgatcagggacttaaatactcttcttttctctttgtcattggttcctcacattctaggaaagtgttcacagctttattgattaactgaaaccaaccccacgaaccttaaataaatccatatatcttgctcaatctgagccatgaaaagaacctatattttttatgctctacttagtgtttcctttctcttcctcaaatctccatctcatctcatcaagtcattttatgagttttctcttaaagacttaaaatatatatagagatcatgaacctaattccttgttggttaatgaatcctatccctataaagaattctatctttataatgaccaatgttttgaaagatggtattgaggcgtgctctagtgtgaggtgtcttgaaaaagcccaaaggtgttgggaaaaaggcggagaacacaaaagacatttgcctttttgcttgaggtgcttatgaggtgcaccttgcatatgcctttgacgccccactcattgaagtgtgagccttttgtttgctgaggtggctaataaaaaaaaaatttgtagaaaaaccattgttccctaaaaactcactaaagagtgaatagagagattttgagagagaaatctaaccctagcactctctatcgttgacggcttgaagatcgacctcttctacgataatagcctcactaagatggaagtgctgctttgtgctcactttgacaacatcatcttgatggtattattctcactacgaagcctcttcttcatcttgatgggtaggattcgtcttcttcatctcctcttctttcttagtgtcacactttctctcctcacttatttgtcttcttcatctcctcttctctcttagtccctcacttctctctcacctcattgaccccacaactctacttcttttcttgttttatatatatatttttttatttttctcatgacttctctttgttttttcaacagtgagcaatgagcaccactattctttcacctaattttctcacctcacctcaccatggtccacatccacagtttgcattttttttttcattttctattttctatttctattttttaattgttcgttttattttttttttcttaaaaaaatacactaaaacttgattgaaaaaaaaatctattttcttcaattttgagaacattttatttgtattgttttttttgcttttttaaatgaaaaattgtaaaattatataaaattaattaatgtgattttaattgttaattatatcaataggatttcaagtcagttatgtcattatttttcataagtcaattacatatagaaaattgttcattattatttttttttactatgaattcctccaatttagaagattcacgaaaagattttgtatgaaaacatgctattgaatttttggagagaagtatataagatgtaagttttgcaattaaggatgtactggaggggtgaatagactgaaggatcacttagctggaactcatcatcagatgaaaccatgtaacaaggtcagtgaagatgttagattagaatgcaaagagacattgctcaattatagggaacaaaaataaaaaagaaatgcattgctccaagaaattggtatgggtctaactccaatgaatgggagttcctcttctaaacaatgaggacattgggagtgagagtgggggtggggaacccatggataaattcacatttcactacctagatgaagtactttgaattccaagtggaagcaagaataaatgaagtatgtagaaaaattgatcattttatgtacttaaatggtcccctattcaatatagtaagtgatccttattgggggttccaatgattgatgctattgcaaattttaggcttgggtttaagtcttcatctatgtatgaattgaagacatggattcttaaagataaggtgaatgacataaatatcatgatgaaagagcataaaaaaacttagaagcaatatggacgcttaattttgtcagatggttgaacagatgaaaagaatgggcatcttataaatttttggtgaatagttttgttgacacatggtttatttaatcaattgatacatttaatacaataaaaaaaatggagaattgatgttcaaatatcttgatgaagttgttgaagaaattagagaggagcatgctatgtaagttattactgataatatctttaattttgtgaatgctggaatgaggcttatagaaaagaggacaagattgtggtggactccttgtgctgctcattacattgatatgatgttagaggatgttggaaagctaaatgttcatgctaatacacttttatgagttaggcaagtggtgaagttcatatatagacttgcttaggttcttaacttgatgataacatttatgaaaattcatgaactcattcatccaaaaattacatggtttgctaccacatttcttactctccaaaatctttataagtaaaaacaagatctgtaacacttctgaaaaatggtgttcaagtacatgggccaagaacgtagaaggtgtaaaaggttgaagtatagtgttgtttgatccaaatttttggcctcacattgctttttgtataaagactactattctattagttagagccttgaagaggttgatttagaggaaaggctagtcatgggttattatttatgtgttgatggacttagtcaaggagaagattgcatttaattatgggggtattaagtgaaaatatgacccaatttggagaaaaatagatgcaagatggactccgtaacttcattgacctttacatgcaacaagttattatcataatccttaactacgctatgaagataagttctttaatgtggatggggtgaggaagatattatttaaatgcatgaataggatgttggattaccatgaatgtttaaaggttgacattcaattggactcatatgaccaaggtaaaggtgaatttggaaaccgtgttgcaattgattctaaataattaagaagtcttacaaattggtggatgcattttgggggtttaatactaaagttgcaaaagcttgttgtttgagtccttagcctcacttgtagtgattcaggatgtgagagaaattataacatttttgaattggtaatacttctattttttagtacatatattcttattctaatgttaaaaaactttaatttaatcttaacatataaatttgtttcttttattatttatagattcataccaccaagagaaatacgtttgaacataaaagtttaaatgctctagtgtatgtgaggtacaatactagattgagagagcgaagtctacaaaggaaacaaaatgttgatttgatattggtagaagagattgattcagatgagaatgaattgcagataatgaagctttccttttcccacttgatctttgttggcttgaagataatgaactatttaacattactgtcaaacacatatgactaaaatgtttcaacttaaatcctcctctccaatgtcgtgaccatgatcatcatccaatgtatcaataaggagaaagtttccactatgaaatcctctcatttaatctctaactccttatcttcaattgcaaaacttacatcttatatacttttccccaaaaacttcaatagcatatttccaaataaaatctttttatgaagctttcgaattcgacgagctcataataataataataataataataataataaaatttctatatataattgacttaaaaaaaaagtaatacataattgacttgaaatcctatagatataattaacaattaaaatcgaattacataatttttacaatttgtgatttaaaaagcaaaaaagataataatacaaataaaatattttcagaaattaaagaaaacaatttttttccaataaagccttggtgtacttttttaagaaaaaaaatataaattgaacaattaaaaaatagaaataaaaatataaaatagaaaataaaaacaaaaaatgcaaattgtgggcatggattgtggtgaggtgaggtgaggcaagaaaaaaattggtgaaagaatattggtgctcattgctcattgtcaaaaaaactaagacagaagtgaaaaaaaaaaaatataaaacaagaaaagaagtgtagtcatggggttcatgaagcgagaagagaaagtgagagtctgggaaagaagaggagatgaagaagatgaagcctacctgttgagatgaagaaaaggattcggagtgagaacaacaccatcgagatgatgttgtcagattgagaattgagcaacacttctgtcgtagtgaggttgttgttggagatgaggctgaacttcaagccatcgaaggtacagagagctagggttaggtttctctctcaaaatctttctttgttcactcttccacgagtttttggggttaaatggtggtttttcttcaattcttttttattggcctcctcagcaatcaaaaggctcacgcttcagtgagtgtggcgtcaacgacattcatacgggtgcctgataagcgccttaggcccaaaggtgttcaccttttgggttctccgcctttttaccaatgcctttgggcattttcaggatgccatgccccatagagtcatgcctcaatactgcctttcaaaacactacttttgcatagtgagtgccaaaggctgagaaagaaaaaaacacaataaaaagaaaaaaggcctttaaaccctggaccaatgatgaatggttctgagaaacaactctttctgcaactgatcagaatgcccctcggtcccctcttccctcaagactatctatcgtggtctcccaaatgcacccaaaataagaaaagatgggcaaacctccattcctgccttcattgctttttcaccctttaaccatgcctacccagcagaagcactttgaccaagcacagaacacccaaagaactctgaagagagtaaaagatcccaatgcagacaagctttgctacactgaataagaatgtggttcatgaacttgtttctagtttgacataaacatctgtaaaccaaaggccattcttaagtgattcttgaatatgcagaggtattgtaaatgttacatgtaagtccttgatgatgtttactgacttctatctaaattctatccagaattgctgaacctgtctttcgtgtgcacatgaaaacatactttgctttgctttattattttgaaatgtccaaccatgtttcttgaagtttttcgttgtcacctccattccactttcttcaatgttttgtacttttaattcctgaactcctaattggtcatcataggatgggaaatcatgcctcccatagacatcccagaaatatagggttccgttgataatgggaatactaatgttatatctattatactaccatttgttaatttgctaattagtaaatggtgtgcaggattacatacatcgagtgggaagaactgctc

SEQ ID NO: 11985 - DNA, 9424 bp, Vitis vinifera
  Intron number 2 from transcript GSVIVT01018986001 (locus G SVIVG01018986001) derived from phytozome v7.0 (chr-ID chr4 ; pos 18054540 to 18063963)
acatcgatctcgatccgcctcttatccaatcaacggttcgtactccttctatgtctacttcctgaaagatatagtctcaaaaaatgctagaaaggtgaaagattgtgaatgttgcattagggtcttctttctttttctctcaatttttttttgggaacctaacagaggattggagctttgaatttcgaaattgcgctcttttttcatgtttcttccacgttgatgtttgatgtttgatgtttgtgccgtgctgtatatgtatatacgtgattacgtgtatataaagcaagagaatattacaaacaagagggcaaaatatcaagtcaaaggacacgggaaatataaacagatgcctaaaagcgcttccaataaaaaattaaataaagggaccacaaaaaacagcacccttcactgtgaatctaatcgacaacaaactctgcatggaggacccgaacttaaaaacaacgtgaaccaagcccatatattacaaaggaaagagtcttttagtcgttgaatagaatgcttcccattttaaaaaaatctactgtttctttcctcttatagggcctaagataagcttaggggagcaatctaccatatctttttaagttttttttttcccacaaaagaaccatgccatcctaatctctcagaagcacccaaaacatgccaaaagggaaaacaatagatttcattatatctttgttttgacacaatggataagaatgtgctcggtgaactcttcctccaactgacaaaggaaatatttgttttccaaagaccaccctctactctttaaataatccaaagttaaaacctttgcccaagtagcctctgaagcaaaaaagcccaactttggtggcacccaagagttccgaatcacattttccggaaacaacactgagtttcttgactctaaaaccgagcaaagggctttaacagttatcttcccattttttgaccccgtccaaatcactttatcttcctcttccctgcacatacttctcttttgcaaactcaaaagaaagcactctaccatgtccatctcccaatcatttaggagcctagagaaatgaggggcccaacacgcttcccatttattatttgtatcataaatcacaaaatacctattagctgaatttgaactggttcctagtttcttttaactgacatgatgattatgaaatctatagtagaagtatgatgatttggtttaaaaatgaaaaataactaatgagtatattgtccaattgggggagttgaatgggaagtgtttttggcctcacatagtagcatccttatggggaaagagaagctctgtaactggacctcagtgacaacttccaaattataaatttacagcgacctgtcttacattactgtggaagcagccaaaaatcaaaagtgctcatgatattttttgataaacaaatagaatgaatatgaggttacaaatgcctaaaaagaaaagagggtcacacccaaatacgctagaagtacactgaccaaaggcaaatcaaaacagccctaaagaaactacaaaaaactgaacccctcactttcaatgatattgaaatcttctggttttggaattggaatcattaggttaaggggtttctgcctgcaaaagaaatcaaaacttgatttacttatttatgttttaacaagaattctagtaggatcattatttctattttacataatgtgatttgtagctaatttcatcttttcctgaaactgttcttaggtttaggtactatttaccttgattaaaagttataatattattttctttgacattaatttattctgctcatgtcatgttcaatatcctatagatttcctagtccatttgaatgcctttatactagatttcccctgttaattattattgtttgtttcttcttgggctctttctatgtcacttattggaaaatcagaatctttatcctgtttacatgagaattttaataaggtttttgaaagttcttttttttttattttatccgtaaatgaaaatagtattgaaaagttccaaaaaggatgcaccaaagtacacatgatatatacaatgactgccaaaaagcaccaaaaaaggaagagaaaacaaaaaactactctttccctcaaatcgatgccaaccaatcaatgaaattaaccatggacattgatcttttacctataaacggtttggtctaggttaacaagttacacaaaaacaagaatttcagcctttggacaaagagctccacattctcaaaacatcttttatttctctctttccaaaatgtctagaaaaagcataaaggtgctgccctccaaacttttttagaaagttcttaatttagctatgttgtttaagatgaacccaatgtttcaatttttattttgttacaaaaagcatttgccaatggtgattttttttacatttcaagttgtcatagaaatagtatctactaagataattttacatttgaattttattttattttatttttatagacaacaagaacatgcattaaaaagcgctaaaaaggagggggggcgctctacgtatgtaggctatatacacagaaaaaagccaaatcataccttatacaaagatggtctacactaacaaacaaaacaaagctaaccacaaaaaagagtatcaaggaaattcaatatagaggggaaatccaactccaaagagtccctggaccactcaaaaagtgtctgactaaagaaatcctttaaactttggttgaaaaactcttcatctttgaaagtccttcgattgcgctcttcccaaatacaccaaaataagcaaatgagggccaaacggcaaactgctttattcttcttttgaagccccttaaccttccattgtaggaggggatttctcactgaatttggaaatacccaagccactccaaaaatggctaacataaaggttcatagctctcttatcttggcacaacgaatcaaaatgtgatcggttgattcttcactatctttacaaagattacatttattgaccatttgtcatcctctcttcattaaagtatctacagttaagatattctctgaaaacaactttctaagcaaaaaagcaagttcttagaggagcatgggatccccaaacttccttgctaggaaaaactacattgttctccatccttatagaacaataataagacttgacaagaaaggttccccttctatcttctttccaatataaagtgtcctcacctttttgcacttttaacagacatagaaaacccaaaaagtgggtcacctcctctaccttccaatcttggaaaggtcttctaaaaagaacctcccaacactcctcttcatccccatttcttttccataattccgcattgtagcatttttatgagaagctattctaaaaaacgtagggtaaacatcttttagcttgaaatcctccacccaaatgtcccaccaaaaacttgtatgtataccatttcctacacagatagaagttctgacattgaactcttcccacccttttctaatgtccttccaaaggctcatcccaaaggagtctctccacactctagtagtccaacccccttccaactccccaaattttccatagaggatcttcctccacaagctctcatgctcaatagagaacctccaaagccatttgcctaacaaagcttgattgagactattcagtcttcttagccccaaacctttacaatttttagccttacacacatctgaccattttaccaagtggatctttctcctatctcccaaatctccccacaaaaagtttgtttgatttctctctaatctaattttcacttttctaggaattataaagagagacataaaatagatagggagatttgaaagagtgttctttaaaagacataatctagtctaattttacatttgaatatgttgatgagtcttaactaactatgaattacacctatagaacatgtgagtaagtatttttacatgtttgagatggttctcaaagctgggttatcacctctcctattttttcttatttttcgctttcaatattttcaacaaataatcaaaacctcatgcaagaatgtatgcactaacactctcccaacaatttaagcaatgtaattcacatgcaaatgaattaacaatctctaatcaagatttatataaacattcaacaacaccaatcgcatatccaaatacctattaatttcatagccaaaaagagattatatcaaaactctcttaagcttaaatgatcaaattcaatccatattctaaaccaataagctcattccaatagtgtaaatttcactagcaaaggttggcaaatagaaataaccaaaagaagaaataaagtgaaagagacaatgatattgggatttaacatggaagatctctgagtagaagaatttaccaatcaaaaagaattttatctagctcaagtccaccaatccactcattgagttacttgactagctccttccaactttagctatacacctttttctttgggaatacacttggagttgacaccaagctcaatctgagccacttcttgaagtccaatcaagaagaaaatgagttttatcccaatacaaaggcaacaatgagagatgggatggatgaaccaaatgaatcattccatattttatgagaaaatccaatgaaagactgttttatagctcaaaaacaagatgcattttcttgggaaacaaacattcacaatttagaaaaaaaaaaagggagcacaataggagggtgtatgacagctactatgcttcccttaaacccttgaaaggaaattcaggtttaaatagtgagggttgagtttgatcaaatggccgagattcaaccagaaagttttaaaaaaggtttttatgtagaccgatcaaattttgatttggacagatggatatgtacattacactgccctcttatatgaagatggatgaatcattattaacgatggatcaatcacgaaatagaatgcaaaaagactgagccaaaaagattgccaccgattaactttctctgatcttctattgcaaaaattaagacaattatgatttgaagacatggttgattcatttatgtccatccacaacctcaaactgcttacctttgcctttacacactttcaaactaccttgatattcaataggcaagtagtccaagggaggattttgaaagctgggagtaaaataggaattttgacctggaactgccaatctacctaaagcattcatagatgctttctcaagttactagtgtaagttttaatcattatttttaaaatttgtttcacctacatccttgtttatttttaattttataagactattcatggtttggattaattcccctttccccatgtttgcttcaatttgtaagttttgtctactgttctatttttctcatttgtaatgaaattttggctatttctaaatttctgttatttataaacatattaatgtattattatgttgttttttccttttgttttttggtctgtagaattgatctatttcctaattctgtttttttttttttgataagtctattacctaattctgttttgatgtcctgggatcctacttagagttgtggaggtaataactatcaaaaaaaaaaaagaagaagaagaagaagagttgtggtagtaacaaccttacatatgtgaagggtgggaaaatctagatgtatcatttgagtatttggcttgttctaggttttcatatccatgtctgtagttgtctaaaactgatgatgcatttgatatatgcataaaacacacatgacatatacaaagaaatgccaaaaggcaaaaagaagagaaacaaaaacaacatcctctccctagcgagaaccaaaccaatctacaaaatctactgtagacattgacatcccatctatgaacctcttaaaccacatcaagggagtacaaagagactgagatttgaggttagctctacactttcaaatgatctctgatatcactccttccaattagtccaaataataataataataataatacagaaaggagcagccttccaagccttcttttgcttttttccccacaaaaatttcatgccaatctaaaagagcctcatgaactgatgaaggcagcactcagattttatgatgaagctgcacataaatttataaactcttgcatttcatgtgtgtgtgtgtaatatatatgtgtgtgtgtgtgtgtattatattgaaattggtagtatatagttgcctcttttatccttagtatctctcctgagattggttatatattgttctttactttgatttgcaatgagtgtatgtttcatatatgcataatatatacatacattttttaatctatatcccaatgtttagaaaaccttatgattccaataaagagcccacgataagaatagaaggaataatataatttaggaattgacaatgatgtttttctatttgggtctgatcgatgttatatttcacaggactaggataggggtttgtagtatttgaacaggacttggtttctttatatccattgtttccattggccaaacaaaagatatgggttgaggaatcaggttgctgattcatttgtcatttctttgatgttaagtgaatccattctgccaaaggaactgaggactggtttttgatagaaaggaccaagtcactgaaatatcacttaggtcaatacattcttgtcatacatgaatgctgtattcagtcctctcacagagtagcatctggggcagctattatcttgagttaggttcttatgggtgctatttctgcttgattgtattctttctgttgacatgctacatatgtcttggcaaggaatactaatcttcaggatacctttctgatttgggtctcgggtgtcaccagtatcattgtaagcttgaatgtggtaagctgatttcaactaaagctacccatggctgtcttggtcgatgccatcctgcctaggaataagagtttctcagctgtgggggtattggagatttccaatcttcttcacttcagggagaggctagtctcagaagccattttttaagttattgtctacattttctccatgtctgatttattttttagtggatttttatattcttggtttagatatgcctgcaaaatctgtcctgttcatgactggaaatctccatttcaagcctcaactttttctttcttttgctcattctttctttctctctctctctctctctctctctctctctctctctctatatatatatatatatataagaaagaaagaatgagcaagaccagttagaagtttgttccagagacttgttctcttagcatactccctctcattttggctagcaagaccagctttatgttgattatattttcaggccctagtcctccatcctgcttgagggcattaactatacttatatcaattaggggagctgtttgatattaattcaggaattctgcaaaggagtttttataaatggttgccagtccacttgtgtaagtaatctgtctaagatgccacttgccagtgctattgggatattgactcttacatttgccgacagtgaatttccaatatgtgttaagatatcttcaccaaaatacttggtagcaccatcactaatgctgacaaagctttcaggcttattgtcactaccaacagtccaaatttgtattgccattttggcacaaggagatagtgttgactatcagaggtgatgcagatcctctggaagcacaaatccagggatttccctgttggtaaattacatcagataaaaatctcgctccagttcaagatgtcaatcttgcattttgctcatcattctcttttctgtatttcagatgaattatatgtcttatggattcacccagcaatgtaataattagagtgtttggccactgcaagtgtgtattttcttggttacctcatgcaattgtaatctgaggccaatgactgtagtccaaccattcatctgattgcatctcctcctattccaaatccctgtccttgtccatgcttgccctagaggatatctcctgtatattggagttccagggtcatttgtttttaaacagcacaggggggtttttgggcgtttttaaacacattggtctgggcttcctttatttatttatatttctctttttgctcattgtctgattgggtggtgatccctccttccacctgtgatcacctttggtgagaaatttatctgctctagaattccatgagccaacatctaatttttccattaattttcagtgctcttcctctctcaaagtacatctagtggaatgtttacttgagaaatttgccttcttttgtggggaaaatcctattagccatgaaaaggttggaagaatattccagtcactatggttgcatctatttgtagccaagctctgttacctgttaaaaagagagcattttccctttgttatgagtaataagcagtaggtacttgtcctcttgtttgttctatttgttaattttgatatagatttcaatgttcaattttttaagtaggttcattgctaattcctgcctattcccttgccgtgattagtcacattggacattttcacgctagtttttgttttatctgttttttattgtttgtgagctgtctgttcattcattacactttttgtattgtagaaagtagaaacttatgaatgatggtcaaacagactctttgaaaatctaaaacactattgtagtaactaatatataatgattttatggaatgaagtagtgacaaatttaacgtctgggctagtcactgcaccctcaaatgtttgccatttatgtgggctgtatagctcctgacatagtaatcatcacactttcttggtagcctttcaattcttcaatctcatgttctctctatcctccgagaagaatttcatagattgaatgcttgcaataattgctttcttaaatggtatgaatcagatcttgatggtgggatctgtcaagagtttttcatttggtctttgtggtgggaagtagtggttgggtagaagagtggtgaattattatgactgtatagttatctggagcatgcttgttggaaatttgctgggtcaattgtgggaccattaacaaggacttctaaaactcatctgtaagtatgaaattccagccctttatgggttgtgtaccaagtgcttacaattaaagtggtgaataaaaaaaactgctatttccagttggttggtaagagttaattctaaatttttgaaagaattggtttaggttctggaatttagtagtgagtaggaataggggaggaactctgttcctgtgcttgatatattggaaatgaacattgatcaaaatcctaataaagttttattctatctatttttgtcaggtttcacaagaactaggtaagagtttgaagcaatc

SEQ ID NO: 11986 - DNA, 9749 bp, Vitis vinifera
  Intron number 1 from transcript GSVIVT01026720001 (locus G SVIVG01026720001) derived from phytozome v7.0 (chr-ID chr1 5; pos 5465592 to 5475340)
tgtccctagagagatctctgtttctccaaatacaggtaaatatgtaggtttcttttcagtttatttccgtaattaaagggatttgcccatttccatttcgatctttatggacgtctctattggattccgtaatttcttcgttttttcatctgaaaatctttctgggtgtccatgatttgtttctaatttttcatctctgaatttattctctgcccctgtgtttaagtcttaaacatttgtctctctatgttttctgggttttcctttttcctttcttttttggattattgactgttgtttataatccatggttcagctttggtttgtgacaaacttggaactaggtttcctcagtttaaaagcctcccaattctgggtatttattgaaaatcgagcttagttgtggcgatgctaggaacctagtttaattattattttttctattttataattagaatagtgaagataataataataaaaattattattattattattattattgttaaattgttaactattgctatatctattgttgttgttgttactacaactattatttactggtattgtaatgactattatttacacatgtaagttataatgtaacctgtcagcagaaaaagtgtcctttaactgccttaaacctcatacttactaatcctacgatggataagcaaaaatgatgggtgaattcctcatcattttgtcaccaaaacagcacaattcagcataattttaccttttctcttaagctggtataaagtaagaatttgttcccaagcagcttcccaaacaaagaagccagctttggaaaaatatggtaactgccaggcctttctatgaagaatggaaggtctgagatttggtcctaaagccttgcacagtaggacttctcagagaagcaaccatctttagaaacttctcattagtcatcttcctctacctacaaccatgatacattcctgtagcttcaactcctgatggtttacaaatgcattattgtgcatatggcattttcatatcctgtcaatttcagaacaaaataagagccattaacatgttgttttcaataattctcttctaaggttttctataaaaatcagtccagatgatggacattctgcttatcaatttaaggaagaatgccaattcatcttgaggtacactacccatgtacatcagtaggataggtaaccagtacatgggttgttaggtagtgttgcatgcttttcgtgttatagtgtatttgggtagagaactagctcaatttagaagtttgtttttctcatagggtttttttcctggtatatagattggttgtgtctgcatcgtcttaaaagttttctttaacaccagggaatatgtagtcaagttatgttggactgggttggtggccaaccttaagggatgaaggggttgtgtctgtgcctcaaccttaagggatattccaaaagcttggcatagtctttgaaactattttggttactaagattttcccacggcttgacatcgtttagattttgtttagctgcttgggatttttggaggttggacatgatttggaaattgttttaggttttcaagatatccctaacactccaaatggtcaatttttctagcgttagagggtttgaatgctcttgctttcctcaaaaatagaaagccttggattgagatatataaccctgagaattaaagagagtaccggatgtggagacttttccatgaggaaagttcttcaagggtgttttgaaggtagagcgtgtgtatgttaggcaagcgtgtgtatgttaggcttgcatgttctttgaattagacctatgtattactgtattttgtaaaatggatatcttcattacatggaaagccttaatgattttcttatttaatgataaatatggccctaaaaggcgcagctttgtttgagatatagttccccaattaagagagacttggcaaagagaatgctatagaaaaaaactccaacataaaaagggaatcatgcaacaagagatagtcataggagttttgaaatggaaattctacccaaaatatgtagtcttgaatggtacacaaccttgaaaaatagagaatataaacaaaaccaatgagatgatggagtccaagtacaaaagtgcatccaagtacaaaagttgtatagagaggacattgaaaagcaaaacgcaaaagaaagggcaccataaacaaagcccctttgtgaggactctaaccgatacataaaatttgacatggttaaggattcacccccccatctacgtatgatctaacccatgacaaaaggttacaaagaaatgtgagttttagtgattgataaaacatttctttacttttaaaagatctttggttcctttccttccataatgtccaaaaacacacaaccagacaaccatctaagccttctttcattttatcaacaaaagaatgatgccacgctaaaacggtctctcttagtgaacttgtcatcacctagacaaatcctaaataggaaaacatgaaattccataacaccctagtttttactatgcaaaaggatgtcatctattaactatttgtcttctttacataaaagacattggttcaccaaagaccactctatcctttgtaattgatccaaagtcaaaacctatacttaagaagcttcccatgtaaaaaaagcctacttttgttggaaccactgaattccaaataatcctcatggggaaagcttttgccttggaagaaaagtgtagaaggatttggctgaaaatctaccattcgttgcttccatccattcttacttaccttgaagccttaataggaggatctcaaaccttttttttttttgataagtaaagataagtatattaaaatgaaagaggagacagcaaactagtgccctctaggtatacagggagtatacaaaagcagcccatagactctaaaccaaggaagcgggaagaaacccttacctttaactagagcctagccactcaaaaaagctaacaagagaccgagggctcgaaactataaacaccctaacccaagaccacagattacatacaaaagaatgttttagcctttggagtgacaacacctcattcccaaaagccaacaaatttctttccttccaaactgaccaaaatatacataagggggccatttgccacgcctttttacggattttccccacaaacgctccatgccacccaatgagagtttccttaactgtaccagagagaacccacgccacaccaaagagagaaaaaagaagattccacaatgccctcatcttaacacaatgaagtaaaaggtgatccaccgtttctgcttcagaaagacaaagaaaacacctatttgccaaagagtaacccttcctctggagttggtccaaagttaagattttgccccaggaagcttcccaagcgaagaaagctaccttaggaggcacatacgctctccaaataccaacataagggaacatagcagaaccctttttatctcctaatcattcaaattcattaaaaagtgaggtgccaatgccctcccttgccatgctgatcccatacatctgctacccaagcattctttgttgaagctatggaatacaaagagtgaaaagactcttttatagtagaatcaccacaccgtctatctttccaaaatgtcaccttctatggttgaccacattgaatgagatttttctatcaaaattttgccaacttctcttgatggccttttgcaaccctaacaaaacaatctatattttcttaggagcaccaaccagcctcctccttcctatatttcttggcgatacccacctctaaatggatttgttctttgaggtgtacctacaaatccacttgcctagtagctccttattgaggatgaatagctttctaatactaaaaccttgatttggtagagtgggttgggtcttcatgagtgtcttgggggttttttatgcactttgatgtacctttttttattattaatttatacatatctttttttacctataaaaaaaatactaaaacctttattacatttctctctacaagcgatctctcatttcaccaagtatgggtttttctccaatgatccctctccttacaaaaaatccctttggatcctgtcaatcctcaaacttacattcttaggcaagacaaacaaagacatggtaaatgtggcaagcttgacaaagtgctcttgattagggtaagcctccactcttagaaagatattgtctttttcacataggtagcctcttgtgaactatctcattgtatgccaaccaacccacaatttaaagtggggtcctagacgtacacccaaatacatagcagggagttccctcttcctacaccctatctcaagcaccaattcttccacaataggaacattgcccactagaattaactcacttttctccaaattgatcttcaaacctaaaatgacttcaaaccacatgaaaatctaaaaatctaacttggataaagaatttgctctcggctagaatcacaaaagataagagtgtcatcaacaaacaaaaaataggctaactcctcctccacttacgttaaacctcaacatatatcctccttcccatgttttcttcaacaaacaattgagtgcctctatagctaagacaaacaaatgtggggagatgggatcctgttgccttaatcccttgaagctttgaaagaagtcaacaagggcaccatttactaacaccgaaaatctacttgtgaagatgcaccatttgattaaatcgatccattttttatcaaaccccatctttttaaggatttctaggaaataagtttaactaaattaatcataagtgttttttttttttaatgtttagtttgcctatcatatcgttcacctattcttcaaccttgagtgaattgcttcattagcaattggaattgcatctaatatttgtcttccctcaacaaaagcattctaagaattagaaacaattgactccaccaccgtcttcaacttatttgctaaaacaggtaagcaatttatataaaccactcactaaatttattggcttgaaatcttttaattccttcacatctcccttctttgggatcaacaccaagaaagtaacatttaagcttctttaaaaagatttgacctcacagaacttcgtgaagaaatccatcatctcaaacttcacagattcctaacagtgttgcaaaaacacaattgtgaaatctttcggccttgtagctttattacattcattgaattcaatgttgacataacctccttgtttgagaaaggaaccttttgacacttcaacatcatccctacctaaagtctctaatgccatcctattgggaatggcaccagggaagggcaccactataccccactactttgctaagataggctagtcccaagggaggcccacttagaccccttatcttttcctacttattgcttttaactaccaatggacttaagggagacttcaacattgaaaactgacttgaggaacaactaaagctccatacaattaggtattagtgtttaccccccacccccccgacaaccccttggaggtgaggtagagttgggaactttgctctcaggatgccatggggtgagggaggacctagattgcttagtaaggggggagggtgaagagcatctagtaaaggtaaaagaggatggttagaagcaacataggttgcagtcttctctagagagtaaaagaggcataccattgcatacatacattggactactaatgctaataagaagatagtaaaaggtgatacttagtctccaatcacttgaattgaataaaaggctatgaaagaaccaagtccttttatctcctactctttagaaaaccaaccactagttaccttaatcctatacaagaaattcctttttctatgaatgtttgccattttatgaaagaatctagtgtttttgtcccattcctttgactaaatgttaaatttctgcctccatgatgcctcttttaataaggctcaatttcttttgcattaagcacaagtttattttctttagcatcctaaaaccctaccttttttaaagctacctcctttctaaacaacacattgccgaacacgtcacaattccatgtcgtcaaatttgccttcaaggcctttaactaggaggccaaaataaagctataagacccactaaacgtttagctcacccatcgactccttagtaagtctttaaatccatcctcttttaaccacatattttcaaaattgaatcgagttttgcctcaccttcattaggtaaaataggtgagggatctaacattagctccaataaaacactttcccaatcttccgacactaaaaatcggtctagtttcatatgggattgattattcttacctccactccaaacaaatgggattgattgtcataggaattccaaccacaatttttttccccatgtgcactaagactcgacttagccctcccacaccaatgcttttacactcaaactgcacaatctttgaaaatgagacaaggagtatacaaataattcttcccaacttgtattatttcacgcacacaatacaagaaactgagacttacaacaaatccctaggcctatgctgagactctttgccttttacatgttagaatatggtatttataggtagccaaaggcctttgataactgtccgcattttagagacccaactcatgctctacctaccttattagtttttctaggccttcaacaactccttgggtgtttctaagtgttgcacacactttggtgttgcttcaggtgaaactaccaccctcctccttaaagaacattctgagtcgtttccaataatctttaaaaaacgtctcatgacagttgttattgtattgttatttctcctctccccaaaaatctaaccatgttaaatccttggcaatagaccaagggtcataccacaagcctttaataccccctaattcagtccaaaacttatccctttccttgctctaggaaggtttataaaccccggtgcatacctagacaagggcatccttacaacatctcaaatgacacaaaattgagaatatcctcgcttctaatttaaccaattccaacactctattatcctagaaaactaagattccaccaacagccccttgagcccccactacatcctaatctaaatatcttcttccccctaaactcctcagtaactccgtaggcatctcattaatttttgttttctacaagcacatcaaatttacccttttgagatctaatcaaggacttaataaccttcatttgttcttgccattcacccctcttacattctaagagagaattctcaatttcatagctcccctacaactaagtcttagccacccttatcatccccaacttccttccttctaactcccctatagtttactaaacattctaatttccgaacctctctctttgtttgtgaaaatttgaccttttcgttgccatgcctatagcctttttccttttcctcgcttttagttttcataagagagctaatatttcctcctccaaacccttaataggcatgcccaaaattatgctaaacttaactagcttagcaaaagaccattgtttagatgaacaagcctcgcttgaccccctccttggagtcaaagccttctctctcatctcttttcttgaacttcctttgggatcttttttgaaatcatcagtgaattccacaaagctacaatcttgtcgggtcatcttctaaaggcctcccctaatcctatgatgctcattgcaaaaccccccaccctttgagaaggaagaagaaaagcaaggcctaggtcctaaaggagaatctcaccttggccataaacaatctcgattgtgcacaacatcaaaactgtataaggggacgtcgatgaatgttgtgtaaccatcaacactttgtgagagacatcattatttctttggacctgttggtccttctcccccttgtcaacattcttagaggcattacaccttcctgttgtggaggatttcccacaacatgggttgtcttcttgtgttataaggcccaattcctatttgaaccggaggccacaactagatctaaaatctatgcctccaaccagctcatcagaacttggctcataacatcttccgtatccccacggcccacaccaaacaactcatgcctagtttaggtatcggccttaaaagcccataattggagcccaagcccaccttcccataggttggcctttttgcaattgaacttcttcttttataacaaatgggtcatatctagcttagcgtaaatccatcacctttcctctactactttgggttccaacttcaatagcaccaacatcccccacgagctcatatgagggcttcctttgacccctaccttcccttgccaatgcgacattacaagtgataggcctatgtttctctaacaacacaacctttgccactcctttatgcaaaaaatcaggcaccttatgcaaagagggtgacatgttctttgcctttcttttcactacacatttccactcccttattctcacactggcatgtgatctgacctctacatcgtcctctaccccttgtccttgcttcttaatattggaatgaccatcgaaaaccatcgtaagatttcccaccacaataaaatggcataatagagcctaccactatggcaccaaaacagggaccttcccaccattgatctttgccaaaatcctaccccactgcaatttttgtctcaatgcagtgtctttcatctgctgcaacaaaagccccacaagaatctccaattctcttgagtagctctttgctccacaaatgcaaaggtgggctagctgtatctaagcttttttagcatggacttcagactgataacaccctatcattggaggcctctaatggttttacctccatttcaccaagatagatccatagttcgtcacctaccttgagcttagttcttccctcagcactagatgcagctgaaatactctctatcatgttagttaatccccttacaacgaagcttcttggccagagtaatccatcctcttggaaagccaagacattatgaaaaaactaataaaatttctttgccccatcagtacaaacaaaacatttgactataatgcttgcaccactgttctgtagctcaagaaaataagctctctccttttccttccacaccttgggaaagggggcgcaacttttctgttgcagcatgattccacttcttcaagtaaccaagataggctcttctccccaaacttgatccagctggaaaatcctcgacctctcttcgacactctgccttctaccttccctctaatctctttgatagagatttcaaaggactttgattccaccccaaaccataccttaccacccttccttccctctaaactctacctttttgaactctcaatctctcaacctttgttatatttatttaatctataataacaaaatgtttgtttctgttaaaaaaatgtttattctaaaagcaacagaaattaaaaagggtgtgccttaattttgataaggtagtggacaatagtacctcttttgtgcaaatattggttaattgcttatttgtgtttatatggctttggtttctgaagtgagcataagatctttatcatttttatttttcactcctgtaatttggtttatgattggttgttgtagctagttagaacatctggaagggggaattggaccat

SEQ ID NO: 11987 - DNA, 3581 bp, Vitis vinifera
  Intron number 11 from transcript GSVIVT01031879001 (locus GSVIVG01031879001) derived from phytozome v7.0 (chr-ID chr 3; pos 5090960 to 5094540)
catctcgagtgcaagaaatccgggttcctttacaggtacttattcatcttaaatcctaatatatgtcttcttttggggggaatagtgggatttatctggttcttgtcttttggtgtaacaaccacaaaatactcctttttagttactattaacccttaaccttcagttatctttcttatatcattatattccttattgttccattcctagtggtaccttgtgtaacatccacatgcttaaattaccttttatctggtgcaatgcactgtgatagtttttactgaagctttacatttttcatgcaatatcaatatcctgaggttttaaatccttgcatttatttggcattgtggcaaggttggtctttttaaacttttatttatttattgataggctatagttttcctattttgttgttttgttttttttccatgtttctattttggctccttggttgttttttaggggttcatggtactttaatgatgaggatgaatctccaagatctactttagagaggaataaaagaaaataaagaaattctaaattattctattaagggtatttagataattttacagttttttagagtctctagtgtcttgattaattagtagttgatttgattttatatagaatttgaaaatttttaggaatctccttaatttttttttttaaatttctattttcttaattaatctctctctctctctctctctctctctctctctctctctctatccaagtttttaatttcttaaaaattagaagttttctttattaaaaacttagtacaagaagtttttataattctaaagcctaaaccagtaattcaatctctagaattactccatgatctattcccaaccaagtatacacaaaacattgactaaaccagattcataatcaggacaggttctatccatgtggactgattctatattactcctactaacacttgcaattttcaatggtgagtctccattgattttttttagatgagattcctagaaggccttagtgagattctaaggtttttatctcttcttctttatttattttttcctatggttttaatctttctttatcttttttatcctagaagttatttatttattttccttgctatcataatttgtattccttgttcctgttcttaagcactaaaagattgaagccttagcccacctatttgattaaaaccgtcttagggttgccctactttgagttgcacttcttttgtcaccctttaatatgctattttattcttgattcagctaccaatttgatccaacaactcaaactattaagaaatagactagcaatatatattaagccaacttggctatagccctaataccccatccacgggcaacattctttgaacttgcacataagctcactaaaaaaggaaaataacattagtgaggtccgaactcatgacttcctgtgaaccaaggttctaatagcttgttaaattattgatttgacccaaaagcttaagttgttaggtaatggaccaaccatatatatatcaagttactttaggttaaagctctaattattcttgcctattggaaaaaaaatatataaaggaaaaacaaaaacacagaacagtttcagctggactgcatttgaataaatgatttatggtggaaagggttcatctcccctctacagaccctagttcacattccttcatgtagattaatgaagtgttttgaaaagtgattttgtaaaatcatacagatgaattgagctgtgaatttatatccccagatgtcatttcatatgtcttaattgtgaggaattaatatatagacaccactatagcacatgaccatttcagtgcaactgtcctggggctatcagcatcccatcacctccattatcattataacccctatcaccattgtcccatcactacaattgatgtcatttatacttctacagtcatcaccatggtcatctcagttgttattatctttatacttggggaacgaatggtttgattctggttcatctcattacgcagaactagaccctatagtaaacttaagttttggctccagctctggctttggaaacatgagagaaccagttctgaaatgacaaatgtctgatatttattgagtactgtgatagtggattaagatgaaagaaattaccatgttggtgtcagggaaaatatggttgccactcaccatctgttgggtcctatacagtaacatcttggtttcaagtttgaagagctcatggaaaatgaatcttcctcttatagataggaaattttgataattgggaaaagtgggtttgactcagtaatttgaaaaaaaatgaaaaaaggaatcccaaattttttaaatcaatattatcttcatctattaaaaaataatttaaaatacatacactttttaatgaatcagataattattccctaaaatggccctcttacttgtcatgtcaacaataccgattgacaagtagactcttgcttcccttccttatagatctgttctttattattattattattattaatatgcttcccttccttgtagatttgttctttattattattattatttggaattttttttctttataaacaaacatcccataggaaaagttgaagatttttttcctccataaacaaaaatcttgtaggaaaaaaatctgaatttttaggaatttgttctaagagcattttaggaatttattctaagagcattttttttggctataggatgtttgtttatggaggaaaaaaagaaagttcaaacttttccttgggatgcttattttttgaaggaaaaaaacctaataataataataataataaagagatctaaaaggaaaggaagcatctatgtggaggagtctacttgtcaattggttttgttgacatgacaagcaaaagggtcatttaatggaataattatctaacttattaaaaagtgtatgtatttttaaatggatgaagataatattgatttaaaaaatttgggtcctttttttcatattttttcagattagtgagtcaaaacccacttttcccttgatactttttatttttaatccaagctaaccccaagaactgatcatgtttactttctttttattagttctttttcaattgaagagtttctattcaaagtttctaatgatgttgcaaaaagtaaatgactgcattaccagttgtattgatggacacccgatttttatggtcattgttttaattaaacccatcatgtcatacccagaaccagctaattacttgtggataacttagataatcaagtaaatgggtttcaattgattgcagaatctctgccgtcaccaatttgttgtaagttcctgcttttccaaacagttgatttttaattcaatggaatttcaattctattgatttcaaatccactgattcttcaactcttttaaattcattctaaatccttctttcaaagagcatcttgacatccttatgtacatgacctggaagccatccttatgtacatgaccaggaagccatatgggtatgtagatgatgcttgatttgtttcattttgttcaggaacatc

SEQ ID NO: 11988 - DNA, 12158 bp, Vitis vinifera
  Intron number 27 from transcript GSVIVT01013268001 (locus GSVIVG01013268001) derived from phytozome v7.0 (chr-ID chr 2; pos 5917202 to 5929359 reverse strand)
agaaatcctggggggagttcgtttgttgaggtattttccccttttttgatagaaaatttgtgttatttccatttagtatgtcagttttagatttgagcaactttattggaactgggcagatttgatggcaattggttagattgacatggtaatatcacagggttcaacaagttttattcctttttcacagcttcttttcattagacttacaacaacttttgtttcagaagttaaaaagcatttgaatacaacatcaattttcatgttctccattattagtcacactcttagaacatgtttacatgggaatgaggaatgagaatgaatattttgtttcctttcctatttctccttgaattggaatgaatttggtgattccaattattttatttgtatgcacctaggaatgttaggttggaatgattaattgtttccatttcaatattaggtaataatgagaatgagaatgtaaaatttaataaattgataataatatctgtacatatagtttaaaataatttttttaatttttatttaaaaaaacttctcaaattgtatcgtttaaaataattttttttttattttttttattttgatttaaaaaaaaacttctttgatattttttttaactaaatagtaaaagcttgtgtggtcatatgatttaaaaacaatgttctatttttgaaaacaaaaaattagttttaaaaatctatagcactgtttgggtggtgttctctacaaataatttttaaatataaaaaagaatcgtttttgggaacaagtaaaagttgtttttattgattttttaaaataaaaggaaaataagattttttttttttaagaataattaagtgagatataagtaatactttaaattctttaatgaatgctctaatatttaagaataatttggaattcaaaaaattgattaattaattacagattatataaaaagttttagaatattctatccgtaattgagtactcaatgtatgtaatgaaaaacatgactcatttatacattaaagaaataaactttatttatatgaaattcatttaaaattaaatagtattagtaattattaattttaaattttttgttatttatttttaacaaaataaatcaattattcttttgtgaagatattaatattcatattttataatatttataagaagtataatttatgattttattataatattactatttattttttaatttatttgtaatgataaaattattattttttaataaaacttaaattaagtttggttgatttttgtatgaattgaatttataattttttacaaaatcaaaataaaaaattatttttaaaaatacttatctaaacaaatttttggttttttattttttgaaaagtgattttaaaaacaacttgcattgaagaatcaaaataccgtttattagagatgaatcaaaatcctacttgtaagtgagatttcattttcattggaattatttttttattccattcttatcgtcatttgagttatcaaaacatggaaatgaatgagatgtttgttcctactccccattcttgcataccaaatatggccttggtttctagtttaataatggttgcgaaccatggttttgttttgaacttggattggaggtgggttaggggggtttggtggttttggggagtcagtgggtgttgctagacactaatatgtaataatatttcaaactccacatcctaaaattgtgacatatttcttaattgagcattaatgtgttctctacgttgttggatgatgctttatctcaaaagctattttgtctaaatgagtagtagctgcaatagtgcacatacttgacaagtccatgccaatatccatataaagatattcatacatattgagagatacatgcacattgagagagagagagagagctcaagatagagattgagggagttcaaaaggggaggagggagtgagggctaaccgatatagtatccatcagaccaaagggttaagtgctttcctgctaaccctgttgtcgaaatcttgaaaagtgatacctatcatacccttgatatctgaagggtgacctcgagatacctactaaagaaaagccatatgatattgaataatatagaaagggatgattgacaaatgtctctactcaccatggataagatgcattttttttgcaataatagctctaaaagatcttccatgtagagaatgttaatattgactttttctttgtgagtaactaaccaaacacattgtcctttttgagaggctttacaactttggattgattttctagaggaacccatgtacaacactaattattggggagtaattcgaaaaactttctaggagaagataaggcatgttttatcttatgtctaacatcttatgtccaatgcaatagtgagaagtggacatttctagagagagaaaggaggatgagagctcatggttttctaaccattgaggtttctatagaaatcaaggttctatgatgcagaaatcaaccttccaaccatttgtggaaattagaaggtttagattggtgccttatttcagaggagagtggtagtaatttggagtgatccttctaagaagaggaaatatgagaagcggtcgttcacatagacatgtaaaaggtttcaaatccagatggcttcgcacttacactttatctggattgttgggacatcattaaagaggatttgttaaaggttttcttggagtctcatgacaatggagtcatcaattagaatactaatatcactttcatcgtgggatccaaaccaatagaatatttgacgttagacctattagtttagtggctagcctccacaaaatcctagataaggtgtggtcccattgtttatggggggttttgtaggagagtgttcatatttcttggggacccttgttgaggggagacaaattttagatgcaattctagtggtgattaaagtggtggatgagaaaagatgttcttgagaagaaggaagtgtctttaaaattgattttgaaaaaatggacagtcatgtgaaatgagattttttggatcatgtattagattggaaatgttttgggcggaggtggagatcatggattcatgggtgcatttcatcaatcaattttgcagtacagataaatgggtgcgctaaaggatgggttaagacatctaggggcttaaggcaaggcaaccccctctcccaatttctttttaccattgttatagatgtgttgactatgttgatgttaagatcaaaggagagaggaatcttataaggctttttggtaggtagaaatagaacaagagtgacacatttatagcttgttgatgacccaatatttttctcaagagccaaagaggaggattggtacaaccttaaattaattttgttggtttttgataatgaagaatttctgaactcctttattgataatgaatcggtacacaccatacacatatatatacacaaatgactgaataagaaacaatcaatctagcttaattctctcctaaaattaggaaactaaatcataaggaaatatcctaaatgatctctccttttttattcctaaattaaagtcctaactttggcattatttcaacactccccctcaagctggagaatatatatcatataatcccagcttgcaagttaagtcttcgaagttaggcctaggtaaagctttggtgaggatgtctgcggtttggtgcttggtaggaacatagtttaatttgaccgtctcactagtcaccttctctgtgataaagtgtctgtcaatctcaacatgcttggtcctgtcatgatgcacggggttctttgctatgcttatagctgcctgattatcacacatcatcagaattggagatgaactcgtttgtcccagttcactaagaaccctttttatccaaatcccttcacagattccctgtgcaagagctctgtactcagcttctgcactacttctggctacaactgattgcttcttactcctccaggtaacaagatttccccagacaaaagaacaatatccggaagtggaccgcctgtcaatgatgtttcctgcccaatccgcatctgagtatacttcagtgtcacggttctctgtctttctgaagaataggcctttccctggtgtcatttttaaatatctaagaatcctgtagactgcttccatgtgttcctcagtggggctgtgcatgaattgacttacagcactcactgcaaagccaatatctggccgagtgtgtgagagataaatcaagcgcccgacaagccgctgatatctccccctgtctaccggtgtactttctttctcgataccaagtttcttctgactatccataggagtatcaattggtttgcatccaagcataccggtctccttaagaagatcgagtatgtattttctttgagagactacgattcctttccttgatctagccacttccataccaaggaaatatttcagatttccaaggtctttaacttcaaactcttctgacaaatacttcttcaaattctgtaactcccccatatcatttccagatagaataatatcatcgacatagactatcaatatggccaatttcccggcatgagatttcttgacaaatagagtatgatcagcctgaccttgcttgtagcccagcttcaggactgcttttgtgaatctatcaaaccaggctcgaggagattgtttaaggccgtacaatgatttttggagtttgcaaacctgattctttgccatactttcttcgaaaccaggtggtatttccatgtagacttcctcttctaggtccccatttagaaacgcattttttatgtccagttgttgcaagcaccaatcttgattgacagccaatgagagaaggatcctgatagtgttcagttttgcaacaggagcaaaagtctcctgatagtctatcccataggattgtgtaaaccctctagctaccaaacgagccttgaatctttcgactgatccatctgctttgtattttatggtgaaaatccacttgcaccccacaggcctcttctcaaccggcaaatctgtgatagtccacgtcccattcttctcaagtgcatcaatctcatcttgtactgccttcttccattctgaaatttttaatgcctcttgtattgtgttgggaacctgagtatcatcaagagaagtagcaaatgctctgtaagatggtgataacccttcatacgtaacataattcccaattggatgatctgtacatctcctaacacccttcctcaatgcaattggcaaagtagaatcatcaatgctgggaattaacacctctccagccctatcctcacctatgttctcttcaggaagacttgaattggagtcaatatattggccacatgttgactgtgatccgtgctctaattcctgtcttttcctcctcctgatgtaaacttgtaagttctcattagcaagttgtggggctataggttgaataggcatgggagactggatggtcacgggagaaggaacatttgtgtgctgggctggctgaactgatggcggcatgggtgtggacaactcagtgggcgcgaattgggaaggatttggtgactctgagtgaaaagaaggtacaccatcaagaaaagactcccaaacttgatgttcattcatgctctccccctgaacatgagatttgggatagaagaagacatgttcaaagaaagagacgtccatggtggtgtaaaatcttttgttggttggagaatagcatttgtaccctttttgggttggagaataccctagaaaaatgcacttatttgctcgaggagcaaatttgctacgattttgaggatacacatgaacgaatgccgtacaaccaaatactttgagtggtaaatcagaagaggcggcatgggtgtgaggaaactgttttaagaaaagttgacgtggggattgaaaggtaagcactctggatggcatacggttaatcaaataggtagctgtgagaatagcttccccccagaaatagtttggaacattagaggaaaacataaggcaccgggcaacctccaagagatgtctattcttgcgttcggccaccccattttgttgtggggtgtcaacgcaagaacttatgtggataatgccatgattttgaagataagtactgagactactagtaaagtattcctttgcattatctgacttgaggacttgtattttggaattgaattgattttgaaccatacgattgaaggtttgaaaaatgtgcccgacctctgacttttctttcataaggaaaacccatgttacccgagtatgatcatcaacgaatgtcacaaaccatcgagtgccagaaatattttttatccgggagggaccccacacatcactatgtactagagagaaaacagtcgaaggtttgtatgggatttgaggatatactgttcgagtatgctttgcaaactgacaaatttcacagtgataagatgctggatttttattgataaataatctgggaaacaattttgcaaggtaaacaaagctaggatgaccaaggcgatagtgtaacattataatctcactatctttattgaccttagaatttgacacagaattgaaagactctgacatactctgagactgtacgcaacttgcttgagagacttggttggagaattggccacatgaaaggaggtagagcccggaacacagttcagcactgccaatcatcttccccgatttcaagtcctgaaaaacacacaagtttggatagaatttagtaacacattggagatcatgagccaatttgctaatggacaaaagattgcaatccaagtttggaacatggaggacagagtcaagatataagtctttagtaagttttatagaacctgtcccggcaatttttgactttgaaccatcagcaatatggacggatgaatgaccattacttggcttgtaattttgaagaatggcagcatctcctgtcatgtgatcagaagcacctgtgtctactatccacggcctcattcctcctcgattagcagtgaaggctacaccggtagtactgccactgccaacttggcttaataatttctgtagcatctccatctgctctttgttgaatggactcggctcgggaacagaggtgctctcagagttggcagccacgtgtgctctgccatctctgtcaaaccgtggctttggtttccaatcagcaggtttgccatgaagtttccagcaagtctccttataatggcctggtttcttacaataatcacaccaaggcctatcccgtttctgacgatctccaccactactattaaatgaccgagccgcaagggcagaggcatccaatgttggggcaggttgctcttttgatcccatcatcactttctttctactttcttcacgtctaacctctgaaaaagcctccctgagacttggcaagggtttaatgcccatgattcggcctctaacatcatccaattccctgtttagtcctaggaagaacttgaacagtctcttttgttccacaatttgcctgtatgttgctgcatcatccgaacatttccatgagtgagtctcaaataagtcaagttgctgccaataccttgtgagtgtgttgtaatactgagtaactgactgctctccttggcggaagtcatgtagagctgattcaacctgaaacagttctgaagtattttcagaacttgagtaagtttctttggctgcatcccatatgtcctttgcagtcccaaacagcaagaaattttcgcctatgtcattgttcatggaattgataagccatgacatgatcatgctgttttcaatcttccacttcctgaaacccggttctgtagtttctggcatgactgcttctccagtgaggtactcatcctttcctttaccgcaaatgaacagcaacacagattgtgaccactgtaaatagttatggccatttaatttgtgtcctgtgatgagaataggaaaggaatcattgccaccaaggtttggaatttcagatctgccccctgattctggtgacgtgacgctggatacttgtgatgatgccattccgtattttgtcatggaccggaaaggtagaagaacacttttcaaggcacgtgcagggactggagttgagaaaaaatagccgaaggacgccggaaaatctgatcagagggcccgcggaagcaaaagaaccccaaaagaggcacgtgcagggctcggattgcacaaacaggtaggaagggtggctggtcggcgtcaggcgagcctggaggaggaagcgcgtcgccggaaagtggctcacgcgccctcacgcgccggcgcgtgagatgcagtcgccggccggaaaaacgcgcgtgggcggcgcgtggatgggtttctggttccggtgctttgggacaaattggagatctcctccaggcgctccttgcggtgtagaaaaaaaccgtcgccggaaagttcgccggaaaaattcgccggaaaagttgccggcggtgagtgttttctgacgactattcgactgactggaaagtgttttctcccttggctctgagaacagggactgatggccggaatgagagagagagagagagatgatcggattgagatatggccagaaagatttggccggaatgagtgatggcctgaataagaggtggccagaagggattagggtttcagaaaactggctctgataccatgaagaatttctgaactcctttattgataatgaatcggtacacaccatacacatatatatacacaaatgactgaataagaaacaatcaatctagcttaattctctcctaaaattaggaaactaaatcataaggaaatatcctaaatgatctctccttttttattcctaaattaaagtcctaactttggcattatttcaacagataactttgtaggctcaaggtgaatttgaataagagtaccctatcgggtattatcattagttaggctcaagtatgtgagttagctacttttttagaatgtaggatgttagattgacccctttcttacttaggcctcccttttagggaatcctaaagcaatatccttttaagattcggttgtagggaggatctcacgctgattagatggttagaagaaagcttacttgaccttgggaggcaaaatcacttttgtgcaatcatgtttgtcacttatgcccttatactttatttgtttaaagcctaggttatggtggcctcctgaattaagagtttgtagagagattttatccagtcaggggttggggatgggtagggagatcactttgtgggttggaataaggtgtataagcctaagagggaaggagggctaggcattgggagtatatttttaaggaataaagcccttctagggaagtgattgtggaggttccttaggtagatgatgctttatggcacaatgtcattttgagtttatgggttaaaactctaatggatagaatgccaactgtgttgttagatggtcgcataaatgcccttgaaaggctagtgcacaaacattattagatttctttcatttcaattgctattctatgggagatggtacaaaaaaacgcttttggaaggatctttagttaggtgataaatcccttagcaagcagttcctaaatgtctatatagtagtgaggttttaacttggttagttcatcaatgctagtttcctccctctctatatcttagaacttaatttttattataatctcttagagcaagaagttaaggagttagcttgtctaatgttagctttatgtcacggacttagtcgttcactaagctcgtgtggcacttaggcaagtcacgatgcttgatcttgctaagtcagccttgttcccaatgcttagcttgctaggctaagatgctcacgactcgaaagcttaagaagcttaataggcaactctttaaagaatggaagctcttattaactcaaggaagtctttacaagtgcttggaagctcacttgcttggtgccttggtcaaatgaggccctcacctatttataggcaccaatggaactctttggaaccttggagggttccttacaattcaagtatattctagaatgtcctacatcattctatgtacaagcctatgtacaagaatacacaagagacctctggaattctctagaaggctgtggactcttctcatgtcttccaccatagtgtagtgttgtgtggatttctccagacttctctagaaccttccacactcttcccactctaggtgtctccagaagcttcccgactctatataagcccatggggaggctcatttgaatcatcctgtgacatttagctcatgtctattttgtcacccacttttcctaacatgagagtttggtccttaacatccttaggatcattcttggttagctttttttgaagctatttatgcttcgactaatccgattccttttattcctacaaattttatttggaaatccaaagctccaccaaaagtgaaggcctttacatggcttgtggcaaataagaaggtcaatactaatagcttgcagggttggttttatgattttagaaaatccaccaagactttcttttggttggggtatgaggggatgcaaacaagttggatcgttcttagttaggtttttttaaagctatttatgcttcgaccaattcagttccttttattcctacaaattttatttggaaatccaaagctccaccaaaagtgaaggcctttgcatgatttgtggcaaataaggtcaatactaatggcttgtagggttggtttaaaatccaccaagactttcttttagttggggtatgagtggaatcaagtttgtaggctgaaacatgaagaggagttggagcttatgatggtctatggagaatagagcttttgtgggtaagttgctctagaggttcttatgggaagtgacttgttatgtgcttataaacctatatagtttacactccaatagataagatggtaacattgtatttgggtggattggctgcttcctggaatgtttcctagctatttcctgatttctcttgttgtatttgtgtcttggtttaggattgttcaaaatctgtttcccagaggaactacatttgtcagatcagcccgccctttggctttaattttttaacctataacttgtctattgatgtccccatctttcatgttctagatagtttttcttgaaaagttgcatttaaaaagacaatcattttcaatggttttaaaggtaattcaaatggtaaagctttatgcgagggttggcacttgccatcctgtgggtgatttggctggaaagaaatgttaggtttttgaggataggtggatgtgggtagttattcatcacctgaactctttgagggtagagtagaagctccaggaactaaaagttgcttttagttggttgctttttggggaacctgggatggatcaagattggtggcacattcagaaatcaatgttgcagaatcgtaaagagttttcttcaagctggcttgagttgagtaagccattgtgctgagatattggttctgttcgaaggtttgattaaggtaaactattggggatttttaagttcttaatggaaggtgtctcaagcattgttctttctgagatatctcagtgggcaatatggcattgaaaattgatggttggttgtgcaaaacttttggtcttcctggggtttgggttactagatcagttaactacacagtgatcagttggccatgtgaggtgctatactattagaggcttttgttagggaatttatgtctcccatagttgaggattctttggatttttgcattctgtttttctactattcttgtgatgtacttctctttgtagcttttgacttgaagagtagctcatccttccttgtatccttgattcatttttaatgaattgtttttttccaaccaaaaaaggaagcagcaggtctatgaagcatttaatagaactgtgttcatgattggcaaggttccagatatgcagtttgttttaaagtctagcttcgtttttaattgtatcgtgcaccctgttagtgttaaatttgatctatgaactgcatttacctacagctacgatgggtattttacaaaaattcttactgatgaacaatgcagttggtctttagttcattcagtgctg

SEQ ID NO: 11989 - DNA, 33623 bp, Vitis vinifera
  Intron number 1 from transcript GSVIVT01006940001 (locus G SVIVG01006940001) derived from phytozome v7.0 (chr-ID chrU n; pos 29148758 to 29182380 reverse strand)
tttgcatttggtaggaagggaaaagtcagcgctgctttcagaaggaatataggattccattataggaaagaatgtttagatttccaaatttgtgtgttaaaaggttagaaacaggatccattcttatagagtaactgtatcaggtttatcccatggtaacaactggaatgacgcggaattctgttgcatgtccatttcagcgtctcaaaaaatcaaatcaaaccaaatcaaatcaccatgatgattgcaaaatgttcatgaacattgatgcttgtccatcaaagatacactatatgctaccatgggagtacggccgttagtaatgtgctccatgattaaaaataaaataaaattgttatatgcaagcatcctccccaattaatttactatcataatagtcaaccaacatcacatcccaggcttataagaatcactctattttgatggcataaatttgacaagaaaataggaaaaaaattcaagaggggactttgtcctaaaaacaagaattattttctcatcgcgagaaagtctaagattcacactatttatttttttataatagttttttagtagttttaaagctttcaaaaatttctcccttatttttatttattaggttggcttagttcacttgggtactcaaacgcaaacccaataaataattatttattaaatcaggtcaatcaagacattcaaattaaactctaataaaataaataaataattatttatggaattggtcaatccaaacattcaaatccaactccaataaaacaaataaatatctctgttcaaattttaaaatgtcattttgaagatgtgactttagttaaattagaaaccatatttaaataacaagtatacatatattttccataaattaatttctaattgaaagaagaatccaataccccaaaaacttaatctgtcttagagggaagcattggcacgagcaagcccatgagcgaaatggaagtgagaatatcaacttgaatcacataatcattgatgagaatccaataccccaaaaaccaaaggattcctccacaagattggttcacaaagtgtgagtaagggcctaaaatgaggcaattgattactagaatttgaatgaaattatctttattttttatatattaataaaaagggctttatttatttatttatttttatatattaataactttctattgcaagacaaaaagggctttctattctcccatttgagcaagtaatgaattcagcctcattggcatttgactctctctcccttcctccctttgtgaatagtctgctttgtgtgggcttgaatttggctcaaagctcatctttcacatagattttattattttatttgaatatagtgatttaattttcgatgagggtttttgaaagagcaatccaatctgaccttatctgggtttggcacagtgtcccaccatggtaccataccaaccatccaaataggtaatttgatttcaaatttttaatccattgtattttagtctcgtttatttatatcatcgctctatcacctttcacctcctatttaattgtttgtaatttgaatttgagcaccaaatccaaataatcaaatatggctaagtatctagaccacccaaagtgggacggctgatatcttttggactcatataaaaaacaaaaagcctctttctccatgaacaaaacttggtcaaattaatattaaggttatttttacatcaggtacttgtattcaaacattgaggataacggaaatgacttctatgttatcccttccaatacttgggaagggagagtaattggttgcaacaaagcctcctacacctgcacgtgataaaggtatacataccctaccacacatgacttccattttctttttctttttttgtggaagaaacatacccttaattttgaatacacctttttgtgtaagagagtggggccaatattacttgtacatcatggatgggtaactgtcactgtgccaacaaaaattgcacatatgagtcatatgcatgttaaattctagaagtgcaggcattgaattttcatcatggaagagtaagccatgaaaattaatatagtaggtggttatgagaaacacccacagattgttgtaacaaaaatgttctcctttcatatgttggtcttcaagttaggccgaaatgcaccttcttcctgctatggggttggggatgggtgccaggtgggctgtccggatcagtttcttttgagagttctaaaactatgaaaagaaactattattataaattaaaaaaggaaaaaaaaattatatttctctcttagaaaaaatagaatgaacacaattcttctttctttctctttctaagaaaattttaaaaaaataattttttttttaaataaatcctctcttcaaattttcttattttcttcttgacaatgaagtttaaggtttttgtgttgtgaaaacaaagtgatttttgtacttatagttttattcacgatttgagatgaaaaaattatcaatccgttttagaaggtaacccgaaatgtttcattttttttctttcatatataataatgaacaatcaccagcccaccacctttcataattaaaatgcaaaaaagaccctcacaaataatgtaattgcctatcctcactctgccttatcatggcccttgaactcgagagttcacctacttggaattataactatctcttctttctttctttctttctttcttttttaattattatttttgtctcttttaaatctttattatgttagaattattcctctttaattgaatttgttaattgtaaactttgttatcaaaacactatgaggatataatgacgatgggcctacttacaagtttttcaaagtttacatcttattttataaaatttaaatttatttaatttatttttcaattatgtttaaaattagtaagatcgaaagcttattaaattggaatttttttcggcctatatgtgacccattttgtataatatatgcttgcaaaagttaaataaaatcataattaaagcatgacaaccgtattttgaccatgtaggacaatattttattttccacttgcacttgcatgtagacaaacgtgtacgttaacatcttttaaagaaaaaaataaaaaattgtaacgggttgaccatacatccaatgggataaaatcatatatgaaacccgttttaaatatgtaaggggaaatcatgtaaccatacatcacccaaaaaaattgagatttttagaactttgcttttaccttttttattttaatgtaagatgagaaaaaatgttgcctatttattcagatttgtttcacaattactctcaaaagtaaaggacaaaatacacatcaatttaataccacatattgacaagtacatgaaacatttatttttcttatttatctcacatcaactctctcatacatctcatttaccacttgccacattccctttttttttttttctttttttctttcctttttttccccctcttttacgaccataatccttagtcacctattacatttttcattgttatttttctttttttcctttgatattttttttaatatgttcatatattttctcataaaacttccttaattttaattttttttttcactctctaatttctccatatttattgattataattattttttggacatattaaacttaaaatgataatatataataaataattaatataaaaaattaaataaaatatatgtataatggacaaaaatgaaaatattgtcctacaaataatatacttgatgattttaaatattaattgtattaatatatttgataaattaaggtttaaatttaaatattttattttattatttagaggtttatgatataagatttttttatattaatgttaaacaaaagatttatttattttctaaatgttatcacatgtaaacgtaaaaatatctttataatactattttattatttagatatatttttaaattttttattttaaattcatcacatcaaaatcacaatcagctattgtgcttttgtctattttcttatgattttaatttgattgtggatctaactttttgtttggttaaaatctttaatttttaattaaaaaatatatatttttcataaaaaaaaaaattgtatttaaccttttatattaatttcataaaaaaataagtacatctataagaaaattaggtaaatccatgtgtaggggaatcaggacccctatcatccttgtcatggtctatatattcatttgggacccttgataagtgattggagttccttgcccaccccataacgaactttgaaaccctaaatacgtccattcttaagggaaccaagacccttatctcaattctcatagttcatatattcctttaaggatcattgagaatgaatcatttagggatcatttggaagtgatttcaaatcgttcctcatctcggaatggactttggaaccctaggtacatccttaagaaaatttggtacatccaatccttgggctatcggaacccctatcacccttcccatggtctgtttgttcctttacaaactcttgggaagtgattggatgtcgttccccaccttggaacggacattggaaccctaagtacatccttaagaaaatttgaaacatctaatccttgagctaatgtgacacgtatctcccttcccatggtccatttattccttttagagactctcaagaagtgattggaggttgttccccacatttgaacgaactttggcactcttggtacatcatttacaaaatttggtacattttttacaaaatttgatacatccttaaaaaaagctggtacatctaatccttgagctaccgggacccctatcttattacccatggtccatttattcctttaaggaactttgagaagtgattagaggtcaatatctaggtacttcgaaatgaactttggaaccttagttacatctttaagaaaatttgttacatccaatcctttagctaatgtgatacctattgtagacccctcattttgcccatgacacatataggttactatccaaataaatcattgtaatttattgactggtaatcttcgattcttcctcagaagcttcttagaggataaattatagaaattttgatgtgatcacataaacctttgaatatgtagcttaaggccttctgattgttctaacttaccattaactataatttaaaacaaaattattgaatccttattttaaaatataaagtaaaataaattacttctttgaataataaaaataactaaaaagatgtatataataaaatttggtgacaaattaaaagtagattttaatacaaacaactcaacgtgatttgatttttttattaagcattattttacgagtaatattctttatctttttgtttcataaaccataatttaaattaaagtttttactattgtcattaaatatacattttgaaacataaaatacgatatctctttaaatatttatttaattttgaatgtgccaaaaaatcccctttttccatcgattccaactaagcaactgccactcaaaaatcccatgcctatgctaaccagatattcacaagcctttcacgtaatgttaaacccataattctagcatccaccaccagaagatcactttcacccagccatcaccagccgtcctttctcacattctgtaatccatccatttggctgcctaaaagcatacctaaacccatacttcaacccctgcaaccagccatgctaaggacactctgcaccagccgtccattctcctctgttgcagctcagttttagctgcccaagacccaactccttcacccatcaatccgtcctatcccccatgctatagccataccttttagctgcccgtgatgcaccttagtacagctcctgttaagccgccccatcccctgcaacagctccattcataaattataccttaaaacagtaactactatagctactgacgtgtaaaggattttttaagcttgtatacattttttaacaatttttttttataaaaaaatatagttataaaagcaattgaaatatatcataaattattatatgatttacctttatagtgttttattgtgtttgatatttttgtttgaaatacaatagaaagataaagaaaaaaagaaaaggatgtagaattattgatgttggttcaagtattatactttagcattgttccaatgttttctattaatcatacttttattttagctcaatttcgaatttttcactttaatccaaaagtctagaattaaatttatgttagctatgaataaaccatagtcctctaatttgttattattcaacatcaagcttgtttaaggatgataaaatttgatacaatttttcaacaagacttgaatctaccatgctttttatgggtttgagttgagtataattgagtgtgagttaaattcatgttgacctatataactcatctaataactaggtagtctttgagtcaacacgcataacaaaattggacatcaattaattcatttaataattatgttgattagtttaattatactttttaaaatatttaactcatatttgacacattttaaatttgattttaaataaataggttaattgagtcataaatatattagtcatataaattaacacaagacctaactcaacctaattattaaatgggacaaatgagttacacgatatgttacctgtttaataattatgtagtattttaggtttacgtttttaaccagattattattcgtgtcaggtttgacacaacacaaatatgacccatcaacaaaaattgtaacccctaagcttgttcactaaaaaagtaaatttatactaatatttaattacctagtttaaactagtaggaatattttaaaattattgcttagttttttaaaaattgttaatattggtatatgtatatagtttgtctaaagacattccattgatctagaattccaaatataatttgtctgtataaagatatcatatatttttaataaatatatattgtaagttaaatattatattttacaatatgttgtactatatgcataactactatattactattttacaaaataaaaaatacactatataatagtaatatattatatacataaaaagtttttgtgtaaagtacccaacaatattttaattaataattgattattttatttttaaataatctaattatgtatttattatttttaattattaataactaatttttcaaaagtgatttgtttttaagaataaaatcataaattatgccataaaagtagtaattgttgtagatactgatttgttaaggattttttttttttttacttgcatacattgtttaataaaatatttaatttaagttttaaattccttactttaaattttcaattttatttttagtctaatttttaatttataaattctaatttttaatttttaaatttttaattccgaaattttaaaggggaaatcatgtaaccatacattaccaaaaaaaataaaaataaaaactgagatttttagaactttgcttttacctttttaattttaatgtaagatgagaaaaaatattacctattcatgtacttcaatagtgctttcagatttgttccacaattaccctcaaaagtaaatgacaaaatacacatcactttaataccacctattgataagtacatgaatcatttatttttcttatttctctcacatcaactctctcacacgtctcacttaccacttgccacatttccacttttttcttttttctttctttcttttttttccccttcttttaccaccataatccatagtcacctattatatttttcattgctaattttttttcctttgatattctttttaatatgctcatatattttctcataaaacttctttaattttaatttttttcactttctaatttctctatatttattgattataattattttttggacatattatacttaaaatgataatgtataataaatggttaatataacaaattaaatcaaatatatgtataatggacaaaaataaaaatattatcccacaaataatgtacttgatgattttaaatattaattatattaatatatttaataaattaaggtttaaatttaaatattttattttattatttagaggtttatgataaaagatttttttttatattaatggtaaacaaaagatttatttattttgtaaattctatgacatgtaaaagtaaaaatatctttataatactattttattatttttattattttttaaaaaaattattttaaatatatcacatcaaaatcacaataagttattgtaattttatatattttcttatgattttaattttattatggatctaaccttttgtttggttaaaatctttaatttttaattaaaataaaatataaaagaaaatatatttttcataaaaaaaaaaccgtatttaacttttcatattaatttcataaaaaataagtacattcgtaagaaaaataggtaaatccatgcttaggggaattaagacccctatcattcttgtcatggtttatatattcctttgggacccttgataagtgattggaggtccttgcccaccctagaatgaacttcgaaaccctaggtacatccattcttaaggaaaccaagacccttatctcaattctcatggttcatatattcctttacggatcctcgagaatgaattataggttgttcttcaccttagatcagacattagaacagacattagaacccaaggtatatcctaaagacaatttggtacattcaatccttgggctaccaaaaccactatatcccttcccatagtctatttgatactttggggactcttgagaagtgaatggggtcgtttctaatcttggaatggactttggaaccttaggtacatccttaaaaaaaattgttacatcaaattctcgagctatcaggacccctatctcctttcccaaggtccatttgttcatttagggatcctcgagaagtgattggaggctattcctcaccccaaaatggacttttaaaccctaggtacatctttaagaaaatttggtatatcttatcctttggctaccccatatcgcttcttatggtccatttgatcatttaaagaccatttagaagtgatttcaaaggcgttcctcatctcataatggactttggaaccctaggtacatccttaagaaaatttggtacatccaatcatcgggctactaggacccctatcacccttcccatggtccttttgttcctttaggaactcttgggaagtgattggatgtcatttgccaccttggaataaacattggaaccctaggtacatccttaagaaattttgaaacatataatccttgggctaacgggacacctatctcccttcccatggtccatttattccttttagagaccatcgggaagtgatgattggaggtcgttccccacattggaacggactttggcacccttggtacatcatttacaaaatttagtacatcatttacaaaatttggtacatcattcacaaaatttggtacatccttaaaaaattttggtacatctaatccttgagctattaggacccctatcttattacccatggttcgtttattcctttagggatctttgggaagtgattagaggtcgatccctagctacttcgaaacggactttggaaccctaggtacatccttaagaaaatttgttacatccgatccttgagctaacgggacactattgtagacccctcattttgctcatgacacatataggttaccatccaaataaatcattgtaattcatcaacttgtaatctttgattctttctcagaagctcttggaggataaattatagaaattttgatgtgatcacataaacctttgaatctatagcttaaggccttctgattgttctaacttaccattaaccgtaatttaaaacaaaattattgaatccttattttaaaatataaagcaaaataaattacttctttgaataataaaaataactaaaaagatgtatataataaaatttggtgacaaattaaaagtagatcttaatacaaacaatttaacatgattcgatttttttactaaccattattttccgaattataaaggccaatatatgagtaatattctttctctttttgtttcataaaccataatttaaattaatgtttttactattgtcattaaatatacattttgaaacataaaatatgatatctctttaaatatttatttaattttgaatgtgccaaaaaacccttttttccatcaattccaactacagcaactgccattcaaaaatcccatgcctatgctagccacataattctagcatcttagctgcaatgttttaaaaaccggaccggatcggccgatccgaccgtcgactggtcaccattccggtccggtccggccatttggcccgtaaagaggttgagccggaatcgaactggttgaatcagcgatcggaccgccgaaccggatgaaccggtcggttccctccgaaccgttcgactcaatcttttttttcctcccagcatccgcgcggctgttcccatgttcgccggtcactggagcgttgtccctctggcaacagcccccgcacgttggaaagccctttcccgaaacgctgcaaagccccatcgccggccactcaacccccccttccccgcggctgttcccattgttgccggcagtgtttgaaatatcgaaaaaatttggcgatatttctcaaaaatcgtggagttagggtttgtgaaatttaaatccattggcataaaagcaaagagacccctagaacagatccggaaaacacaaggagcaaaaaaaatagcaattttgttggttttccttgggggttttgaacggattttctcagaaatcaaacgaggatgaattttcctggaaatcaaatgggggatggattttcttgggaatcaaacaggggttgcaaaaaaaaaatcaaaaacatgattagattagtaactgtgaggattgagagtggcagaggaaagtagggctttttaccttttacttttagggattgtgtcgtttggagggcactttcagagaaaattgaaaagggcttctttgcctcgagtgagagaattcctccttataaataattattaattattaataattcatcttaatttttattaaatcaaaaccgtgcttgagttcatgctaccattggactagtctttgataatatatatttaatttaaatttgttaaggttcatcattaaaaaaaatctaattttaattattttattttaaattatttttgatctattaataaaaatataaaaaataatattataaattatattttttaaaaaaatttaataatatataaaaatatatatttatgacgttaccggttcaaccgcggttcgaccaccggtccgaccagtgaaccgtgaaccggtaacttttccggttcaatgaccggtccggttctgaaaacattgcttagctgcaccaccagccaccatccagccgtcttttattgtttttcccttaccaagatcactttcacccagccatcaccagccgttctttctcacatgctgtaacccatccatttggctgcctaaaagcatacctaaacccatacttcaacccctgcaaccagccatgccaagacaccccaccagccgtcccttctcctctgttgcagctcagttttatcatatttctgaaagaagagacgagaatctcttcatcgtcttcactctctatacttatatctcaaaggttatcccggtttctatgtgcatcgaatctccatagatgaactcggattttgcattgacctgaatcttgagcatgcattatttcatggacggatagaagaaaaagaagagacttccatattgtgctgccaaacttggtgtttttgttcatttattcttcaccacaatagttggacataaaggttagtctcaatgaatctttaccatttgaattggtttattaatgatttttaagttattcattgataaggttaaaggccaatggatgaaattggtttgtcgattttgaaactcatggctgtttgtgatgtgtttttatcaaacttatacatccatagcacggttactatgtgaattaaaaataaagaaggataaatgcaatgatggaataatgcagaattggttgatgccttgttaatatgtactatactttttttctatatgtttagtgttgtcattttagttctaagtaaaatattcgattccttaattctaatctttattgccaatatttttaatttattcatttcttctcacttcatgatttttttgaatacatgttagtttaggttgggtatggacaatttgggccatgcatgagtgttgttagaatttgatatttaggaaactaaatgattaaatgtggattacttgacgaattatgattgagattgagttatttttttcttttctttttttcttcaaaatttcttttcatctaaataagccattggataatcacatgacaattgactttgaataaactctcttgattttgattcatggaaatttgatttatcttaattttcttaaataattcacgcatatacacttacaatttttttggtaatccaattttaaaaatatatatgaattgtttttccttttgaaaattgtttttatacctcattcataacaaaattaatcttaatctcttttataatgaattgtttttatatttaaaacctatcttagtctcttttaagtatgaaatttcaaattctaaaaagaataatgttgcccattttggttcggtatgcaactttgaaaggttttaaaaatgaattttggttttaaatacatgtgaattaaaattcatatttccaactaatggattctttatgaactaattcatatacattaaaatgggacttaataaatccctacatacaaaaaattttcaaaaataaagttttctattggcactattgacaacccattgcatatttgaatttgtaaattataatatgaccatttagagactccttaaaatttttataatcattccatgatattctaaactcgttgaacttaatttaagaattttgttttagtcaaaactaatttcctaattagaagatataaatcaatcttttagaaggttcaactttcattttgtttttcacacttagtcttattttgcaaaattaaattactaaacgatttctttaaattcattgaatatttttttcttaatctaaacctcctaaatttaatttttgatacataaaatattaagaaataattactaaaaagggagatataatttttcttcttgaacctactgcacctatgctctcctagagctgaaagaagtttacttatttttaaatatatcatgattgtaatattgctttgtaattatttttcattcaaaatagacatgtgaggctagttgtacatatatatatatatatatatgtatttattttattttaggacatctccaagttaagtaaaaaaaatcaattgttgaatactttaacaaaatgccctgttctgaacctactaatatcattattaaataagagctagttgattaatttgatcacttggatgataaactagacatataaaagatattatctaaaaaatttcatgatgaaatttaacttctagatatttgttttagatttattttgtagaatcccctttttgatttttcacaaacaaaaagtgagtcttgtcattgagtgagaacacatatgaaaatatgggatcacaaagtggtgactccacaggggatcttagagggtcaaagcttgaacttaacttaaagtaaatgtgaggtttaattggtcgatttatggataccccttctttgtgcctttgtatgattatgtgattaatgacacattgaagattttttgatgctgtaaatatatatgatagatgcatgttagatgatgttgtttatttatgattgcttctcttgtctattatgtttttcttaacatgattgattgtattcttatcacatgcctattataccttagcatgatggctgatctagttgtatgtcttgttagattatcatgtctttgtttaatttgaatatggtgatggatgatttatacttgtattgcatgattgattgttgcatgacaactcttatcttatatgattgcttgttgtatgttcatgtgggacacacttgtatccccttaactccgattctctaattttggtcgattttgtttcccttgatcttgtattatatacgagacttgttaattcaagtctgcttttgaccaggctagagactaagagtagggttcaataatgggttatattgatgtttgggagcgttatggagatgggcatgttaatgctgataggagttcgatcattgaagacctctatagcataaaactggattgaatggatactcgtgtggccaatttgttccctttactgttttagtcacataggtttttttaatgcacccacattattctaaatgtacacttagattaaccttaaatgttgagaaatataaaatctttacctataggaaactccttgggatgtgagaaaatgcatgtgtggaggtgatgaccatcttacatggaagcacctcgtctcttaggaggcgtgcaaagggttgcgcatcatcggagggtacgatcacctttgctagggatccccttaactcactttcttaattttttttagggccaccttgtccttataggttaaacttagacctttttattaagaattctaaatcctgtatgtgggcgcatctgagggcctttaacagtcactataatcacattagagatccaatacttcctccacttagcgtctttttaggagtaataagagacttgtaagagtttgagttataataatatacttggaaatgtcatgcttggttatggttccttagtgcaatatatgtattccttttgtattgtgccttatccagtctttgtacaccttgtaggaatagtcatccctcccagtctaggttcattgacgtgggttagagtcaatggtagacttgttcgcataagagattagagagatatggactcacagctagttacagttgatcagttttcctcggcaacggtttctatccaagaggttattgtgagcctcaaagagaggatggataggcagtagattcgatagacacctatttaggaggatcctcagtttgacccagtgccaccactacctccctctattagtcaattaggcccatcacctgcaccatttattcttcatagtcagactgaggttgtaccacctcctatcaacatgcctacccttagttcagatgatacccatgctcgcatggataggcttgagcaaaggctgaggcaaatgagagcttcagatggagggattacgtgggatgactttgatggatcgccaatggccagcttattggctaagttcaggatgccaaatattgagagatatatgggcataggttgtccccgtattcatttgggactttacagtactattatgagggctcacgagttggatgaaagccaaatgattaagctcttccttatgtctttgagtggcattacccagaggtggttttgttcattagatgctccgtgtcgtaggacttgggacgacttggcttaggagttcttgagatagtttacctttaacactattattgatatctctaggagggaattggaggctctgagacagaggctaaacgagtcagtgacttcggttatctctcgttggagggagaatatagcattgattattgatcattctttagagagagatcatatttgcatgattatgaggagcttacaacttaggtttgctaagcatttgatgggatttacacatgcagattttagatctttagttcaggctctttatgatgttgaggagggtatttcacaagatggccagagtcttgccctactaatcttaagagaaagaagtcattaggaggtcagtgttcaaatgtgtgtgctatatctacctttaggtcgaggccgcctagatatcaattagtcatttccataaaatttcaaggctcattctctttacataccataccctcaatactaatagaggttgtcgattcctccacaagcttatgatcagacttatctatattccattctctcttagccttaccatgttgctcaggctattgatacacctgttgcatactccaagtcttgagcatctcaaaccccggttacttacgctcttagactatagaggtagttttcctagttggggatgccattgagtcaaccctttaagaagcttgctgatgtcggattattagcaacactagctccacacccaatacctttgtcgattctctcgaactatagattggatcttcattggctacaccatcaaagtctaaggcatgacacaaataggtgcacgactttgacacatgccatacaggatttgataaatcagggttcagtgaacttgggaagccaagtgtcaccacaaacccactaccgactcattccactcatctaataccaccaccgatcagaggtgtccactttattgatcttgatcaagatgactttattcacatgatgagttaggaggatcatgcaccagagcctatagtattagatgtgagatcaaaggttgatggggtcactttgtgtacattgtctatcatactatagaccctcaattttgtcctcctagcacatgtcctattaggcacttgttcgatactttacaacaattccctggaagcagttcaccagtaggtatgaggttggcgaagaagtggggagaggacattttgggtatacttgttctgcttggttcaagaaaccaatgccgaagggaaaagaagaattcacagccacgcattcgccattagaagagaaggggaatatgagtaggggtccaccagacaatgttctttgggttggcacgtttcttttattaagtcaattgaaatagaaagtgccattggaagtttagaaagtgggatctcttttaaggctagaaatacatctccaaaaaggaaataaaaatttcccataggagtgggctgccatataaataagacaaaaggaacagaaaaaaaggatggattttttggggagagatccagacataaagcagagttcttccaacgaggataggcatgggatactttttgggtttttagagagaacacacggaattttggaggagagcgagggactttggacggagatcgggttgtcactttgatcatcaagagagtattttttcagacacaacacaggttagttttcgttttcaatagagcattctctttagtttagattttagttcgttagtttaagtaattttcatggtaaattcttttgaacgtcaattcgtacaatttttttcatttcattttttttatttttcttaaattagatgtctttttttttttttgtgattgcaattcattagttccatgctagttcatcttaatttatatgatagtttaattaaagtttgtgtttttaattccaattagtttaattttaatttgtttttagtttaaatgcatttgttaatcttaattctttagtttaaataatcatattgaataaagtttgtgtttttaattccaattagtttcattttaatttgtttttagtttaaatgcatttgttaatcttaattttctagtttaaataatcatattgaataaagtttgtgtttttaattccaattagtttaattttaatttgtttttagtttaaatgcatttgttaatcttaattccctagtttaaataatcatattgaataaagtttgtgtttttaattccaattagtttgattttaatttgtttttagtctaaatgcatttgttaatcttaatcttttagtttaaataatcatattgaataaattttgtgtttttaattccaattagtttgattttaatttatttttagtttaaatgcattagttgattttaattctttagtttaaataatcacatgaaataaagtttgtgtttttaattcaaattggtttgatcttaatttattttataattggaacgagttcatgattttaattcaattgtttgattaaccctgttagataaattccatgtttttaatttcgactttagtttagttttaatttgctgatttatttatttgttttagtttaaatgtatttgtatgttcaatttgataatatagccaatcttttagacgctgatgtttttaattctaatttaatctagtattaattattttttagtttgaatgtgtttgtgcattttttattttaatccatttatatccaatttcgtagttgattataattttagttaattaatttagttaatcatgtattattgttttcattttccaagtatgacaattttaattttaatatatcaatattcaattttagtgtttttagagttttagttaattaatctagtcaatcacatgttattattttcatattttgagtatggcacatttcgggttttgatctattaatatttagtttgagtttttaggagtttttggatagtcaatctagttaattgcatgttattgttttcatatttttaagattgctaaactttggtttttgatttatcatatttcgttagaatgttaatttatttttattgatcccatgttattatctctataggtttagtttgttggttttaatccttgattggtctgtatcttaattcatgtgcttctcaaaatcaatatgttagtcttgaataatattttgatagcttgcttgatttagaagtcattagtttgatgccttagtgattgttggttagacccctttttttttgtaaggccactggaaactcatgaaagttggccttgttctcaccactttagtttgctcggattgtccaaaatttcactttgtgaattcgttttcttatattttgctcggtattttattttttatgttttgttattttcacattaattccctttattttaaaatcaaatgtttttctcaaaagatacctttgaaaattttatttttttaaaaatcatttaaagtctttagaatcaaaatctttttttttcctaaaaataatatgcaaccatatcttgatcggttcacatccttctcaattcttaatgaaaattttggttttgaacaaaacacgaatcaaagcttatggtcccaaataaatgggacaattctaggataaattcgtgtatatcgattggggaattggtgaaacccccacataagaaaatcttttcaaaacttatttttgctaccacccttgctatttattgtaatcatatttacatttttctttttttttaggaattatataatacttgattatttcgtatactctgatcgttttgctatgctaattagatatgcatgttaggatttcttattttattatttattacctaaccccccatgtcctaaggaagcgtattatgagttatcaatgctatccaggtacgccccttatctcctaccttctaaattctgtaaatatgattatcattatgaactatgcctatgtttgatagtacttgggtgtcttgatatttgttacattgttcgattatttatgataaagtgcatattgggtgatatactatttaaactaacctttgatgttttgtgataatgtttgagaagtggtccaggtacgcaccctaaatctcctttatgatttgtgattaactttcttgtaaggcatgctatttttttgaaatcacacaacctacttaagtatttataattaaccaattaattgccacatttcctacaacttagttaatagagacctttatatggcttagaggagtgctacttcctagagataccttcctaataagtaacctgatcctcgaacccagactcgggtttttcaaagatatgctttctccaaaaattatgaagtcactttttaaggttttctttcttattttattttccctttaaaataaaaataaaataagtggcgactccaactttaaaaaaaaaaattcactaaataaaagcgagtcttgccgattgagtggggacacatgtgagaaatgtgggtccacacataccttttagtttgatcccaaatagacctccattccaatttatcccagttcatgacttagttgttggccacgatgctatggttttctttgttttgatgccttaggatactaatgagattattgatctagatgtccatatagtcacttgtggtgagagagtgactcaacctccattagaagagactagaccatttaagggcataggatctagagatgtcgtgatataagagcatgatgagatgatgaggtagttatagagtacacagactcgcatctctatctagagtttgctagcttcttctactactcatagagatgcattgattagggctctaagtcagaccagagttgagtttgttatatctctaaacagtttgattcacatgttgattattgatagagctatatgcattgtatcattgtattctctgttaatgacctacccttggaggcctagatcataccctacctttatatatcattattggtttctcagggcaccgagttccatctgtcctattggacaatggcttcaccctaaatgtgtgtcttttggctactactgtggcacttgggtttggcttgtcaaattttgagctatctacgcagtctgttagagcttatgatagcacacagacggaggtccttaacacattgacacttgagctacagattggtccaattgtattcttcacaatatttcaggttttgaggatacctacatcctttaacttgttattgggcaaaccctggattcatcgagctagcaccataccatcttcccttcatcagaaggtgaagttcatacatgaggacagagtcattaccatatagtctaatggagatatttcttcattctttgagccagttttataaatcaaccatagtgaggatgacttattttttactagtttcacatttgatgaggttcatattgtgactattaagaagtctcacaaagatcatgtacctttgccttttgattgccatagtggcaccattgttttgagtatgatgagagacatgttttatcttcctggtttgggattgggataacaacaacatggcatcagtgagtttataactactatgagtcatgatacacccttcggtttaggatatacacctatagaggcagactatcaatacatagcatatctacacagacagaggcttagagcccggttacttcacataccatttgattacccactccaatcatgcatgatggctatgacatattattttgtgagcgcttttaagatgactttgacattggagggtattattggtaaatctgatggtgatcaacaaattaaggaactttttcagtagttttagttgacggatatatttcctagtactttcacctcagtaatggtggctcatccatctctagatcatgccaacatgatgtcactttgttttcataaggagataggtcgccaggagccattacttcaatatctagacatatctgatgaagttgacttaccaaatgactaccaggatgagatagccatgatgagtttgagctagacatttgataccattcaactcgattcttctactccaactaccacatccaaggcctctaccatcgagatcttcaacattgtccagactagacccattttagatttatttgatgttgatgtttctcttatagatgatatacttgagggcactattagcccaatggtggtagtgtccgactttgtggacttagtccattcttttgatgtatttttcgggttttgtttcatgtgttgatgaagtatttactgatttttcatatatggacataagcattttttaatatttgactacttctcatgaggatgttaccgtacatgcactttgctcatttacatcctatgtatgtgatctagatgatgagtccataccacatgatttaaatgagggctctattttagctattgattccattcccatagattagagggttcacctactataggagacactaagttgattttggcacaccagatcagcccagagaattgaagattggattgagtttgtccacatatgagagaaattgacttgtgcagctacttaggacatacttagatgtctttgcatggtcttaaggacatgccttctattgttcaacaacgattacaacttttgccacatgttagaccagttaagcagaagttgaggcgattacactctcagtggagtctgaaggtaaaaggagatccaaaagcagttcagtgttggatttatattagtagtagagtatcctgagtggttgaccaatgtcatcctcgttcctaagaaggacaacaaagtcagagtttgtgtgaactttagagatctcaacaaggacaacgctaagaatgaatttcccttatctcacattcatatgttggtcaataacacagttagtcattcattgttatccttcatggatgggttttcagggtataaccagatcttgatggctctagaggacatggagaagaccgttttcatcattgagtggggcgtgtattgttatagggtgatgtcatttgggttgaagaacgtaggggctacatatcaaagaatggaaaccacttttttccatgacatgagcaccaggatattcaggtttatatagatgacatgatagtgaaatcataggatagagcagatcatttagtagccttagagagattctttgagaggatcagacaattcagattgagactaaatcccaagaaatgcacctttggagtgacttctaggaaattattgggatatatggttagtgagagaggcataaaggcagactcgaagaaaattagagccattttttagatgcctacattgaggaccgaaaaagagattgggagatttcttggcatgctacaatgcattagtagattcatagttagattgacaaacatatgtgagtccatcttccgactcttaaggaagaaccaccttactatttgggatgatcattgtcagtgtgcctttgagaggattagagagtatttgttatcctctccaatttttgaaccccctactctaggtcgaccttccttttgtatttgtctgtcttagagatagctttgggatgcatattaactcagctcgatgatctagtcaaagagcgagccatttattatttgagtaagaggatgctagagtatgagatgagatacattttgatggagcgcttctgcttggcattggtatgggctaccatgagactgagacattacatgacatagtatttaacacacttgatatctcgattggatcacttgagatatttttttgataggcttgctttacctagtagattgatgagatggctagtactcatgactgagtttgatattcaatatgttactcaaaagtctatcaaagggagtgtttttgcaggtcacctggcttcattactagtttcagatagtggagttatagatgatgatttccttgatgaagggattgttattgtgactagactaccaggttggggtatgtactttaatggtgcagccaacccttttggataggggataagagtattttttatatccccttatggtgatcatattccgagatctgttgttttgacattcccaaatcaatatcctaccatgaacaatatagtcaagtacaaggcttgcatattaggattggagacagctttagagttgggtattagacaaatagaaatatatagggactccaacttggtactgagacaaatttagggcacctagaagactagggatgtgaagctcagacattatcatgcttacttagagctactggtcaggaggttcaaggatttaagatacacccatatgccaagagcgcaaaactagtttgttgatgccttaactaccctaacttctatgattgacattcttatttatgttgttatttgtccattggtgatagagtcgaggattgtgccagcatattgttatttgattgatgatgtagagattcatgatgactttacttggtattatgacatttatcagtttctcatattcgacacataccctaaggtagccacaactaaggataagagagctttgagacagtagaccactagatttgtgatatgtgatgagacattgtacagacgattagctaatggcatgttactattatgtctagaccgtacctctatcgataaagtgatgagaggttcatgtgagagtttgtggacgacacatgggaggacatataagatcatgaggactagatacttttggttgaccatgaagacagattgctaccaattcattcagagatgtctagggcgtcagatgcacagtgatcttatttacactccacctttaaagttacatgcattgacctaatcgtgacatgtagaccctctattttgttctactagcacatgtcctattacatgtttgtttgatactttataataattctctggtgacccattaggcaccaccttaggcccactttggcaccctaggcgcatttagatgcacttggcccattaggtacactcctaggtcacttgacacatttctaatcaccctacatcactattgtcccaccggcagctgcgacgactcccctttttggacggcatgggcagcgtacatttggccacctttgtcaggaccaccctagctccggggtaggttttttatgatgtgaaccttgtcggcgatggcatttcgccacccccaccgcaccatgcagtagccacatttttttttgtttatttcttcttttaatgttaaagtttatttatttatttatctattttatttatttattttttatttatttctcaaataactctttaaaattccatttttttcaaatactattctcaaatagttttccaaagtttccaagattccaaaatttcaatttaattttttaagataccatttccaagtaatttccaaaattccataagggtttatctatgttttcaatttaatatatttttttttacataagcgtttatctatgttttcaattttgaagttctctttccaagtccagcaacaaaagtagtgtccaaccttaaaatgggcatgtgtggtattgacgggagatgataagatggaaatcataaccatagtcatgttctttctgtgtctttctatcctcttcaattaattcatgagcatagatattttatttagtttttacatttagtttatttatagtttatttagtttctaaaatccaattagctagatattttatttgattttgtttttatatttaagtagttgagttttggaaattttttatattttgttaatagaaatggatatgaggacttaaagggtttatatttaggtagtgcttgagccaaggaaaatgatagtccactatcttgaccctatgcatcacaaaccatgtgaggacttaaaggatatcgtaaacatgtaagttcttcctattatttttcataatattatttttaaataaaaaaatacattcacctcaaacacatttttttattatttatatatattaaaacatataacatttacctattttaaaaatgtacccattgaacttatttacatagggctcttcaaatacctgcaaagaaaacatctaagagggagccatcttagcaactagtgcaggtgacatccaaaaatttttctttacacattagcttatgcatttgcaccatttatatatgtgagtactaatgttattttataattgatcgattagtgtccaagacaagaaggagggttcgaatgtggctactttgttatgagattcattaaagagataattttttatcctacaattattgcttcaaaggtattacttatttaatgaatggtacatagttttagacttccaaatgttatgtattttaatgttattttcttatttgatttcagtttggtgataaaaaaaacatattctcaagtagaattcgatgaaattagaggagaatgggctacttttgtgctacaactaatcatgaatcatgttgatgcatcatgatcaccatgcatggtgagtcccttagctactacttgaatttttccataggtattgtatagtaatgcttattctttgaataatgtttctatttgaaaaaaaaaaattagttcttaggtttgttcatttatgataacatagatccatgtttattttcttcaataaaaatctctaaaactcattaaattttgaaatgcaggtacacactcttgggagggtgaaatggagaataaaagaaaagaaaaaggcaacaagattttgggtttttaaatgcaactcttatgtcatacattgtaggacataaacgttactttaattgcaattaagaaatttagatttttagatgggacttctatgtcattttatggttagccggttttatgcttatgaaatggaggtatacatgaatcttgggatctttaacatttctaaatcatgttttggtatgtattcactcttcttttttagttttgatgggtttgatatgttggacgtactatccttttgtgaacatttgatatacaaatattattagatgatcaatgtattatgagttattcccaaaacattacagaaaaaagaattaaatataatataattgttatatttatagacaaaatataaacaggttaatcttaataattcataagcattacaaaaatcaacaactaaaaccaatcatatcttccacaacaatttacaatgatgtgataccataactcaaaggtgatacatttaatgtgacatcataactcaaagatgatgtatttaatgtgacaccctatcatcactagaaatatatggtgtcacttccgaatgggtcaccatttatctactttggtgtcacttccaaatacgtcaccaattggtaccctctatggtgtcagtggagaaggtgacgatatgttgtagtgacaccctatgtttatggtgactcgttataaatgtcaccatatacctttttccttgtagtggtatttggcttgattttgatttttgattgcttaagatgaattttttattttcttgtgttttagttcaatatttagattattaattatatgcatttgatatttatttatttatttttcttattttatttatttattcatctacttatttattttaagaaaattgcatgtgattagtgatcttatcttattattattattattatagcaagaattaattcttagatttttctcatatatgcctgtattgatattttctatttttcttttccaaattggcatgatttatttattttttattataaggtttttattttgtagctcttatttatttatttatttattgtatgggagtttgagaaatctcaaaaatgcaacaagaaggttgtcaagttaagaagtgtagggagggaactgaaccaaagaaccgaggctgcaccataggaaatcaaagaggccgcatggaaaagtggagctgtggaaacaatgaatgggaaaaataatacgtgggaaaaaggagtttcaaagaaaaaggggaaggctggggtttttcgagaggggctatggaaaatggagcagtgtggggaattttaaaagggaagaaagaaaatcaaaaggccaaggaagtctggaagaagtgagaaaggttttcagggagaggattcagatttgaagaggagaaaaacaagaagagagagaattcagatttgaagaaaagaaaaatagagtaaggagtggcagaaaactggtttttgaaaaaggaacagaaaaagaaggaaaaccgagcaaggggttgagagaaaagcaaaggagaggggctgtgggaaaagggagtcttgtgggaagtcttaaaagaagaagaaaaagagaaagactacaggagtctagaggaagggttttcagagaggtttggaaaaaaaaaagtctgcagaaagtggagagagaaattacagagaaggaggggagagagagagcaggagagtaggaacaaaaatgcattattgggttcgagcatctccctttgatttttcttgggactcttcctcaacctctaaacgaccacgctgctgtacatatcgaaaaatctaagatcgtcgtgtttggtggcctcgtcgacaagagatttatcaacaacctttgtgtatatgatattgagaataagtagtggttccaaccagagagcactgggaatggatctgttaggcaagtgggtcccagcccacgagcatttcacattgctattgcaattgattgtctttggtgggcgttctggtagcaaaaggttgggtgacttttgggtcctagatactcatatatggcaatggtcacatatatggcaagtgggtcccagcgcaccatgcagtagccacattcttttttgcttatttcttcttttaatgttaaagtttatttatttatttatcaaataactctttaaaattccatttttctcaaatactattctcaaatagtttcccaaagtttccaagattccaaaaatttcaatttaattttttaagataccatttccaattaatgtccaaaattcaaatattttttttaaatatcatcttcaaataaatttttgaaaatccgaaaatttcaatttttaaaatactatcttcaaataaattttccaaaattccaaaattcaatttttttttttaaaaaaataccttcttcaaataaattttccaaaattccatgtaacaaagttctataatcgcttcaatccatgttttaaaacttgtatttctttctaatattgaagcaaactttttctttatttcttataaatttcatttggaagtgatttaaaaataaataaataaaagctcttctaaatattaaaaagtaacaccttttttataaaaattaattaggtggatagtaaggtcaaattcgggatagcttcatatttttttcttttactgaaaattgaaatcaaaattaaagtaataatttttaaggggcgggtaatattgatattgcaaaagttttattaaacataaaagaacttatataaacaaaaatagaattataaaattcttataagaaataacatttttatgactctacatgaaacctttttttaagttataagttttaaaaaatatatttaaataggtacaaaaacttttatttaactcttaaaagctaatccaaataatatatatatatatatatatatatatatatatatttgaaaatcacttttaaaaatgaaaaaaaaaatcacttaaaaataatttccaaaactttttttaacttacatttaaaaaatcaaaaataaaaaatgatttgtttttactagttatttaaatttcacgaagcgggaaagtatgtactctgatgtaaaaaaaaaaatgagggttgaaaagtaattaaatcactaaaaaatagacttggagttcctctagtgtgcggttagactcaatttgtccccatggaatggaaatggacgatattttattttttatttctttttcttttcctttctgttagtgtagtcttgtgatattgttactaaaataggaggtaaaaatataaattatatatcaattattttaaatttagaaaaaagtgcttattttaatttggaataaataaatagaaaaaaaaactgattttatctcaattgtgtaagacttcaaaaagtttttttcttatttgcaaaatattttgagttgtaaaagtaaaaattaaataaatcatttcatgacctttttcacaagtatccatttagatcatagtctaattttaaaatatttgaataatccaattaatctaaaatatatcatttataatttttaattattactatgatacctaaccttgtatggaattggaataaaatatggataagtaaaaaatgtcaaatgaaagataatttcaaacttttctaatacaacatgatattttataatgttgaataaaattggaatgggcaaaagttgtcaaatcaagacttccatggcaaactccaccattgcatatctcaaagattattctacaacattatctttgtagacttttaacaatccaagaaattgacaaattatataataatccaaacacagtattctacaactttacaatattctacaatttttttgaacaaaaaataaataatgaaatttgaataatgaaaacaatcaatgaaatctttggcatgttaattcttcgcagcttcaacatggtggcatgtcggatggcggaggtagcatttgagcttccgagtgtttaccatttttcactatgaacgcagtttccatgccccaagtttgatggcgttctacatggcagtgcatgaaccacactcctgcaatagagaaaatataccaacattacacctaacttattgcaatattaagaaaaattatttccttggtatgcaggttggcaatttcaagggttttttaaaaaaaaattcacatgagtgcttgcaacataccagggttggatgcctcgaatctgattgcagcccaacctttcgtaggaacagagatggtactctgaaggggaggatccaccagattgtagcgcaatgggtccttatttttatcgaaattcccaaatccccatccaacaacatagaaactgtatccatggagatgcattgggtggtgtgtccccgcaatcaagtttgtcccttgaaaaacaatctccactgtggagttatactcaagcacccttacttctgttccgtttttcggcgtctgatactctaagggaataatatcagtggtaaaatcgaacaccagttctggaacactaggaaatttatctccatatacaccactaatgttataatagtaagcttgtagtatgtcaattgtagggaattggaagcttatgttgtttatacttgcagagaaccgcgtcccattgggccctgcacatgaattattggggcataggtacgagttcataccaacagtgtaaatcagtttagtgctcgggctcaatgggacattgcaaggatgttccgcaactgctaagcttcggaggccggccatgacctgaaccgatgcatttgtgtcattgtatgtaggcaaataaggcaaggagagaggtgaagatggagtgtagtatcctctgtactgtacaatagctgtggtggttgtgttgtcaaaaaaattacgagctgccggggcaatggaataagttttagctgccatgtaatagtgatccgggtgttggttagcttctagtaagacatcgtaggtttggccaggatatattgtgatataatctcgtgtcaatggttttgtgtagctaccatctgttccaaccactgtcattttatgcttggcaatggagaagaagagagcctcgtgcaaggcagcattgattatgcgaagtagataggtctttccatgatccaccgttagcttgaatgtgcctgcaattaaaaagggaaatttttatacttatgactagtgaaaagaaaaagaaaaatttccatgaggatccaccaattatgaagtgattaagggtgtaaatttggctccatagttcaaaattatattcggactagccttttcttatgtgttaaatcatggctctaccatccttataggtatattcctcttttttagcattaagctttaaatatgttgatgttaataagaaaaagtaatatggtcaacatacaagaaaatgaaatcgtgtataattttaaaatgggaagttaaacttaatttgtacctgattttgagcatggaaaaagatcaccaggttgtccatttatcaataaagaatcagaggcattggggtcagctccagttgcaagcgcttcatctcgaaccgcattcacatcactcttccaccattgtcctgcatttcaacaagtccaataatttagatttcgctttgttggttaattcatgatatgtaaattaacctttaaaagtaactacacttatacctaatatgatgggaatttctgcattaggtttgggaaaaggatacttggttccattcttaggataaacgattatagctccatgaacggtggctcgggtccaatcactgtgagcatgccaccatagagtgccttcctcggaggaaaggatgatcttttggctaaactttgaccctggttgaattgggcattgtgtgatatactcgggaccatctgtccatggatatctaggcatgttcaccccatgcctgcaaaacaataactatacgttaaaactagcactaatttttggactaacaaaagatggcatgtagcagcatattatcatagtaataagaggcatcaactgtatttcaatggaactgatgcaaataaccctaaaatattattttaaatttgactttatttgcaaagcaatacattgtagcccccacttagaaataaaagaatgtatgccatgcaggcatgctgccaaccactatctttctttgagacatgcatgggacctaccagtgaatggtgatattttcttttcccctgttataaacgtcaacaatgatcgtctctcctttcttagcatatatagttggtcctggaaattgtccatttactgttaagatgttcttggtgctacaaagccttgtatatgaagcttccttcacctgcaaccaattaaaagttaaccatgtaacctcatcccaaacgaaatattacatgtatgaatagttgcatcgatccattcacgcaagagtataaccaattagaaattgatagcatgcatgagcgactcaacaacaccagggtacccgaagactccatgaggatcatacggtggaaaatgagagccatactgctccctaaatattatgatcagaagttggcattaaggctagaatcatatatagtatttaccacaaaagtaagccgacgagttgaagcttggcaatggatgccaccaccaaaaagtagaaatgctaaaatttgcaagaggaaaaccttcatgatcagccacatcttctttggaataaaagcctcttctcttgtcctaaacacaactccttcaattttcttactatttctaataagcacgacttatcttctctctgacatgaatagatgaattcttaaaggtatttatagaggctggctggagagaaccaaaactagaattggtgaaacctgaacagctggtttctctcgaaatgaaagatgattttcctggggtacaacaattcctcgccgcgtatctgaatgtgtattggttttgaatgttcttccaggaccacttcaaaaagcaggttgtgtatgatatctgatcacttaccaaaatttaaataaaccaaatgcctgaagacgagtttcttagaatctcttgaattttctaattcaaaatacaagtttgactttgagaattgaccaagaaattaatcaaacacattattttagaataaatttcaaatacgtgtagaatacttttaaaactttgacctcgcatatatacagtacctttatcaagattagtcaagattttctctttgtatttggtaggaaggaaa

SEQ ID NO: 11990 - DNA, 16757 bp, Vitis vinifera
  Intron number 18 from transcript GSVIVT01027314001 (locus GSVIVG01027314001) derived from phytozome v7.0 (chr-ID chr 13; pos 16799564 to 16816320)
aggaactattgtcaagcaggaaacagatattacaggtaaacatatttcagtaagtgcccatttattatctgcttcattgagaaaaaatgtctaattatggaggccacaccagttatgttttgctcatgctagtgtccattctctctttgtgattctgatattggctacctgtgtggcatttgttgtgctgggctgaaaagattgagctaccatttctgacatatggtgtttgcatatcccatcaacacaagcatgtgttctttttggatgattgacgtgcacatcaaccaactgtgctcaatatcttgaatggcggctgttgtgacaattgttgatttgaatctcaagaaatgttctgaatcaatactcctgtttatctatcaatgaacttaaatggaaatatttttgcatatgtagcttctttctgttgttacattctcatcttctttatttgtatatgtcctaaattcatattcttctatgaatccttccaaaactataatctgattcctatgtttttttctcttcccattttccgttttaaaatatttggctaagttgttagttgaagagttgcacaactcagtgcactatttttcagcatcatttttgttttgtgggaatttacatcatgtaaattttcttttattaatttcttcaactgctgttagcttagggctttttgtggcatttctgtttctttactttgctttttgcgggtgatccttctatgccccttgtgtattaagttccctctcttcgggtgccttttaatatattttcataacttgtaataataataataatgtttggctggtacaaaatgctatacttttttttttcttttttctgttatagatgcaaattttccatccttagatgcatatgggtcagaccaaaaattacgaaacggtagcaccatatgatttactgggcaaactattaggataaagcccttgaaagcatgacatgatgtaataaaataagaattcattaatttatttgttatgatttttggtctcccttttatcattgattgcattaattaattgtctgagcattcatgcttatatcacttgcattgtacatgatttaggtgcattaggagttgcacagaagatctaagtcatggattccttgtaagatgataagttgtttgcaatcagttcataggattaagtaatccatttgagactatagtgcactacctcctaattgaagggatgatttatcttagtcatcggggttgttgtccaatggtgagtgcattagtgtgtatgatgatatattgaacatgatctatggtgaaccataacattgactatcgagtgatcatgattcaacgagttattatattgcataagatctcaaccttaaacagaaattgagttaatattgagatcttcattgactttgacctataagtgagatcctaaggtggtaatatatttgctatgggttgagttattgttatttaaaacaggtgacaacaagtattcttaagatagacactaggatatctcatgggattgggataatgcgtgctcttaggtgatcctaaggacttgtgattatttaaattgcagtcaatgtaattcttttagtggaatttgatgtatgttttttataagttagagtatgtcagttgattgtataatagggggatttatgactcaaggattgtagaggtaatcttaagaggttaataacatctaacccattggattcaaacaccagttcatgaggagtctcaatatagtggatagtaggtcacagacctaagaaatgggttaaattggatttaatcaatttatatctcaatgtactttcataggatattggagtgcaaatgactctctttagtagagtgttgagttaacttcaaaattggattctaagggagctagtctataagtcctagtggtgtccgcttgagcttagattctttgttggcaaagtcttgaggttttatgaagaatcaatcatttatgtgcattagggtgttttggttaaaaatggaaggttgcataggattttatgattaattatttttgtcttttagggattggattaattaattaattggagtctcattgggacagttaattaattaggacctagtgaacttaattaagtgaccccatccttacataagcttaagtcacttaagccaacaagaaggtttatataaacccttgagtttagggttagacacacatgacattccaaactattgtcttcaagatagcctccatctctctctctctctctctctctctcaagaggattgtatagccaatctacacaattgtcaaggtctgaagaacgagtgatcaggtgggagattgttgtggtagttgagagcatcttctttaattggattttaatctagaaacatctagatcttaggtaattttttaagccttagatcaaaagttttggtatttatttcactgcaaattacaccttgtatccctaaattactagagagcatgcacctatgatccaggggtattccaacacaaagattgcctaatattttacccaactttttagacttgagtctaatctcattattcctgttgggttttttttttttttttgataggtaaagaaaattcatcaagagccaaaaggctaaaggaagggtatacacagggtataccaaatacaaagaagcaaaatacaaatgaacaaacaagcttgacccttacttggtggctagccagtcaatgaaatctatcaaagacaaagtgtgttcctctatgtataccctaacccaattcacaaaagtgtacaaaaaaatggatttaatatcttgatcgttcctctcaatatcatcgaaagcccttctattcctttctttccaaatggtccacattaggcagaggggggcagctctccaagctttctcccttttcttgcccacaaaagaaccatgccaacccaggaggtttcttttcacagaggagtgcatcacccattgcaccccaaaaagggagaagatcagaagccataacattttggctttctcgcaaaacataagaaggtgatctgtggtttcctcatcttgtttacacaaaaaacatctgttgggaatgctccaaccaaatctcttcaggcggtcagtggtgagtagcctgttccaagccgcctcccacccaaagaagctagccctaattggaacccaaggcgtccaaatagttctagccgggaaggggggcttggtgtcccttgaaagtgaactataaaaagacttgatagaaaaggtcccattcttgttctctttctaccggaacaagtcctccacacctcttctaatggtcaaaggatgaagcttacgtaataagctttctacttctcccacctcccaatcattaaggtgcctattaaaacgaagtccccagctccccccaactttgtcttcctcccaagcctcagtgacccagccttctttgttgacggaaagattaaacaagatggggaaagcttcttccagagcttgatttccacaccacaagtccttccaaaatttcactctagtgccatcccctataatgaagcgggaatgagaacgaaagttctcccaaccatttctgatagccttccaaacccccaccccataacggtcacttactcctttggagcaccatcccccctcttgaaggtcatacttactagagataatttgcttccaaaggggctcattctcattagctaatctccacaaccacttcccaagaagggccttgttaaaagtagatagactgcgaatgcccaggcctccttcctttttagtagcacaaatagccttccaactcaccaagtggggtttattctctaaggcaccactgccccataagaaatccctttggatcctttcaagtcttgcgcacaccttcttggggatcacaaagagagaaaggaaataggttgggaggctagagagagtgctttttagcaaggtaagacgaccacctttggagaggtattgccttttccagagagacaaccttttcctgaatctttcttccactgcatcccacaccctagtagatttgtatggggctccaaggggaagacccaagtaggaggtaggtaaactccctatcttacatcccaagaccgacgcaagagtctccataggaatgccttcccccactgggatggcctccgttttgcttagattgacttttaatcctgaaatcgcctcaaaccacatgaaggtccagctaagatattgcaattgatctgcttcggcgtcacagaagattaaggtgtcgtcggcaaacaagagatgggacacgagcagcccctctcttcctctacctcccactctgaaaccagaaataaagcccccatttcttgcacaagacagcaattggctaagggcttccatggcaaaaaggaatagatagggggatagagggtcgccctgtctcaatcccctagagctacgaaagaagcccgaggggcttccattaatgaggattgagaaggtagtcgtagagcagcaccaattcatccacttaatccatctatgcccaaatcccatcttagacatcacatccatgagaaagtcccacttgacatggtcaaaagccttctcaatgtccatcttgagaaggatgcccgggttgttgcctttcaatctagaatcaagggcttcattagcgataagaacagcatccaaaatctgtctcccatgaacgaaagcatgctgagaatcagaaatcacttcccccatcatcgatttcaatctattggcaaggactttggcaagcaatttgtacacactccctactaggctgattggtctgaaatctcttaggtcttcggtcccctccttcttaggaatgagcaagaggaacgtggagtttaagcttctttggaaagtcccatggaggtagaactctctaaagagacccaaaatctctggtttaacaacgtcccaacaaaacaaccagaaagccattgtgaaaccatccgggcctggggctttgtcaccacagaagctgcttagtgctgcaaaaatttcttcctctgaaaacataacttctaggctgctggccaagccttctcccagctccttgaagttaaggccattaatactaggcctccaatccccagaatctgagagcaaggactggtaggccctacaaacaccttcttttatatcttccaaggaagagagattcacaccattcactttaatcttagacaggaagttccttcttgccttagcattggccattttgtggaaatatttggtatttttatcgcctcctgttgggttttgtcaagaccatccccatttttttttaatgctattatatatctaaccagctaacgagcagaacttgaagataacttgttgctaagaagctttaaagcctttgaaaacagttgcaatgcaatctatggtctaagaactttctagtagattcaagaaattatttgcaaataggtgggtgatatgttcaaaacgtttaacttattgttattatcttgtaattttgcacatgtttatttattaacaataataccacaataagtacacaagcttgtaagtatattaaaaaaatcaaatctggttttctgacacataaaccctagtctgaacaaaattgggattaggctgagtagtttttggtctaggtccatgaaaatctatcagaagtcatctaaggttgtttagaggtgaggtgggtctggtttgtttacactaagttgtatccctagcattgaatttgaatcagtcccttggattttacctatttttgtgcttgaacttgacccaaatttttttattcccacaataagaagtagcacaacctatccaaatataagatggcgtagtcccttctaaatttattttttggtgattcaaccatgtgctctctaaccatacagccataattatcctgcaagcttgaagacagtggttttgtttgtttaataggcttttgagttgggttaatcaaataacttgaatgccctattttacccaatgagatgtgttagggaatgccataatgtatttgggaggctctaatgatgttattagtttgagttaggttcataatggacggaggtctaattgaatttgttaggttaactttttcaaataatttttacatgtacatatcaacataggcacataaaaaccattttcaattagaagaataaggaacatatccaattcagctactacttggatgagattggtgtccatttaattgagctatggtcagggttagggtaaattccataaatttttgaaacctaagttgtatttgggtcaggttaaggatcggttgatgttgaccattttgtgttttgagaatttcgcccttgtgatctaatttcttggctaggatatctttatttatagaagagaattagtcaattaaacaaataaggaaaaaagcttaattaaaaaatatttcccaattagaaaattttcatacatattttctaaccccccctaagtcggtgaaaaaatattcttcattcctaacttgcttgtgatgtcttagaatgaacatgttgtatgtctcttggtcattatatcatccaattggtccttaatttcaaactcacagaagaacgtgacattaaagatggtatggttcaggttttccattctcttttgtcagaaacagatgagtggaggcccagatgcaatgggttgtaggttggggtcctggaaggggaagatgcagcaatcctagaggctcccttctctgaggaaaaggtttttggtgctctctcggacctcaatggagataaagctcctggttctgatggtttctcaatggcgttttggcaattcagctggagttttctgaaggaggaagttatggggttcttgaaggattttcgtgatcggggtaggttcgtcaagagcattaatgcttcttttctagttttaattcctaagaaaggaggaactgaagatctcaaggactttaggcctataagcttggtgggtagtctttacaagttgttagcaaaggttctagctaataggcttaaaaaggtgatgggtaagatagtgtccaagtcccaaaatgcatttgtggagggaaggcaaatcctagatgcctcgttgattgcgaatgaggtgattgatttgatgcaaaaaagtgggggtggtgacatcctttgtaagttggatattgagaaggcatacgaccatgtaaattggagttttcttctttggttgctggaaaggatgggttttggagctaagtggattagctagattcagtggtgtattggtattgtcaatttctctgtccttattaatggaacttcctccggattcttccaaagttctcggggattgagacaaggggttcctttatccccttatcttttcgtgattgtcatggaggctctcagttgcttgttgaagagagcaaaggagggagggtttttgccgaggtggcaactcagtggtagaggacgtgcgggagtggagatcactcatttgctgttcgcagatgacacttaaatattctgtgagccttccattgctaaggtgtcctatttgagttggcttcttatgtggttcgaagccatgtcagggttgaaggtgaatttggacaaaagtgagatcatctcggtggggagagtggagaatgtagagggtttgactcttaagtttggttgcaaggttagcaagttcccgtcttcttacttgggtcttcctttgggtgctcgtttcaaggaggtggcagtttgggacgaggttgaggaaaggctgaggaagagactttcctttgggaaaaaggtagtatatctccaaagggggcagactgactttgatctggagcactttgtccagtatgcctatctactgtatgtccctgttttatatgccaaggagtgtgagtttgagattggagcggatccaaagggactttctttggggtggtggggccttagagaggaagccccatttagtggattggtctattatttgctcagataaacgaaagggtggtttgggtgtgaggaatttggcgttgctgaataaggcctcttatgtaagtggagttggcgttttgcggtggagagggaaactttgtgaaggcaagttatttgtgcgaagtaaggggaagaagagggcggttggaggtcctatgttgtgagaggtagttttggggtcggtttgtgaaaagcgattaggagagtttgggatgtgatagacgacaatttggtttattctatggggaatagtaggagggttagattttggaaggacaagtgaggtggagatgatcctttgtgtacttcttttccctctttatttgctatatccttggctaaggaggcttgggtggaagatgcgtggagccattctggtgggggagtgtgggctcttaggttctctaggcggcttaatgattgggaagtgttcgatgtggagtgttttctcttaaggctgcaagggagaagggtttgtagtgatgtggaagatcaagtagtttggacaaaggcaaaggacagaagattttctattaaatctctatataaggctttggaatcggaaagacttggggattttccttcaagagttatttggaactctttggtgcctccgagggtgagtttttttgcttgggaggctatgtggaaaaaggccttaaccttggatcgtattcagaggagagggttctctttggcttctctttggctaatagatgttatttgtgcctgtcagaggaatagtctattgatcacatcctcttgcattgtgtggtggcaagaagtttatggagcttacttttttccctctttagggtttcgtgggcgctccctttttcagttagagaggcgttattggggtggcttgggccttgtgtgggaaaagggaggaagaaagtgtggttttcagctcgcttgcgccttttttagattgtttggaaggaaagaaacagtagggcttttgaaaacgaggagcattcgattcatgggtgtaaattgtttttcctttgtaatctttgggtgtggactaaggggttttttggctctggcctccttttcgttgtagattttttagattggttaagccttgtttaaggggttcttttttctctctattgtatactacctgtatactttgggcgcgtccttgatgtgcctttttttcttttaatatattgctttttattcataaaaaaagaaagttatcttttgtgccacctccaaattatcttttgttaccacgattttgtcaacatatactatgagagttgttatctttccctcttttgaaaagagtttgatctccttggctttgattatagcctattttttcattgctttagcatatctcccaaaccaggcttgagatgattgtttgagaccatatagagccttgtttggtttacaaactttattcctaaggaaatcttcctttccatatagacctcttcctctaaatttcaatgtaggaaagcattctttatatcaaattcctgcaaggactgatcaaaattagtagctagggataacaaaatatgaataacattcatctttgccattggagcaaaaatttctagtaatctattgcatgagtctatgtgtaacacttcgctaccattctcaccttatctctctcctatgttccctatactctatgcttggtggtgaatgctgatttacactccacctctctcttgccctttaaaagatcaacaacctaccaagtcttatttttctttaaagaactcatttcttccaacatggctttcttccaattgtcatccctaagtgcctcttgaatagttctaggtatttctatggagttgagtttggaaacaaatgcttgataagagaatgacaagttgtcaaaggaaacaaagttggttagaggatgttgggtgtattgtttttttttccttttttaagggtggtagattaatcaaggttgctaatgacaatggacgtagacacaatttgattttcaatacctttatcaaagtcaaggtttggagcatgtagtaattctaaagttgactgcatcctccttgaactctccccttctttcctttgaacaatagacttaggcttcctcattgacttaggagaaactgattctaaagtattgtggggggaaaggtttaggagaataactagttttagaaagtggaggggttaggtcaagagaaaatttcttattttatgcaaaaggctcccttcgaagatgcggttgttgtctgttaaaagtgacatccataaatacaaataagcttggggaattaggaagataacacttatatcctttttttatttgagtattaccaatgaatatatatttaagagctcagggattcaatttagttgtatgatgaacttgaatgtgaacaaagaccacacaactaaatatttttggggcaatttgactaaaaccatcaaagtttcggttcaattaagtgagaagacttatgaggtctttgaaatcaagcactttggaaggcaatctattgataagatgagcaacaattaaaaaagctcttctcaatgtctttagatcattgatttgaaaaatcaaggctctagttacctttagcaaatgtctattttttttgttcaactatcccattttgtcatggtatatcaacactagaaaattggtgaatgattccttcttttttgaagtatggtgatggatattggttgacatgctctatcccattatcttatcttgctgtttagattttggtatcaaatagggtatcaaatattggttgacccaactcaggctataatcccttcataacattgtaacacttagttcaaataccttgtttggcatcatggatttttgtcttgagttcataaatctgagcaacaccctgtaccttagaataggtttattgaattgcaaatcaaattcccattgtcggagagagaaacatgcaagtatggagctccacaaccaagacatgaaatgagaatcttcttcatcccaggagacaaaatttgggtcatccttgtttatcaaagtaccaagaagatgacttagcttcccctttcctttaatatatgttttcatcaattgagaccaatgtagatgattttcaccattgggttgttgatatgttattgctgatttggaaagatggagaagaaaaattgtcagtcttgaagcctattagtataaaagaaagttgagttactaactattgaggatattatgttgattctatagggaagattatgtcatttcctattgtaaatgagatttaattgtagatatttttgtaatgtactactagagatcaaaatgtaattaggataggctagctgctagctgtttctccttatttttctctacttggtcaaactattttgtattatttaaagtattgtacttattaagaaatgtaagaaagaaaatttccaagctctcttcagctttcttcaactttcttcatggtatcagagcccatttaggatttctagaattttttgctactctttttttcaatcctcttttcaaatgtctgaaataacttttgagatatttgatacttcaatagggcaagttgcaatccctaaatcaacaagacctaagtttcaatgcctgggtcatcaactcaatggagctcgatgttagtcaaggttatatgttcttttctatagctaaagagatataggaagtagtggcacttacctactctgattagcataatgactcagttatatgatctgagaaatgaagtctgtgacactaaggagaaagaactgtgacagcctcctataatgcccttaatcaactttggtaggagtcaaatatctatcaggactatgattggaaatgtccagaagatagtgtgaagttcaagcagatacttgaaaaggagaggatatttgatttttttgggtgagtctaaatctcgagcttgatcaggtttgtagtcaaattcttggggaaaaatcactttcgtttgtttgagaggtataatgaggttagaagggaaaagagtaggttatcaatcatgatgcgcatcctcaacactggaacttcaggattggttatcatcaaactgagacaatcctaataagtaggcaacaaagcagtggcaaaaagattagttacaaagatatattgtggtttgatcattgccacaagtctcatcatacaagagacatatgttggaagttacatggaaagcctcaagggtggggcaaagggaaccaaatctcctagtaataatggacacaacctagaagtcatgactgaatcaagaatcaagctgttaggagctctaggaatctagaacaaccctttttcaccaaggaactactggagcacttatatgggtttatgagttgaacacaaatatcttctaatcctacctcttcatctcatttggcacagataagtaacttccttactggcttgcatacttcaaacttaaaatcaaacccctcgatcattgatttaggggccacaagtggtaagattgagactagagaacatacaaagggactttctttgggatggggaggattagagaataagcctcatcttgtaaagtggacgatcgtctattcagatgaaagaaagggtggttgtagatcatgtgaagcccctcgtaggcacttatttttcagtgtgaaacttatgaccttgctaaacaccaccaaactcattttcctacaaaaaattatgagaaatccaacccatttgcttttgtgcatggcaacttacagggggcttcacgtgttcctagtgtcatgggtgctaggtggtttgttacctctattgatgaccataccatagtgtgttgggtctattgtgtcaaagaaaaatttgagactaaaaagacctagaaagttttccacaaaatgattctaacgcaatttcaagccaaagtgtgtatccttaaaattgacaatggaaaggaatacttctcaaaagtattgggaatctaccttgaggaaaatgagattacccatcaatcatcatgtgttgatacacctaaacaaaatggaatagccgagagaaaaagttgtcatttgctcgaaggtgagagccttaatatttcaaatgggggtgccaaaacaatattggggtgaagcaattttgacagcttcatacttaatcaataggatgcctattccagtgtaaaaatttaatactcctcttgatacccttaaacaatcttatcccatttccaactttatttggtctcccattcctcctaaggtttttaggtgtgaggctttcattcatgttcacagtcataatcgaagcaagttagaccccagatgtgtgtttcttggatattatttaacacaaaaaggatataaatgcttccatcctcctccttcgaaatactttgtttctatggatgttcctttctttgaagataaatcatattttaaccaaacttctcttcagggcgatagtagagtggaagatcaattttgtgatgttttacctatgccaatgccctagagtcccttgcttgtgagtcgtgtattggtgctactagagaatcaaaagagggagtgtgtgtttgagaaaaatgttagtgttaattgtgagggggagagtgtgactattcttagtcaaccacaactgcaggtgtacactagaaggaatatagaggctgaaaatcttcctcaacattgccaatcctctaatcctaacatggtggagctggactatggtgagtcacaattttattttctcagcaataagttgaatcttgatgtgccaatagcctttagaaagagtgttaggtcttgtacgcaacaccccattgccatgtttgtctcttaccatagactaaattcatcctttaaggcctttactactaacttttgcaatgtgaatactcctaagactatacaggatgctttagaaagtctaaagtggaaagaggtagtgatggaagaaatgatggccttacacaagaatcagacttgggattttgtaggactatcccatggcaataagacattgtctgtaaatggctgtttacaataaaattcaaagcaaatgtaattatggatagatataaagctagattggaagcaaaagggtttattcaaacctatgagattgactaccaagagacatttgcaccagtggccaagatgaatacagtgtgggtactcctatctcttgtagccaatttggagtggccactaccccagttagatgtaaataatgctttcctccatggtgatctttaagaggaagttaataaagaaagatatcagaggctagttgataagttaatttatttatcacacacaagaactgatattctatttgctatgagtattgttaatcaatttatgcatgctccaaatgaagaacacatgaatgcagtggtgatattgaggtatttaaagaggctttattgggaagggtcttctattcactaatgtcatctagaagttgaagcctactttggtgcaaattggtaaactataattgatagaaaatctacttttgggtattgtacctttattggagcgaatttggtgacttggagaagcaaaaaacaagttgtggctagatcaagtgtggaagtagcattcaggtctatggcacaaggaatttgtgagctaatgtggctaaagtctctaatgaagggactcaaaatagctaatggagggtcaatgaggctgtattgtgacaatcaaggagctagtagcatagtttagaacccaatcctacatgatagaacaaaacatgttgagatagattgacatttcattaaggaaaagttggatgtggcctgatttgtattcctttattctcaatgaaagaacaattagcaaaccttttcactaaaggccttccaagataattatttcaacccataatcatcaagctaagaatgacagacatatttgaaccagcttgagggggagtgttgaggatattatgctgatttttttgtgaagattatgttatttcctgctgtaaatgaaaattaattgtagatttatttgtaatgtactcctagagatcagaatgtaattaggataggctagctggcagctgtttttccttatatagctctactcagttaaacttgaccagcaattaaggctggtctgggaaaacaacaaataacagccaaaatgctggtctgtggttaacgaaatttctgttaagtaatgaagactgaacaagcttacagttgagcaatgaaggctgagctatgactgagcactaaaggctctatggtgggaagatggatatcagcaaagttaattttcctgctctgataccatgttgattatttagggttttgatactttctcccttgtatgttttcaatagaattacaccaaatatgtacaaattgtaggaagtcagaaaaaagggaggagctaatttttagcctaggacatctctatttaccccacaaaaaaaaaagtaaaaaaaaaattaaaaaatcaggcaacctgattaacaaggaaaaaagattcaatcacaaatatttcccagttggaaattcttcatatagcctgtgtattttttcaaagaattgattgtagtagtggaaggttggcaatgatggcctaaggttgagtagaagatatgtagctaaatccatatgacagacctgatggccagtatgcctcaagaaaggaaaaaggcaatgaaaggatctgtctgaaaaaattcttcatatagacagatcctttcattgcctttttcctttcttgaggcatactggccatcaggtctgtcatatggatttagctacatatcttctactcaaccttaggccatcatgcattttctagggagcttgtactacaaattttttgatttatgttggttttgtgacgcctttaatttaaataaagccagtctctcgtctcagtgcagttatgaatttgcattgcacatgaacattcatgtctgctagtacctttacttctcagtgatgtgttgatattgctgtttccttgttttgccacttatccatgtcaacatccactcattttatgcccatgtttcttgacttccaccgcttgcctaatggctgttttataaagttttaatttgatagctattcattgatcacagaatactccaaaagaatccaacattgcctaagctgatcttgccacaaatttttctatttcctcattctcactcgacaattgatgctatttcctcatttttattctacccttgatttgtattaaatctatttttacaacatgtacacatacgtgcgcgcgcatacacacacacacacacacacacacacacacacacacacacatatatatatatatattaaaatgtaataaaaatatatagcaagaatggactttaatacaagactgggcttatattaaagacctctttgtgcccttttagattgtctcgtcagccttttcatgattgtcctttttccttgtttactgtatttctttgattagttggactctagaccgcaggctgtttgtgggtgtggtttttgcttctctttgtctgttttagcttcctttgcatgcctcctctgaacttgggggtgccccccttttggttatttttgttagatgctctttttaatcatttccttactttaccataacaaaaatatttttcctagatcttttgattccaaaacatctcttacctctcaactttgcttttgagatcatctttatcttcttctaatgttttttatttattttaattttaatttttgttactagctaatcgaacaagaagcaattgagctgaagaacag

SEQ ID NO: 11991 - DNA, 11120 bp, Vitis vinifera
  Intron number 10 from transcript GSVIVT01013898001 (locus GSVIVG01013898001) derived from phytozome v7.0 (chr-ID chr 16; pos 6401507 to 6412626 reverse strand)
gacgttcctacttcatcattatctgatattattcggtaatcttcactttcttttgtaaattttctgttccttttcttccacaacattcagtgtcttcactaatactatggtccatttcaaagaatttttgttcttgtcttcactggtaatttattttctccaatttaataaatttgctgcccagatttggatgcttggttgttcctttacttataatttaggacttgttatcaagtacatgctctattaaatttattttatcacctctttttgtctctaaacaaaaactagaatgagcttgtttggaaactgttctccagaataattttctgtcatttagaatagaaactaactttgaaaaaacatttgacaaacttttgataaaaaacagttttttgagaatttgttctataaatagattgttttctagaacaaatttgaggtattatcagtggttttttgaggagtattccgagtaatattgaaaatatagagaatactttgggaacttttgcagtgtacattacatttatggagagtaagctgagtgtatatcttccatatttgagttcccaaacaaaattttgtttctgaagccaattaataattatttttaaggatcattttcaaatacattgacaaacaagcccttagtttttagtctttcttgtgctaatgcttctttttgttttgaactttgtcttttaatcgaagttgtgtttttgaggaagtgataatgacatgcaatccaaaatacaattttgagtcacaagtttgtaggggggaattatcttagacattttttactttcaaaactataaaatatctcgtcttagtcctgaactttgtatatgagccatttgctttcctgctttagttatgtcgatagatttccctctttgaggatcttggtttcatggggtttggggtttgaagttttttgtgttcctttaggaggtggtattattaatattacatgataatatttgtggtaaggacatatgaagacattcttgacctctatttgtgcattttcttattttgaatgacatagttggattagtctctagttagttgcagtcagttcctttcattatgttcccagatattcttttttttctttctatttttcctgtcacctctctcccaagatttcttaaggaaaaatttaggaaaaaccctttgcataagctgaaatcggaaagttctggttaatcactttttataccttttttctggataatcatcaaaagtccttacaataagtaggttcttctcttttataatgataaccctcaactactttctgaaggtttcaaagacacaattaatagcctttaataacaaaaaactgacattttgaattttaatttaataacaaactttttccattcaaacctttgatattttcaaacttgccataaattgtctattaatgactgcatcattctctcctcctaagaagaaaccgttggaaaataaaatcttcttcttatttctttgaaaaattaatacaaatatatatacaactttcaaacttgtacaataaatggaaatagaataagataattgacctattcctaaaatcttcctacaaatcttctaaattacaactcccctaatttacataatcaactaatctaaatatgcagaaaatatgcacaaaatcaggaataaatcaaataaactccatgaaatcaggaataattattggattccaacactccccctcaagctggttcaaaatatcttctatttccaacttgctaaccatagagttgagtgtaggattctaaactccctctgtgaagacatcaactagttgtattttggatgcaacaaacagagtgcaaatcagtctactactattaatctttctttaataaaatgtctatcaatctcaatatgtttagtcttgtcatgttgtattgggttgtgagcaatgctttttgcaaccttgttatcacaatatagtcttatgggattctcaagattaacttgtagttcctttaataaactttagccacatgagttcacaaatgccaagggccatggctcgaaactttgctttagcactagaccgaacacctacatgttgctttttcttctccaaataaccaagttgtggcccacaaaagtacaataccttgaagtaggtctcctaacagttatagaacctgcccaatttgcatctgtgtaagccttaactctgaggtgattgttctttgagaacaataaaccttctcctggagttgactttaggtacctcaagattcttaagactgcatctatgtgactttttaaggggagtgcataaactgacttaccatgctaacgacatatgctatatttggtctggtatctcccaacaagtttttgatatcttcctttttcaaccagtatgccttcagtgatggcgcctaattgatgattttgattaataggtgtacctgtaggtttgcatcctagcattctggtttcatttagcaaatcaaggatatacttcttttgtgtcacataaattccccttttagatcttgctacctcaatgccaagaaaatatcttagattttgtcatctacataacaataagtgtagtaatattctttttaggtgattgcttgttgaaaagagtatgatctccttggttttggtgatagccaaatttgagcagagacttaataaatctcttaaaccatgccggaggagattgcttcaaaccatacaatgattttttcaatctaaaaacctttcaatcgctgaattttccttcaaaactaggaggcaaatccataaatacttctttttccaagttcccatgaaaaaaacattttttacatcaaattgttatagaggccaatcgagatttgctgctaaggataaaaaaactctaatggaattcattttttccacaggtgcaaaattttcttagttatcaattccatagatttgtatgtattcctttctttatacttctcaatcgaaccatcaactttgtatttaatggtgaatacccacttgcatcctactaattttttatcttcggacaaatcaacaatatccaatgtttcatttttatacaaggctttcacctcttcatttatagcctccttccacataggatcacttagagcctcttgtacatatttaggaactgaatccgaggacaaatgagtggtaaaggcctaatattggtggcaaggtctatggtaggatagaaagtttgacaaaggatgtttaatataacttctaacacctttgtgaatagctataggaatattaagatcagtgtcaaaaccatgattaagaagagaaggcttagaaggattagatgtacctgattctggagttgatgattgattgtgtgtaagagagattgggtcttgctcttgcattggtagccttggcctcgtagagtaaaccatcaagtctgaatcagcattttcggctattgctggttttatgatgtgggtttcttttcctgctgctggttgtatgttgtctatctcctctacatcaccatgttttgtagcattttctactactactggttttatgatgttagtttcttttcctattgctggttgtatgttgtctacttgctctacatcaccatgttcggttgcatgactccaaaagagtaaagggcatctaagactgattttcttgcaatattttctccccttgaagatcatatttctggtaatagggctggttttcaaaaaaaacatacattcatggagacaaatatagtataaccaaagaccttgggtggaagggagccaaggcaatttatgtgaggtaggtgttgttttaggatgtctattagagtcttggagtttaggctttttgtgggcattctcttgataaggtaggtaattgtaagcactgcatctccctaaaaaaacttaggaacatttctagcaaacattagggcctccaacaaatgtctattcttccttttagcgaccccattttgttgaggagtacctacacaagaggtttgatgaataatcccattctccaagaaataatttcctagggtttggtttaaatactcccctccattgtccaactccacaacttgcaattttgcattaaactgggtttggatcatttgatggaattgtttaagggtgatgatagtattggatttttcttttaggagatagatccgtgtggttcgagtataatcatttataaaacttatgaacaatgctcctgaatgataagtaacttgtgaaggaccccaaacattagtgtggatgagagaaaaaggaatttcacatattttactgctcaaggaataagaaatacagtggttttttaacaaatccaagttgacacacaatttagggtacaaagttttcaaagagaaaaaacttggatgccctaatctttcatgcattaaccatagttcttttaaaaagggctgacccattgctaaagccttaaaagggggtagggcttgcttcatcatgtagagatcacagacgaagctctaatggaggaggcctccaggtacacaactcctcccctttgttctttgttcttcttggggaaatgggatctttcttcttcttattctactccttctgggctggatgggacactcgtcaccactggcgggggatccgattggggctaaatttcaaaggcggacaggctagcagttttggaccccttaagggtgattttggcggatgggggggaggcagagggttttggattttcaggtaaggaactaggggctgtcgaggaggtgatagaggtttcatcgaaaagggcaatacaggaggctttggaggagggtgaggaagtgggtactcttagctggtcatctagttgtttggctaagtttagccgctgcataggaatgttgacggagggattcaaaggggagattttgatcttgttgaaaaggatgaaagagaggaaagattagaaggggaagttggatggtaggaaaaggaaagaattggagtcatcaaggtttgaaagggagttgagaaagctagaatgtattgtgaattatattggaggaggagaagaagggggcagcacttttaggtctagatggagatttgaatgctttccgggaatgtaagaggggctaatgacagtgacaaaaggaaggtgatcaaagttttgataaaaaagaataaggtggatttggtttgcttacaggaaactaagatccagggaatgtcaaggggtctcattcgtagcttaggagtggggagattcttagaatggggagttgtggactcaaggggtgctgttggagttatagtggttttttgggataagagggtgttgtagttggtcgatttggaaacgggagtgttctcaatgtcatgccaatgtaagaattgtgaggatggcttcatttgaacttttataagggtttatggcctgactttgaggtgggatagggagtgtttctagggtgagttgggggccataaagggactttggagtggcccgtggtgtgttgctggggattttaactcgattaaatgccctgaagagtgcagcaggggagagtttgaactcaaacatgagaaggatctctgaggtaatagaagacttagagttaaaggacctcccgttgttggggggtccttttacctggagtggaggggtgaacaatcagttattgtcaaggttggatccctttttagtgaatgaggggtgggattgctgttttagcgggtcgatgcaatgtgtccttttgagacctgtgtctaaccatttcccgattcttttagatggaggagatctaataagaggcccctcctccctttctagatttgagaatatgcggttgaaggtggagggttttaaggatcttctgaagatgtggtgggagggggacaactttagtggctcttcaagttttattttggtggcaaaattaaaggccttgaagtctaaactgaaggagtggaatagagatgtttttggcagggttgaagccgggaaggatttggctttgaatcaggtgggctattaagatgctaaggaaaagactagcaccctgtctttggaggagttggaagctagaaaagaagcgagggaagaatataaaaaatgggttctgctagaagagatctcttggcggcaaaaaactagggaagtgtgactgaaagagggtgacagaaatacgagattctttcacaagatggccaatgcacgcagaaggaggaataaaatggacaaaattaagattaatggtgtttggttttcggaggagaatgaaatcaaggaaggggtggttagagcctttcggtctttgctgtccaatctggggtattggtgtcctttatttgggctgcagtttgagactctggacgctttagctttgaaggtgccattcacagaagaggtgtttggtgctttgttggggtgtagtggggacaaagcaccagagcctgacaatttctctatggcattctggtagttttcttgggactttgtgaaggatgatgtgatgagatttttcaacgaattctatgaacactgtaactttgttaaaagcctaaatgcaacctttctggttttaatcccaaaaaaagcgggtgctggagatttaagggattttaggcctataagtttgttggggggtctgtacaagtgaggttttagccaataggctaagaaaggtggtctctaagtctctagttagttgtagccagttcctttcattatgttcccagattttcttttttttctttttttttaagctcgtcacctctctcccttgccaccttaaaaaatccacatactagtacataagaattgaagaagcaaatcgaaagtaggtgactcttatctttcaaagggaccaagttgtgggagggatagccaatttcttatggcaattgaacttggatttacaggttagatgacttggtttagaaggggctagtttcaagcaggtagatgaggtggacaatagggtattggatggagttttcattgaagaggaggcattggaggctcttacaggagagattaaaattctcaagcctatgggctttggaaacattaagatatgagttgatgagctttttccatgaatttcattactttggtttgttttggagaagccttcatgcatttagcttggtcttaatccctataaagggaaggctggtggatatcaaggacctttggcctattaatttagtggataaggtgtacaatcttttggtgggagtattgacaaacaggctaaaaaaggttataatttattagcaaagttgtatcaaattcccaaaatgcttttatttaagccaagctaattttggatgctatattgatactaatgaagccatggattccaaaatcaaaagctcaaaataacagtatttggtttgaaaattggatatagaaaaagcttatgatcacatgaattggggctttcttttttcaatagggtataatatgggtttcaaccaaacatggattgtgtagattaaattttgcatttctatagtccattttttagtgtttgtgaattagacttcaattggttttttctagggttggagaggcttgagacaagaagattctctcctgccctacttttttattacggtgatgaaggcaattatattttatcaacggctagggtaatttttattacaaaatcaatacaaaatatttaaagttttgaattaaacaaagtttactaataatattttcctaaagatttttctcaacattgtattaaaataacagacctataatcagtaggtttttcctgtacaattagtggtaacattgaagtaaaataatgcttagcaccttatagaaaagatataataaatatgttctccaacaataattagccatgtgatattataaattacttatgcttatcatattgtgcttattttagtgttaatttattctcattaatgttgtatctaagtactaaaaaaatgcccatgccatataagattttaggattcaagggaactaacactcgacgcatgtacttgaacccatgtaacatagcctgatagttaatggaagctaaggtaggaggaagggaaggaggagatgttttgatctctcatattattttcgttatgactcttctattttatgagctagtagtgagcaactattatacttgagatgggtgctattgtattttaaagctgttttgggattaaaaataaatatgaaaaagactgagcttattccatagggctacgaggttggttgagcaattggcctcaagttctggatgtagagtgagttagcttttccaaaaatattcaggtttgcctttggtggcctctttcaaatgtgcatcattttggtatgtagcacaggagagatataaaaataacattgacttcttggaagttgtatctcttgaaggttagtaggctcactagtctcccaatatattttgtcttccttaataatcccaaagaaagggcaaaccaggttggaggaaattcagagagattttatgtgggagaatgagccttttagtggaaagatccatataggcaagttgggcatagtgtgatcagaaaagaccaaaggaggtttaggggttagaaggcttttagtgttgaaaaatgcgttgcttgagacatggttatggagattttcttgtgaacttaattactgttggaggagagttcatcatggggagtatggtgagacggtaaggagttggtgctccgatattggtcaggattcttttggcggcaatctttgcaaagagataagtagacgttgggatgattttcaaaccagcatctccataggtaataatcaaacaacagaattttgaacaaataagtggtgtggtaagatggccatttctttctaccttgcctgttaatattagggctttggcacaagttatttagtttaaccaaaatggattgggttctacccaggagtatatgtgacatgataaccatcttgtgggagttctatcataggcaaaatcctttgataaattgcttgtctcactatgccttttgagatgttgtgggattaacttcattttttttttttttgataagtgtgggattaacttcatttctattcctccttttgggcttcttgtaccaacacctttaaaggttgaaaagggatggtgcatttgaagctaatttatctatcataggtaaaatctaacattgcatatgtggttagtgtagtaagccaatttatccattcactattgaagtttcatttagagtgtacagaatactctggtatttcaaggcagccccaggtaaatgaatcatgtttcaaaacaatggagacctatagttagaagccacacagatgcattaggcatgttctcttgttgatagaagatcgaaaatatggtattatactccatttggaggaaatttcatcgcctaaaggagcaagaagcaatcaatagtggcacaattaagtgctaaggttgaattcagagcttcggtttaagggatttgtgagttactctagcttaaaatagtacttacagatcttaatgtcataattgaagaacctatgatgttattctgtgacaataaaacaaccataacatagcctacaatccaatccagtccatcatgatatgacaaagcttgtgtatatggactgacattttatcaaggaaaaattggacaatggataagtgtgtacatcctatatttcatcaatcaagtagttggtcaacttacccagggattaccaagttccacagtctatcaattcttagataagatgggaatgcaaaatatctttgcatccgcttaatcttggagtagtggaatatctaatggaatggttcttaattcattttttccttaaattgatcatgtagctgtctatcaaattgtatggttgtctagatctattctgtattcctaaatcaaatgcaattagaataggttagctatgtttcccttcttttagcctaagagaagttaactttgtatgtattatatacgttcattgtcaagaggaatgatagaactgtttctatattttagcctttagaaccatattaaaagacaatggtgtcaaaaagcattagagtaggatcaaaaggtaacagaactaacctaatagaattccacaaggaagaagaaaattaacaaaaaggaagaaaaaagggaaaagatgaatagtgtgggaaaaagactatcgaagaaatgtaaagaaattgtaggctaaaattaatatatgagatatcgcttgatagtgaggggcctccttcttatgatacttgcgtagacttagtcataattattggttgtggttgtgattactttgtggggacattgatgacttattgaagtgtccccttttcttttttcacacttcataacaaaatgagtcgtacatgcatggctttacattttcatccgcaaaaaactatcatttgcataaatgaataaagttcaaatggccatctaataaactaataacttggaacatgttttgatgcaagaccattaaattttttgctgtataaaagttattcctttgttgtatgatgaaatgagagatcaaagaagacaaaagaaaaggagggaaaagaaaagatagatccttggcaatcacaccagggttcttgggcaattacacctaagattctttaagcaatcacacttgagtgaaaagaaaagggaaaaaaatagatctttggcagttgcactaaggctcctaggcaatcacaattagaaaaggcaaatcacacttttaagaagccacatagcaaccacattctcaataaattctatttattaaaattgcaactctacacaagttcatatagactcatacaactcattttcttcttaatcaaattagaaattgtaaaatgagaaatttgactaaaagataataataaaattactattatgaacttttgtcataaatagtctttttagctcaaatttaaaccaactttatgaacttttctatttggaaatagataatcttgtgtgtttagtatgcttactcttctatgtgtgcctcattggtcttgatatgctttatttgtgcatgtgggtgtgcacttttaattttgttgcttgtattgtgtaggttgagaactggaaacgtcattttcaactataggt

SEQ ID NO: 11992 - DNA, 2712 bp, Vitis vinifera
  Intron number 2 from transcript GSVIVT01000668001 (locus G SVIVG01000668001) derived from phytozome v7.0 (chr-ID chr1 3; pos 20569494 to 20572205)
ttaacagatcttcattatattaacctatttttacagtgacattaatgaaagattacatctttctggtggaaatgagactagattagttttgaaatgtaaagattatgtttggttcttggaaaatgggagaaaaaaaaaacagaatgaaaaaaaaaaacaaaggaaaataaacaaatagatttaaagttaataaattatttttatatattatttcttatttatttcatttatttaactcttctatataaatattaaataatttatagtataattttttaaataatgttaattatatttcacattttttagagtaaaatcaaatataaaaaaatatttttctcaacaccttttttctttacttattactttccaaaatcaaagataggtaacctaatctctcatgtttgatatctcttttctccaactcattttgagtccacacaattggctcatataattataaacaaatttaaaaataataatattataataaatatatacattattttttattaaaaaactatttagtatatgttagaaaaaatatggatattaacattttagtaaaagtatttttttttgtgaaaaagaataattattttttaaaaataaataatttttactaaaatataaataataataatgatattataataaaatataaattatatttttttattgaaaaaatatttagtataagttagaaaaaatatagatattaacattttagtaaaagattttttttgttaaaaagaataataataattgttaataatattttatttaaaatgaataacaaataaattaacatgcaaatcaaccaaggttttcattacgtgcacatatttagcactaaattatgaacatagtaatcggaagtgttttgatttaatatgcatttaattggattgggttttttgaattccaaattattcttaaaaattttaaattcattaaaaatttgaaattattaattatgtctcatttaatttaaaatctatttacctaatgaaaaaaattcaaaaaatatatttgtatataagagaaacagtaaagttatgactcataatttattagttttagtttattactttttgtagtcattagattaattttttgaattttaaattatttttaaaaatggttaagtctattaatgaattcaatataaagtgttgtttgattttaagtttatttctttagtaaaaaaatttataaaaatataattttgtgcaaaaaagaaataatggagtcattgtaatccaatttttatccataacatactggtattaatgatttcactatttgactttcaaatttattttaaaaattatcaaactagttaatgaattcaacaaattaagttttatttaatttggagtttgtttacttagtgaaaaatttggaaaaatatgattctatgcaaaagagaaacaacagaattgtttgaaaccaatttgatccttatttgagtttttacttattattactagattctttaatgaatcaatgtgttaagtgtttgtttaatttcaaatttatttgcctagtgaaaaaatttataaaaatgtgatattaagttttgatcaatgactttctaatgttattaagtttcttgactttctaatattaattaactcgatttttttttgtttcaaattatttttaaaaattaataaattttatgtatgaagtttaatttgatttgaaatttatttgtttgataaaaaaatttagaaaagttaaaaaaaaattgaaaaaaacacacacatgtaatttaaaggaataccatatttgaatattttcagtttcaatactggatcatagagataatgcttaattttattttattttttatgattttttttaatttatttatattttcctattgttttaaaaaacttgttaaaacaattttttcttgttcactaaaaactgttttttgtttcactttgtgataattgctttttaatcacataaccaacacaagctctttaaggttagaacataatattaaataatatatatatatatatatatataatatgtataattttatttttttatgatttttttaaatttctctatgttttccttttattttaaaaaactagtgaaaatcaaccaaactcttttaagattagaatatatatatatatatatatatatcttaaaggaatatcttatttgaatattttcggttacaatattggattatgaagagagaagaagaatgatataatgtttttattttattttatgattttttacatttctttttcctttttttttgttttaaaaaactagtgaaaataattttttcttgttcactaaaaactgttctttaattcactatgtgataactgcttttaaatcatgtgatgaaacaagctctatgaggttaggatataatatcaaattacatatatatagtagttataaatgatctatcatattactaataattgtgaataagaaaataaccattataacttctaacaaggagatatcaactatttttttaactttttttaataaatttattattattatttcctaaaagttgtgtattattattattattttcaattttaatgaaatcttcaatttttatattgaaatttttgaatatatgatttcaataaaatataacaaactcgtgtcttcaaattacaacttccacaaaatgcacttaaatcatgtcttctagtg

SEQ ID NO: 11993 - DNA, 9217 bp, Vitis vinifera
  Intron number 6 from transcript GSVIVT01010856001 (locus G SVIVG01010856001) derived from phytozome v7.0 (chr-ID chr1 1; pos 16812980 to 16822196 reverse strand)
tcattgcattcaagtagttctaagctgctcactaggtatatgtctaaccccaacatcacatgcaagtttctatttcttttgtgataggttcacatgtaagtttctattgattggcttctcttttgtttctagctcattaacagttctaatgtcagtatttcatgataaatattggcaaatacatgcaatattatgcctgatgttattctttaatacaagtaaatttattaagaattatgttaaaagatcgaatataagtattgttgagaatgaaaggtagtttttcctatattttctctatttatgataggacataattgttttattttctgattctcctttttttctctagcttttctgatttcattttccttttgggtttaggaaaagaactctacatatttagctgttgcatatattaagaaatcaagaagccaaaaaaagacaggtttggagagctaaaggatgaatgagagcaatggggacttcatctcctcttcgtctgactggggagatgagaggagacaggtgttggtatgtagtggaatccaagtcttttgaaatcttagtaggtttgttcggagggaagttgaaagggaaaatttcagatagaagcagagaaacatccttgtggattaggtttggggagtggatttttggttgtttgttggaaggaatagaagcttgtcatagggatgagagtggaaaggtgtggagcaaatactgggttgaagatgggagggagtttaggttggaggttcattctttgctcttttagctttgtggaggccaataggtttactctgatctacctcgaaggaaggggtatccctaaagggtggtctattctggttgagaagcttcattgtcttggagtaatttcctccttagaggaaaggaagcttctttccccagttgccttatagcttgtggagggaggtagtagttcagtggacccgatgcaaggaggagtttggattcggattgaggaaaaggaagcccaacgtcggaaggaggtctaacttaggaaggagcatctaaggcgctgtctagttgggcaatggggagaatattcaaacttgactccagatttgccttcgttgaggagatgggtaagtcatacctggtctctaaaaagaggagtgaagatttccttgctagagggtgcccttctcttattagattttgaggaaagctttgatatagagatggggctttaaaggggtttaagaaggtacaaggataagattttacatttggatagttaggtcctaaatgtagggtgtttttggaaggatgtgtgtgctaaggacctgtgggtgagtgcggtggggtttcctctgcacttgtgatgtcaagaggtgaaaaagcttaaggattgttatggtggttttattgttgtggatgaagacacaactcatctccaagacttgcaatgggtaacattttgtgactttagatgggagaagtacacctaggtcattgcaagtggtggtggacctatcttgcttgtggtgggaagtaccaccatggatttctcaagtgattacaagtaatgggagtaatggtttagaggttaggggtgagcttgtcagagtgttattgttggcaaattgtagataattttgtatttatttcttttcttttctctctttggtaaaatatgatttacgggagagattataggataataggtgttaggtgaataaaatccttgatttatgggagagatttttggggaatctaatccttaattgtgtataaataagatgcacatattgtattctaatacaattcaagtagagcagaatttatttcatggtatcaaagcttttactctcttgtacaccctaagttttttcttgtcttagccttaattgctgagaatttttctgcacttgtatgacctttattgctagcaatagaacttgttgatgcccatctccttccttggaattttttagcctacatagtctcataaaattttcccctctcagatttacaaaaattatttctgaatttgctccaatatgtctggtggataaaaaatcatccaagcttcaaaccttgctcccaacttgactagcaataaaatttcaaaatctgcaaaatccattcaaactcaatagccataattatttggtgtggtctcaattggtatgaacatttttgaagggaaaaggaaatgtgagtcatctaattggacctatcccaagtgaagacaatccaaagctcattgcatgggacgaagaggattcaaatgattatgtcatggttgtggaattcaatgtaaccaaagatcaacgagacgtatatgttcttgacgacagttagagatatttgggagactgttagacaaacatactccaaagtgagagatgttgcccacatctatgaaataaagaccgagattggtgctaccaagcaaggtactttttctattactgaatactatactatcacgaaaaactcatggctggaattaaattactatcaaaatattaagatgaattgcagcaaagatgctgccatgatgctcaaatatgttgaaaaggaaagaatatttgatttcttgacgagtcttaatgtggaatatgatcaagtcaaggtgcaggtccttggaaaggaagatccacctccgctaaatgaaatcttctccattataagagcagaagaaggaagaatgagtattatgcttaacactccaacaatagaaggttcaaatcttgtcaccatgaagatgaactccacactgttaaatagcaattatagatatagcctatactgttagcattgtaagctaattcatgcagtctcccagggaagttcatgcagaggtagtatccaagattctatgctacttaaagtctactctaggaaagggaattttctttaagaaaaatgaagagctaagcctagaggcatacaccgatgtgaattgggcaggattagtggtagatcaacattctacctccggttactgcacattcttaggggacaacttagtgacatggaaaagtaacaagcaatatgtggtggctcgatcaagtgcaaaagtagagtttagagctacaacatatagggtttgtgagctattatggataaagattgtccttgatgatctaggaatcaagtgggaaaggataatggagttaaactgtgacaacaaatcaacaatcaatattgctcacaatccactatagcatgaccgaacgaagcatgtagaagtagattgacatttcataaaaaaaaaaaaaaaaaaaaactcgatagtggtttgatctgcacaccatatgtttcaacaaaagggtagcgtgcaaatgtgttgaccaaaggattgactagtcaccaatttcaaataattacatgcaagttgggaatggacaagatgtgttctccaacttggggggagtattgacagattttaaataattttgtatttatttctttccttttctttccttggaaaaccttatttatgggagagattataggataagaggtggtaagtgaataagatccttgatttataggagagattttaggggagtttaatcctcaatggtgtataaataagatgtacatattatattcaaatacaatttaagtatagtagaatttattttagttatgcattgatgagagcgtgagagggcgattttcattactacagaagggggcaattgatgtgctactttgtggcaggtgaagaaaagggttaggtttggtggatgaatgaaatttctaacaaggctatagtaggtagtgggctagtggatgttgtggaaggtgatggtgatggaagacaagctattggggattgtttgggtgtggtatgtagtaagggagcacaaagtggggtagttggtgggctagaagaagtgggccttaggtgcttgaaagaggcctgaaaacaatggtacctttgagaaaacctcacttttctcatatattttatgcatacagatattgttttataaactaattacaaagagtaaacatataaaaaactaaaacctagaaaatagaaaactaaatctttacatatcatacgtataaaatcttaaccacttttccatgcttatcccataaaacctaaacctgaaaaatgggaaaaaaatccataagtcaatgataggattttccacactccccctcaagctcacttgaaggtatcaatcattctcgacttacaaatgaatctcttccaagtccctttgtaagaatatttgcttattgcttctttatgggaatataaggcgtacaaatcactccactttttatgttttccgtaatgaaatatttgttcactacaacatgcttggttttgtcatgatgcacaaggttatgcatagtattgattgttgccttattgtcatagtataatttcataggagttttagtaggtatccttagttcttaagagtatttttagccataagagttcacaaatgatgagcattaatgctctgaactctacttcatcattgcttctagcaacaattgattgcttcttgattcttgcttctctttgtgaccaaattacacccaacaaagatgcaatcccttgaagttgacctcctatcattcaatgatccatctcaattagcatcggtaaatgcttcaaccctcatgtgatctccctttttgaacaacaatccctttcctagagtctgctttagtcatctaagaatcttgtacactgcttgaagatgttcttcatggggggaatgcataaattggctaaccatactcactgcaaatgccaagtctgatcaagtatgagaaaggtagatcaactttcctaccaaccactgatatctacctatatctactatagctccttgtgataactccaacatatgattaacatcgattgaagtatcaacaagtttgcaatcaagagttctagggttacttcctttgtaagacaaagatcccattcttagatctagctatatctccatgccaaagaaatatctttgctaactaagatcctttatttaataaactttggctaggatttgctttagtctctccatctctgtatgatcattgtcaatcacgataatatcatctgtataaacaatgagaataaaatacatccattatttgaatgtttgtagcacattgtgtggtctgattgacttagtgttaccattgtcatgaattgactttgtgaacctcttgaaacaagcatttgaagattgctttagactataaagggactctcttagcttgcccaccttatcaaagccatacacattttcaaagccaaggggtagacccatctaaacttcttcaagttctctgttgagaaagacattctttacatttagttgatgcaaaggtcaataaaaattagttgcaagagggtaatacatgaatggtgttcatctttgctattagggcgaatttctcttggtaatcaataccatacatttgagagaagccttttgcgaccaatctggctttatatctttcgatcgaaccatctgtcatgtacttaaccgtaaatacccacttgcatcctacttgattcttcccttttggtaagctcactaacctttagctagcctttttttcaagtggcctcctccttaactgcctctctccattttggaacatgtagaacatcctgtatatttttggaaatttctaaactaggcaagttttaaaagccttaaatgttggagacaatatctggtaaaacacatatttagatatagattgcatggtacaaaatctagtgcctttcgtaatggcaatcagaacatcaaggtctgaagaaggaatagataaggaaattgagtttacgtctgtttggatctgccataggttcaaactcatggcagtatttaggaggttggaatttggttgcttgaagatttctccgtcttgaataaacacgaagctctaattgtggagcaataacaatgagatctccctctaaactagattgatcaacagcttgttgtggcattggagattttagcccaggggtcccaagtattctaggtgagtcatggatgatatctgtcgattcaaggttaaatggttttttctaggagttgtatctagctacaaaacaacaattggttagggtaaggatgattcccaaaaatgctcttcttgagttgagttctccccctaaagaggattttttgggaaataaggttgttctcaaaggaggtaacatccgtagtgacaaaagtcttgttggatagaggatcattacatttgtagccctttttgagttggagagtagccgataaacacacacttgagtgctcagggatcaagtttgcttcaatgatgtttataaatctggacaaaaacagtgcatctgaataacttaggtggaagagaggtgaataatctaatgtggatggatggttgacaattgctcaagaggtgtgtgagagacgacttgggaaaagggggcatgtcttggtttggttttgagggtgaaggtgcctttggaggattggtcctcaagcaacgtggcaacttttagtaattggttgggcatgctgacagtaggtttcaaggctgagatcttatctctcaggaaaatgaaggctaggaaagaggtcaggggttgcgagggtgggtaggaagaggaggaacagcccttgttattcaaaatttgaaaaggaattaaagaagctagaatgttttgtgaattataaggaagctgaaggtgaatgatcgggaagcagaaagtgagtgggaaactgccatagtgggtagatgaagctaatttttattcctgtgggatgatataggggctactgtcagtgtcaagaggagtttttcaaggcattgattggattgcagaaaccatttttggtatttctgcaagaatgtcgactgggggcactttgtttttttctatgcttttagggtgttggtttttgttttgggtggtgggtcttctttcacttgccttttggcactatttgtatgcactgtgcactttgatgtgccttcttcaagtgcttttaatttaattgccccttttacctttcagagaaaaaaaattagcagttgcatacgtgtttcaaagaaaatcaagttctttctgctaatatcagatgacgcatgaacctatgggctgccaccagtaccataccaagcagccacccctaatctccctatacacatagcattaaagtttccataaatcacctagctgccgaactgtcaatccagtctaattgctgtaaacacaagctgccgaatcttcactgtctccaccttgcaattgctaccaccttctcatagatgccaactcatgtagtgataaggccaacatcagtgccatactctcttcatgctgcaatcttccctgctgatatgatactggtttgtgagtttattccattaatttctgaatttcctgtgcttccttggatatttgtaaccaaggagtctgttggtgtactctttaatatcatcttgctagatcggcatcccattttttattgaaatgggctgtcaattagaattaagtaggttccacctctaaatgaccaccttaagctcaatcttgataggtgctttttcaccaggccagatcaaatgtggattttgtggcttcttcaaagaccactaaggtagtatagcatggactttttgcattatggtggttttggtttagccattgagttgtagatcttggtgcttgtagtgagagagacgcaaaattgcttggttttcctcaatcttgattgaaggggactctcccactgttctttcctgggtgactaatgatggagtaagattttggagatatgcctattagctacagaggatggtgaagctgtctatagttgtggtctgttcttttccatagagtcaagagtagtaaatcaagaagctgatacattggttaaggaagaggcctcctctgcattgaacattctggggaccatctccctgattgagatcattttgtgtgagcctcttgtgggggcccagttattgggaaatttttatacagttacatttgtttttctctttcctctgactaatcttgcaatttgaaagaattccccatccttctttgtacattatctaatatatttacaatcataacaactatagtaatataatatcaagctacaattcaaagattttctagtactaactgtagataaaaatattggttggatagtcaagaacatggaacactgatttgagaggtaaacaaggagagactgggatagcatctatactgtagttgaggtcaaagaaccattatgttcctaattctgttgcaacctgtacaaccagtgtatgatgagaaaaaagattgtattcaaggcatatgatcagaagcaacagaattactaatcaaggatagattggaggaaagtaaaaacactctaagccgatgcaaaaggatgagtggtagctccataaagccatgagattatggaaagactcaacttcctggaaagaaagagttacttgcctgaggatgttcctagggaactaatttggtgtttctttaaataattgtgaacctataaatgcatatttgtaaccagatgtggattgaaggatatcagcttcttataaataattgttttaataaatggtacaatatttttcagcacgattacttattagaggattttatgagtactgttcttttttcttttgttcatttttcctttttttggtattgaaaaatatttgtagcaatttgattctgaattactcggtgtgtgtgtattgtgtggttaaatttcagttcatcaattatgctgttcatttttcagtgttactgtctaggttcttccttgatgtcttttcattgcttctttttgttcactgtattgtgatgtagtgccctagtaggctgtgaaaaggattaactgaaagattataaacatccatggttataaacggtcctccacaatctgctttcggaatgctatattacagtattgcaaagaaaatgaagatgtttcaattttccctcaggatatctcctaagtaaaacctatgaaaatacttgatcaagagtccttatcatagagtagggatctgaaatatttctcagagaaacttgagcaacacttcttttgaaacacacacacacacacacatggttacttatattattcctctatgcaattcaaatgttgggctggcttatatatacatcttattgtgatagtggaactccactagtgaagggtttcaa

SEQ ID NO: 11994 - DNA, 3583 bp, Vitis vinifera
  Intron number 5 from transcript GSVIVT01012699001 (locus G SVIVG01012699001) derived from phytozome v7.0 (chr-ID chr1 0; pos 805042 to 808624 reverse strand)
tgtcgttcttgtgactggaaatcagttagtatcatgtatgtattgaataatttttacatgcacttattcaagaatgtatttttatttctacaactggagtgtgatgtatgtttgttattaattgacttctcagtgtccttatttggaaataccatgacctatgaattttggatcgaaatagcttccagaaaaaactatattggtactaggtcaatgccacttttaaatgtatatagattttgttatattgtccctattctcatattaaagcttgctggcatattattagtattagtcaccaaaaacaaataaatgcacgtgtgagaaaaaccttattgtagacataaattgataataaaaattggtaagatgtataatgaacaattattatctttgagaaaaagagaaaatcttgcatagatttctccttaagaaaaaaagttcttttagtgacaatttattatctaacaaacaattctagaagatctacaattcaaaaaattagcatcgggatgtctttgttgttattggagaatagttttataatcctcttcctaaaatttcagtgtatgtaaaaaaatttgtcaaaatttataatttgtgttaaaaagtcagcttatatgattaatcgaatttttactataaagaatttactttaagattaaagaaaaaaaagcaaattcaagttcatgtaagaatttgtaaaaggaagacaaaggcaaatgatagaaaggaggaatcagggaatgaacaaccttctaatctacataaaaacaattattacttaaaaaaaaaacacttcaagtgtggaacaacattttttgataccaaggaagagtaatttaaagattggatgatttttcttagaggagtattgggaagttgtggtgttgtaaatgattactatttgaaaaagttgtgtttttctttaaaaatatattttaagatgatatgattttttgttttataatatttttaagaaaatcgaatttgagataaacaacaatttggctgttttatctacataataatagatagattagcatagattattccaaaagctaatagggtatgcacatttattgcaacatggacattgattgtctttcttttcaaagcattataatgatttgtcacgtgtgttttttcttccaaggctctaatatttcttggttgtgttacttgttgatattgccttggtgttggaatgcatgtgaggcaatagacatgtcctctttagatgtatgatgatattaagaatggacaaagaaatttttatttttttttatatttgacacccacttaggtggatgtatgttttctatagaaatgtgttgttattgaatggacaatataaagtttagggagatctcttagcactttaagatgtgagaggtgagactctattaatcctttggtttgagtgttgacaccctcaagttccttttcttttctactttttcatgagaaaatttcactatttaagtgtattctaagtgtgctagctaggcatcacactagttaatatatcgaagttgattttttctattaagtatcataaagaaatcattatcttttccttgtttttacaatttgtatatgcgattttattttcacttcacatttgacttatgctctacacttgtaggcccgaacatcgttgtgctcataactattgcttttcctggtggaaaaaggtagttttacattatcaatcatattgtttcttgaatcctaacctcaatgattggatcttggtgcaaaggattttaaactccatttggattattgaacgtaatgggaaaaggaaaaagcaatatgatggaagctccaattctcttgtttgtattgtcacaaaaaacatgaaagaaaatgaaatataatgagaattattgaaaaccctatgcatttaaaattctttattctctaaaataggaatagtattggaaaaacaacctagtaaaaaagttaatatgttcaaattgatattttctttttttttttccttttttttttctttctttctctttttcctccttgttttcttccttcctatacttccttaatagtttccatgattcaaatgtagccttagtaaaaatcctgaatatgagaatatactctagatctaaaattctatcaaatttgagggtctcaattaaaacaatttcatgtgattttatttatgaaagataggggaaaagccagatattgatgtgtaggataatgttatgcatctagctgcaaaaatcctgcaaactatgtttgataatacccctctttatcattaaggaagcctaattttagtaaggacatgtccttttttctttttcatgttaggaatttcgattggaatttcaaaaaagtaaaatcaatgaataatgcgaaaaagtaggaagagctagagttcatttataaaacaagaagtttgaagaaattatgatactcaacatgagaactaatgtgttatcataggatcaacaaaatggttttcttactttctaaaaattttcaattttgaatcatttttgagttttaaattggtaacatacttgaaagataaattggacatatttaataaaaaatttctttgtatcctctttgtgtgcttttggttccaatgcaacagttcttttgtttggtgatagagaaatctatgaatagcatgtttcttaattttggaaatttctttttgttctaaagtaacttctttggagtgtcataatggatcttaaaacttatgatactcgaattttgttttcactcaactgtcaacaggatttaaaattcaattcatttattgaaccttggttatatctattaattgttctttgttagtatgttggtaaaccaatgagacaggaaggtgatgcaaaaagaagagccaagactttggtaacccaaaagattctgaaaagtataatgttaaggcgcactaaagaaagtagaaaagaactttgccttccaactaaaattgtgggtgtagcttttctaactactttttcataaataatatccttgagctattttttttttcctttttttgtctttttttttttttgattttcttgtttccttattttttataggttagagtgagacgatgtgcattagatattagagaagaagagtattataagacactatatgaaaaatatcgatcatattttaacaggtgtgtcatccttccacaaccaagttctataccatatctcttttttcctttttttctttagtgtttagctataaaatcaatttgttattaacttctttcgatatgattctttcttctcccaagccctaagacttggctaaaggaaggttctaggtttcacttcatgtgctagtacacggatacatacataaacacatatatacacatatgggcatgaatgtatagaatgtttccctttttcgattaacctaacattttttttttttgaccaaaatttacaaatatgacatcatatatattagttaactatgttgtagatttcataccctttctctagccttttggctcttaatgaattatctttacctatcaaaaaaaaaaattgttgtagatttcatacattttagc

SEQ ID NO: 11995 - DNA, 28005 bp, Vitis vinifera
  Intron number 7 from transcript GSVIVT01013548001 (locus G SVIVG01013548001) derived from phytozome v7.0 (chr-ID chr5 ; pos 20549146 to 20577150)
ccccagaagtacttcgactaggtcgtgtttgtcaggtgagtttgttccaaaagtgtcttagtatcctatgtgaagaaatatgagaaagaaaaaatgattctatttttcatttcttgaatagagaagaaaagacactgctatatataatggggtggctgaaaataccaccccattattcacgggatacaactactaacttacctagaaagactcactaattttaggaaacaaattgcctatgagattttgtaaaatgctaccagaatctgcttattatagaaaataccaaacaaagtcaactagtaaactaatttacagttgtaaacttctagaaatcagaccaataactgaaagatttccacacttcctctcaaattgggttgtagatgttgatcaagccccacttgatatacaaatctgttggaagataatttgaataaaatcaaatcattctaattatggacagattctgttttaaatcagtagccaaataatcaacaattatttggctgttatttgacttttttgattttgactttttgattaggagatatgattttattattcctagaattaaggcttatttcatgtcttgctatgtataaattatagtttgtgactttgttttattttcaataagaattcggtgaatgctagttttttctcatgatcggtgacatgatattagagctagccgacttctactggagaaaaaacaatggtcaaaactgccatggctggagcaagcaggggtagtgtctcagagtagctatctgacacttctcagacacctcctacaattgcttccaccatcttaacctcagaaaatgctctgctacaaattacaaaaaaaaaattgaatgggaaatttttttttacaatggtcaagagcagtgctaatggtggttcgaggccgtggcaagctagggtacctgaatgacacctttattgaaccagcaaaaacagatccaacataccccatatgggatgccaacaactcgattgtgatgtcttgtttggtaaactccatgactgacgaaatacaaagcaattatctttgttatcctactgcaaaaaaaatctgggactctctaaatcttgcatattctgacttagaaaatccagctcaagtttttgagttacggaatatggccagaaatttaaatcagtgagattcagatgtgtctatgtacttcacatcactcaataaaatatggcaagagttggacttagctaatgactgcaattggagctgcacaatagattgtgaaagatacagagctcggattaagaaggaaaggatctatgacttcttagcagggctcaacaaggaattggatgaggttcgttgtcaacttcttggaataaagccacttccagttattgaagaaatcttcgcagaggtgaggagagaggagacacgtaaacatgtgatgcttggtggggtaaaaactcctattgttgctgacgatactaatgttccctggcagcccgtaaaaacgacagtccccgtggagatacgagcaacaacagaaaaaacgacaacctttggtgtgatcattatcagagatccaatcacagtcgtgaaaactgctggaagttgaatggcaagccactgaatttcagatataacagaggcacttggagggaacccaagggatatcagaccacctcggatactgaacagaagccaggagagaattttgtcaatatttccttaaacaaggagcagtttgagcagctctacaaattgttaacaccatcctcagccttggtaccaacacaatcaggcactaatacatcccataacccaattaactcatcattcctatcccagaaaggtacattttgaactgctttgagtgaaacaatagaaaaattcaacccttggatcatagattcaggggcaacagaccatatgagaggttgtgcaaggtttttttctatttatactctaggttctgggcacattaaagtcaaaattgcagatggatcccttgctattgttgcagggactggtactataattttagggcctcatataacccttttcaatgttcttcatgtcctaaaactatcatgtaattttctgttgtaagtaaagagaatttttgggaattatcattgctgaacccactgccaaaacagccaccaaacttgttgcctaacccagctgtctcactagaacaactattaaatcagccttctatgccaaaacaaccaccaaacttgctgcctaacctagctgtgtcaccagaacaactattaaaccggccttctcacccaactgaacagccagaacacctccttaaccagtgtttgaaactaacaaaccagaacaacctaacccagctcaacctggggtgtcaacaacaaaaacagattcaaggccagggggagattcactgcagcaaccagaacttcatgtctattcaaggagtaagccgagaatagtagaaaccaaaatggaccaacagtgctgtcaagaatcataaccaattgtcattcctgaggtaagcgaccttgatttgcctatagccatgagaaaaggagttcaatcatgtactcaacacccaatatccaattttgtgtcatataatcatctctcacctcaatttcaagtgtttatttccaaactttcaggggaagaagttccgaaacatatttgtgaaaagagagaaaagggagaatccctaatttttgttattgaaaaactgttaataatacacattagacttgggtatatatatacatgttagtgggacccacaatacaataaggaaagaaaaggaaaaggaaaagtaaataacctaaataactgtacactatctaacactccccctcaagctggagcatatatgttatatgcaccaagcttgttacaaatgtatttaattctaggacctctgagagatttagtaaaaatatctgctagttgatcatttgaattgacaaaactagttgccacacatcctgatgcgatcttctctctaatgaagtgacaatcaacttcaatgtgtttggtcctttcatggaagactggatttgatgcaatatgcaaagcgacttggttgtcacagatgagcttcatctgttcatcatttccaaatctcaactcccgaagaagatgtttcagccatatgagttcacatgttgccagagccatagctcgatactcgacttcagcactagatcttaccactacatcttgtttcttactcttccaggatattaggttacccccaataaaaacacaatacccggaagtggaacgtctatctgtgggtgagctagcccaatctgcatctgtgtaaccaataacctgggtatgacctctgttcttgtacaacacaccttggcctggtgtgcttttgatatatcgaagaatgcggattacatcatcccaatggctatcacatggtgactgtaggaattggctaacaacacttacaggaaaagaaatgtctggacgagtaatggtgaggtagttcagtttacctacaagtcgccgatatctcccaggatctcctaaaggctcctgtcctggtataagtttgacatttggatccataggagtgtctaccggtttacagtctaacatatcggtttcttccaagatgtctaaagcatacttcctttgggaaaaaaccacaccggaactggattgagctatctcaatccctaaaaaatacttgagtttccccaagtctttagtctgaaagtgggtgaaaaggtgttgttttagtttctgaataccattatgatcactgcctgtaatgacgatgtcgtccatataaactaccaaataaatacactgccccgaagagttatgatgatagaaaacgggatggtctgctgtactgcgaaacatgccaaactcttgaacaacagaactaaaacggctaaaccatgcttgaggagattgtttcaagccatatagagaacgacgtaacctgcacactaaaccagactccccctgagcaacaaaaccaggtggtttctccatataaacttcctcagcaagatccccatgaaggaaaacatttttaatatctaattgataaagaggccaagaacgcatagcaaccatggagagcaatagacgaacaaaagctatcttgacaacaggagagaaagtgtcaccataatcagaaccataaacctgagtatagcctttagcaactaagcaggccttaaggcgatcaacctgaccatcagggccaaccttaactgtgtagacccaatgacaaccaactatagatttaccagagggtaaaacaacaagatcccaagtgccattggagtgtaaagcagccatttcatctaccattacctgtcgctagcctggatgggaaaaagcctcaggggtgctcttgggaagagaaacagaagatatagcataaacaaatgcagaatagggtgaagataattgatggtaactcaaaaaattgtaaatgggatgaggattacgagtagatcgattacctttccgaagagcaatgggtaagtcagcagaaggaggcagagccggggcaggagaagccgaagggataggaagtgagttaacaggtacctcggccaaagaaggaggaacaacgacacgatgacaacgatgataaacctgaaatgggcgagaaggcattgcatcaggtgggaagataatgggaaggggtaagacttcagaaacaggaagagactcagaggtggagaagaacggtgagtcctcaaagaaagtgacatcagtggagagaaaatagcgatgagtctcagaggaataacaacgataacccttttgaagtttgaaatatcccaagaagatgcattttgtggctttggcaaaaagtttgtcctgtccaggagtgagaatatgaacaaagcaagtacaacaaaaaacatgaggaggaaggaaataaagtggttggtcagggaaaagaagggaatgaggaatctgatcgtgtaatacaaatgagggcatacgattaattaaataacatgctataagaacagcgtcctcccaaaaacgaaaaggaacattactatggagaaggagagtacgagctgtctcaacaagatgtcgattcttacgttcagctactccattttgttgaggagtataagcataagaagactgatgaaggatcccatgttgggacataaatgaagtaaatggtgcagaaaaatattccctggcattgtcattgcacaacacacgaatagaaatattgaactgggtttggatttcagcataaaatttctggaaaatagggaataactcagttcgatttttcattaaaaataaccaggtacatcgagaatagtcataaatgaaagtgacaaaatactgaaatcctaaagtaaacgcggtccgacaaggaccctaaacatcagtgtggacaagttcaaaaggagactttgcctgattattcaaacaatttaggagcgagacacgagtatgtttcccaagctgacaagactcacacgcaagcgacgacagatgaaaaacgagggaccattttctggaacttggatagactagggtggcccaggcgactgtggatgaggaggggagcatcagtggaaatgcaaactgcaggagttgaaggtgaggtgaggtgataggggccttgagactcacgtcctatgccaatcgtcttccccgtactccggtcctacaaggtcacaaatttatcagagaaagtgatagaacagttaagagtgcgagttattttgctgatggaaataagattaaaaggacactcaggggcataaaggatagaatggagaggtagggaagggagaggatgagcgaaaccaaaacctttagccatagtttgggacccattagctaaagtaatagtaggtaagacagaggtagtagtaatggaagagaaaagatccttattaccagatatgtgatcagaagcgccagaatctagaatccaaggtccaagagaagatgtgtgggtaagacaagtagaagcattaccagtctgggcaacagaagcaacagaagctgacttggtggcctgatagcggagatagtcatcatactcactgtcagtgagggaaataccctgagatgtggaggaactggaaggctgaggcaactgaggattagatgactgggccacgtgggcagtacggggaggccgcccatgtaactgataacaccgatcatgagtgtgaccaagcttattgcaataggtgtaatgaggacgttgacctctacctcggttaccactacgtcctcctcgagagttagtttgagaaactaacactgaagaatctgaagtgttatcagatggcaaagtctgagtggaggagatacggaggaggcgggcaaacacatcatccaaggatggaacgaaggaactgccaagaatctgatcgcggacggtctcaagatctagacggaggccaataagtataagaaccatgaagaacttgtcaatctgtgttcgttgatccccaacattagtagtatgaggcatcacaatcaagaattcctccttaagagaggcaatctggctgttaaaagagagaaaaaggagaaaaaccttaattctcattcatgtgtttttctacttacaattgagagatatatatatacaaggctaggagtcctaactaccatacatgtgatctatattaacaaggaaagataatatactataaatacattatattcaacactccccctcaagctggagcatatacgtcatatgcaccaagcttgttacaaatatatttaatcctaagacctttgagagatttagtgaagatgtctgctagttgatcatttgaattaacaaaacttgtagcaacacatcctgatgcgatcttctctctaatgaaatgacagtcaacttcaatatgcttggtcctttcatgaaagactggattggatgcaatatgtaatgtggcctggttatcacagatgagtttcatctgttcatcctttccaaatctcaactcccgaagaagatgtctcaaccatatgagttcacatgttgccaaagccatagctcgatactcggcttcagcgctagatctggccactacatcttgtttcttactcttccaagatattagattacctccaataaaaacacagtacccagaggtggaacgtctatctgtgggtgagccagcccaatctgcatttgtgtaaccaacaacttgagtatgacctctgttctcgtacaatacaccttggcctggtgtacttttgatatatcgaagaatgcggattacgacatcctaatggctatcacatggtgaatataggaattgactaacaacactcacaggaaaagaaatgtctggacgagtaatggtgagatagttcaatttacctacgagccgtcgatatctcccggggtctcctaaaggctccccctgtcttggtacaagtttgacattcggatccataggtgtgtctaccggtttacagtctaacataccggtttcttccaggatgtctaaaacatacttcctttgggaaaggaccacaccagaactggattgagctatctcaattcccaagaaatacttgagtttccccaagtctttggtctgaaagtgggtaaaaagatgttgctttagtttctgaatatcatcctgatcactgcctgtaatgacgatgtcgtccacataaacaaccagataaatacactgccccaaggagttatgatgataaaaaactgaatggtctgctgtactacgaagcatgccaaactcttgaacaacagaactaaaacggctaaaccatgctcgaggagattgtttcaagccatataaagaacggcgtaacctacacactaaaccagactccccttgagcaacaaaaccaggaggttgctccatataaacttcctcggcaagatcaccatgaaggaagacatttttaatatccaactgataaagaggccaagaacgcatagcagccatggagagaagcaagcggacagaagcaatcttggcaacaggcgagaatgtgtcaccataatcagaaccataaacttgagtatagcctttagcaactaagcgggccttaaggcgatcaacctgaccatcaggaccaaccttaactgcatagacccaacgacaaccaattgtagatttaccagagggtaaaacaacaagatcccaagtaccattagagtgcagagcagccatttcatccaccattgcctgtcgccagcctggatgggaaagagcttcatgggtgctatttggaagagaaacagaggatatagcagaaacaaaagcagaatagggtgaagataatcgatgataactcaaaaaattgtaaataggatgaggattatgagtagagtgagtacctttccgaacagcaatgggtaagtcattaagagaaggcagagccggggcaggtgaagccgaaggaataggaagtgagtcagtaggtgcctcaggaaaagggagagaagcaacgacacgagggcgacgatgataaacctgaagtggtcgagggggcatagcatcaggtggggagacaatgggaatgggcaagacttcagaaacaggaagagactcagaagtggtggaaaagaatggtgagtcctcaaagaaggtgacatcagcggagataaagtatcgatgagtctcaagggaataacaacgataacccttctgaagtctggaatatcccaagaaaaggcacttcatggctttggcggaaagcttgtcctgtccaggagtgagaatatgaacaaagcaagtacaaccaaagacacgaggaggaaggaaataaagtggttggtcagggaagagaagggagtgaggaatctgatcgtgtaagacagaggagggcatacgattaatcaaataacaagcggtaagaacagcgtccccccaaaagcgaaaaggaacgtgactatggaggaggagagtacgagctgtctcaacaagatgtcgattcttgcgtttagctaccctattttgttgaggagtatgagcacaagaagactgatgaagaatcccatgatgagacataaacgaagtaaattgggctgaaaaatattccctggcattgtcactacgtaacacacgaatagaaatattgaactgggtttggatttcagtataaaatttatggaaaatagagaataactcagctcgatttttcattaaaaataaccaagtacatcgagaatagtcatcaatgaaagtgacaaaatactgaaatcctaaagtagacgcagtctgacaaggaccccaaacatcagtgtggacaagctcaaaaggagactttgcccgattattcaaacgctttgggaacgagacacgagtatgttttccaagctgacatgactcacacggaagcgacgacaaagtggaaaaacgaggaaccatcttctggaacttggagagactagggtggcccagacgattgtgaatgaggagaggagcatcagtggaaatgcaaactgcaggagatgaatctgaggtgaggtgatagaggccttgagactcacgtcctatgccaatcgtcttccccgtactccggtcctgcaaggtcacaaatttatcagaaaaggtaatagagcaattaagagtacgagtgattttgctgatggaaataagattaaaaggacattcaggagtataaaggacagaagtgagaggtagagaaggcagaggaagggccaaaccaatacctttagccacagtttgagaaccattagctaaggtaacagtaggtaaatcagaggtagtagtaatagaggagaaaagatccttattaccagataggtgatcagatgctctagaatctagaatccagggtccaagagaagatgtgtgggtaaggcaggcagaggcattaccaggctgggcaacagaggcaatagaagcctgagatgtctgagatgcggaggagctcggaggctgaggcagcggagaatcagaggactgggccatatgggcagtgcgaggaggtcttccatgtaactgatagcaacgatcgcgagtgtggccaagtttattgcaataggtgcaatgaggacgttgacctctacctcaggtaccactacgtcctcctcgagaggtagtttgagaaactaacacagaagaatctgaagcgctatcagatggcaaagtctgagtggacgagatacggaggaggcgagcaaacacatcatccaaggacgggactgatgaacttccaagaatctgatcacgaatagactcaagatctggacggaggccaataagagtaaggaccatgaagaacttgtcaagctgtgtttgttgagccccaacatcaggagtaagaggcatcacagtcaagaactcctccttaagagaggcaatctgaccaatataagtagatagatccaagtcctgttggctgagatggacaatagcagaagccaccttataaagacgctggatatcattcgtgtataatcctttggcctgagtccaaaatttaaaacaagttttataggcctgaagatgaagaagaatcctgggatcaaccgattgccataatacactacataactgtgcatctatcttcttccactgtacgcggtcaacctcagggatatctgcctcctgggtaaccaagtgatcctcatatccttgacccataaaccaaagttcaacagaggcagaccaggagcgataattctcactgccaaccaatttctctgaggtaatcataggagatccagagataacagaggtaaagatctgatttttggtggtcatattcacgtatttggatcgaagagagccctaatacgacttcagattgtggtgtggcaccaccgaaaaagggagacggcctcagatcgcgacatggtaccaccaaaagggtagaagaacacttcccaaggcacgtgcagggattggggtagagaaaaagtagccggaacttcgccggaaaggctgtttggagggctgacggagacaaaaatccccaaaagaggtacgtgcagggctcggatgggagaaccaggtaggtagggatgctggtcggcatcaggcgaggctggaggaggaggcgcgtcgccggaaaaggtctcacgcgccctcacgcgccggtgcgtgagattcagtcgtcggccggagaagtgcgcgtggccggcgcgtggagggttttctggctccgatgcttttgaagaagttggagatctcctccaggcgctcctcttggtgtggtcggtgtcggaaaaagacgtcgccggaaaagttcgccggaaaaggttgccggcgtggtggagatccgacggcgatgaggttgtccggagtggttcgggaagaaaatgaggggactggagtgaaacacggtcactggacggttcgccggaattgattacacggctaaaccgaaaaaaaattaggttttctcctttggctttgataccatgttaaaagagagaaaaatgaaaaaaaccttaattctcattcatgcgtttttctacttacaattgagagatatatatatacaaggctaggagtcctaactaccatacatgtgatctatattaacaaggaaagataatatactataaatacattatattcaacactggccaatataagtagataaatccatgtcttgttgtctgacattgacaatagaagaagccaccttataaagacgttggatatcattcgcgtatagccctttcgcctgattccaaaatttaaagcatgttttgtaggcccgaagatgaagcagaatcttaggatcaactgattgtcataacacactacataactgtgcatctatcttcctcctttgtcaacctcagggatatccgcctcctgtgtaacaaggtgatcctcataaccttgacccataaaccaaagctccatagaggcagaccaggacaaataattttcattgccaaccaatttctccgaagtaatcataggagatccagatatgacagaggaaaaagtggaacttttagtagccatatttacttatttggagaacgaaatatgtttggatcgaagagagccttaatacggctttagattgcagttgaaagaagaaaaatcgaggatttgtggctgtgagagaccaaatagtaaagaaaaacaaatatggcactactggaagggtggaagaacacttcctaagacacgtgcagggctcggggtggagaggaagtcaccggaggtcgtcggaaaggcagccttagaggaccggcggagacaaaaaacccccaaaaaatgcactttcagggctcggatgacacaagcaaagatggaaggtggctagacgacgtcaggcgaggctggaggtggaagcgcgtggctggaaagtgctccacgcgccctcatgcgccggcgcgtgaggttcaggccgccggagaagaaaagcgcgtggccgccgcgtggctgagaatctccctccggtgctttgagaaaacttgaagatctcctccttgcgcacctgatggtatggtcggtgtaggaaaaggacttcgtcagaaaaaggtcgccggaaaagtcgtcggcggtgagggttttctgacggcgatacggttgattggaaaactttaggagatgggaaaggtgaccggaatgaaacacggtcactaaaagatttcccataatggattcacggataaaccgaaaataattagggtttttttctccctaggctctgataccatgtgaaaagagagaaaatggagaatccttaatttttgttattgaaaaattgttaataatacacattggacttgggtatatatatgcatgttagtgggacccacaatacaataaggaaagaaaaggaaaagtaaataacctaaataactgtacactatctaacaaaattcatgagactctacaagatcctcaatggaaagaggctataatggaggaaataaaagctctggaaaaaaaccgaacctaggatttagtagacaagaccaaaggaaagatgtctgtttgtggacccgcatttttcacgtgcgtccccactcaatggcaagactcatttttattggtgaaaaattagttttggaaaagttggagtcgccacttattttattttattttattttaaaagagaaaataaaacaagaaagaaaaccctaaaaaagtgactccatagttttggaaaaacaagtcttgaaaaacccgagtcttggtttggggatcaggttacctattgggaaggtacctctaagaggtagcacccctctaagccctaaagaggtctctaatgactaagttgagggaaaagtgacaattaatcaattgattgaaggtacttaggtaggctaaggtgattccaaaactagtatgccaaaaaagaaatcaaatcacaatcacaaaggaaggttaagatgtgtacctagatttcttcttaagtgctatcataaaacatcaaagttagtatagaaatatagcgcacaacatgtgttttacctaagcaaatcaagcatacatctaagcacccaaggattatatcaagtatggatatagtcatcaataacatacgtgtccatagaattctcgaaagtaggtgagagggagcgtacctagatagcaagttaatacgcctctatgggaaacaaggttagtcctataacagattcaaaataatctcatgtaccccaaggaggaagcacaatcaatcaaatattgaacaaacaatagtgaagaaaatatcatggatgttgggcccctaccaaagccctaattacttttgcatgaattggttcaatgagttccattattgggaatcatgaagtttattcatgcttgtttaagaaaaacaagaaaattagtagaaaatagtgaaaatgcgtgctagaaggaaaatggcagcaaatagtatgttaaaatctggattttaagcctagaaactcctaaggaattttaaagaaaactagagttattttgacagaaaaaggttttgaaatctggatttaagatgtgtaagatcacaaagagaaggaaagaaaaaagaaaagaaaaagattaggaggagggtaatgtgcaccaaggtagccaatgctggagtgaggtctgggaatgtacttgagactacattgctgaaatgaattgcatggggagaacactgcagatcgctggttgtctggaaagaaactgaatgtattcgtttcagagcccatgttcactgggttttagtggcattactagaatatcttcaatctgagtcgcatcaaaaggttcttcttcaataacagattgctgctcaaataccattaaagaataggcaagtgctccaattatattggcaactggtgaggctaatcggggggattggggaagttctccaagatacattattaaagcagacatcccaccgcagatgttcgctagagctcgtgttgcatgcccctgtagagcttggccacactccccttgcatgaactctttagatggagcaactatagccccaatgagaactggcacaccatctgcatccacaacagctttcttagctctggttgactttgaagaaagagcctccaaagcatcagcaacactgaatctagcatttcttgaccccaaatgcagcacagctattagttgattcaaggaactgattgatgctttgtaacgaagaagatcaggattgctaaatagtattctcaacagttcagacactatggcctcagaagagtcttgagggctcaaagacaagtacttggttagaacatccaatgctccagcttcagccatgatcagtttgtttgtatcacttccatctgcaatacgagtcaatagttgaacagcaattggaggggcacctggcctatctggaattggtctcaaaagatccactaatagaggcatagatttgcgagcagtggaaccaactcttatgtcttcaatttcaaaaagattttccagaacaacttgatcaggtttcctaaccagacaaaactcttcagataaagcaacaaggtttggcatatctgattctatgtaaccaattagggttattaactcagcaactgcacctgaatttgcaattgtaagatttattcccctacttccattacaaacaagactagccattgcctgggcagcaaagaatctgtcaatcacttcatcagatttcattaaaagtgcaagtgacggtatgatgcgcatggtcttcaaggttacaaaggaactcaacaaaagtagcaattactctaattatcttttcaaaccagtcaatttggtccaatgcattctctccctaactttgaactcaatgagtgctcttggatccaaccaggaggtcatgattatccatgtaattagagtgcagggtgtgtgccatgtcaacagatacaagaaaactcctctgataactactgatattttaaactggccactagatgtactatggtgcatgccacacaaggttttggatgaagagattgtgtgagaaaggtgtggcgtctgtaacttgtcaatgaatcatggaaagccacttggattttaagtggataatgattaagatttgaaaagcttccaatcccaagatagtggacctaggatgctaaaaaggatgaaattgacgtgttccaagatggccatgcataggtgggggccaaggatgcaatctggggtgcaccatctgcaattggcagcaggttgatcatttgtcaagtaaaatctgggattattctagacatgttcagatatctcgaaaccagacatctcatgccattatggttacccaaacttggaggaagtgtgaaacttgccccattcatgtaagtgatcctcaagtcattcaatttttccaaatgatagatgctattcagggataggtcctttcattctatttggattatgaccgtacattctagaatcttccacatggttcttttctgttcaaaaccgcaatcccatattcatagctgttccaaatcccattatcatttttcttaatgccgctcaaaacccccactgagattgtatcctgctcctgacattctgcacctcatatctagctcccacccgaacaacatcttagtttcgaacagacactttaggcagagattctgaaaattctgatttgcaagtgatttcagcaaagtgcgagaaattctatactgaagcaactgctgaaacgctgtatggaattagatcattatcaagggaccggtggatttctcaatgctactgtccaaatggcattcaggagctggaaccaaaggcttcccattccgaaaataggtatagaagaatgatctaggtcacccctggtgagtaaccaaagtcactatgctcacaaatctcctcctattgagttggttcataattctgacctgaacctggattcggatgatgaccagatccaagtaaagtaacatctgaatgaggttttccatgcacatcgaattcatgttgatcaatatgcccattcccgttatatcccaactttcccaagtgcctttactatcactcgtccggtgagtaacaggtttgcctgaaccaatgtaaatggagtgaggtaatatgaggggggttgtcctcaaacccttggaaggccttataggtcataatagattgagagaaaccataggaactggatgcatcatattccaaaaccagtaagacttgattgctgtccttcagatgtcacagttgctgtaagttgcttcttaggaattagttctattttcttgcagcaagaacgaggatgcaatgttggcatttggggttgaactactcaaccctcggggagctcagtgcttaatgttttctagtcttgattgcttcatgttaagggttcatctcaagtcatggaaagacattccttcttcatacctgatgaggattgatggctagaagcaaaccgaagcatcttatcatatagacatagggttatggtatatgacaccattctgaagcaagtgttgtgatctggaaaactgcatctgtcaactggaccacttcctacggtattcacaaatgcctgagaactcccagaaacgatggaggcctctacatctatctaaccccaaacaacccattgtttacaatctttataaagtctccatctttctagaaatactcatgccattatggtctctggagcccagaacatcaaagaaagggaggcgagtgaaatgtagatgctgaagcatggaaaaaataatccaagaaaaacagaggaaggaagacaaaggatgggtaacagacaaaccagattcaattattttgtcaaagggcttaaaaataggtgtcaatagcagagagcaatggctttatttttttttataaaattctcaactcagaaataatcgattcattaatatttacgaaggagtcaaagggtacagtgtaaaaccaagataaaatatgcataaaaaaaaaaacaaaaaacgaactcagattcaacacaaccacatggcccacctatgaccatacccaatcaacaggataatgcctaagaatcaataagaagtgaagtaaaacaatgaaaaagattgaaagacaagaatatccaatgaccatacctggctgaatcttcacccgagcaagatctgcccagcttgtagctcccttcttcctattcccccgctgctttgccttgcctctcctcttctgctttgccttcctttgtctttctcctcaccaaaattgattcatcctcttttttatttatttttattttattttgtttttatatatttatccgttttttccaaaaggaaactttcctttctctctccctttttccttttcgtattttttgttttctttgccatccctcttacttgtgtcaaaattcctcctaaaaatcccttcttctagtccatgaatggaaacttttggttgcaacctgtgtgaaccctccctttttccttttgttgccaatccccccatggaaataatatatgtgctgtccctctaaaaataaaatctcccatttttcaaaattctggtgaataatgattttttaaagtggcctccttccttgcaatattctggtgcatccctaagtggatagcagcctagtattctctaatattacctcatcttctaccttccagaattcggcccgtcctcttgttttaaaagtcaccaatctaaatgaagaaaacctaaactaaactcaggaggctgccaatgtcacagtaagagtcagtataaacccctcaacaaagtccccgaggtggctcagagaaggcatatatgagtagtaatgagccaccagggaattattgtaaagtactgaacaaaaaacttagtaggacatgtgctaggaaggcaaaatggagggtctacactgttggatgcaaatgggtgtttgctgtaaaatataagtcagataggtccattgaaaggtacaaggcaagactagtagctaaggaattcactcaaagttgtggtatttattatcaagaaacgtttgccccaattgccaaacttaatatcataagagttcttttatcccttgttgcaaatctgaattggcaacttcaacaactagacattaaaaatgcttttttgaatggagacctagaagaagaagtgtacatggaattaccttttggatttgatcagggaaggaagggaaagtttgcaagcttagaaaatctctctatgggttgaaacagttgccctgtgcatggttcaagagatttaccaagaccatcatgatgcatggacatacataggctcaatccgatcataccttgttttatcgtcacaatgatggtaaggtcactattctcattgtctatgtggatgactgggaatgatccaatggagatggaacgattaaaagagaagttggctgctgagtttgaaactaaagatctaggacctctgcgttactttctagggatggaagtgacaaggaacaaaagtggaatatcaatttcccaaagaaaatatattctagatcttttgaaagaaatcagaatgctaggatgtaaacttgtggacgctccaatggatctagtaaaaaagattggagaacaaaaagaaagcacacctgttgacactggaagattaatgcctagtagggaagttaatttatctttcccacactaggccagacatcgcttttgtagtaagcgttgtgagtcaatacatgcatgctccttgcgaagagcaaatggaatccgtgtgtaaaattctgaagcatcttaaaggatctcctgggaaaggattatgcttcaggaaaaatgaaacaagaagcgttgaagggttcacagacgcttattgggtagactccatagatgatcgaaaatcaacttcaggctattgcacctttgtgtggggcaactttgtgaattggaggagcaagaagcaaaaggttgtcgctagaagtagcgtagaggcggaatttcgttctattgctcatggtatgtttgaactgttatggtttaaataacttttaggagaaattggtgtgaaggaggagatgccaatgtgaagatgtattgcgataataaggtgaccatcaacatatcacacaacccaattcatcatgaccagactaaacacgtagaagttgacagacactttataaaagagaaggttgaagacgatacaatttgcatggtttatgtatcaacaaataaacaagtagcagatgtactcaccaaagcactatcaagaagatcattcgagcagctaatagacaagctgagtatgttcaatttgtacaacccaacttgagggggagtgttggaagataatttgaataaaatcaaatcattctaataatggacagattctgttttaaatcagtagccaaataatcaacaattatttggctgttatttgacttttttgattaggagatatgattttattattcctagaattaaggcttatttcatgtcctgctatgtaaaaattatagtttgtaactttgttttattttcaataagaattcagtgaatgctagttttttctcttgatcaatgacaaaatcttcaaagttgatccttggtggggatatttgctttttgaaggcatgttggtgtgtatgccattgaattatctcttcttcttttttttcctttatgaaatgatgatctatttccatatgttttgttctattatgataaattgggttcttagcaatgcttatgatagactgtttgtctcaggacattttcataggtttttcaactgagattctcaattctcttagtacctttctcatccatattccttcacacatgtcgtgtgtcatgactctaaactcagattctatactacttcttgacacaacatattgtttcttgcatcaccatgtaaccaaatttccccatgcataggtacaatatccaaatcttgaagtctgttactgatttgacccaatcagcctgtgtgaagatttcaagatctttgctccttgtcttcttgaagtataggcccttccttggtgtcacctttagctatcttaggatttgatgcacaacctccatgtgttctttggttggattgttcatgaattgacttaccacactaatagagaaaccgatataaggtctagtgtgagaaagatatatgagttttcccactaatctttggtatttgcctttgtctaccagtgcactgtcttatttagctcatagtttagttgttaaatccatcaaagtcttaatagacttgcattcgaccatccttgtttccttaagtaagtttaggacatacttctgttgagaaacaaaaatatcatttcttgattgagcaacttccatactaaggaagtatttgagattactcaagtctttgattgcaaactctttggctagaaatcccttaagtttgcttatttcctcctcataatcccctgttagaatgaagtcatttacatgcatgatgagaataacaatttttcctttaggtgagtgtttgacaaataaggtgtggtccgcatgacattgagaatacccatatctctttactgcctttgtaaaattgtcaaactaagctcttggggattgcttgagaccatataatgactttttaagcttacacactttgttgatagtaacctgtgtctcaaagtcaggaggaatttccatgtacacatcttctttttgatttccattgaggaaagcattctttacatctagttgaagaggccaatcaaagtcttctgccaatgataagagtactcggattgcattgagtttggctactgagggaaaatgtttcatggtagtcaattccataggactcaacgaaccccttagcaacaaaccgagccttgaacttgtctacacttccatctgccttataatcgtgaatatccctttacatctcactagatgttttccagttggtaaatttgagatttcccaagttctatttttctctagtgcatgaatctctccccaaatggtggctttccatttggtaacattagagcttgttggatagtgttagggatctgaattttgttgagattgttaacaaaggcacaaaaagtaggtgataacccttcataagagacaaaattatagattggatgacttgtacatgatctcacactttttctgaaggcaataagacaattaagatcatcattagaaagctcactactggaagattcagaactagtgctacctggtgaaatttcaattaatcttgaacttggatcagactcgtggatttgcttgggaagtgttcattgctcataccttcttgattttttttttcttttttttcccttggatagacaataagctcactattttctgcaggttgagtggactttggatgttgtgaaggacttaagggacttggaaagggattttaagtttcggcttgagggatttccagttgaggacttggagtaggaatagaagactttagtgatttagtttgagggacttaagaactaggattagtagatgaatttgaaggacattgagacgagtttggaatattgacttcaatatcccaaagctagtatttctatgtgtaatacaccccttgaatatcgaatttgggatagtaaggttattgttaaaaaaatgtgatatccatggagttatagtatctttatgtgattggtgaatagcacttgtgccccttttgatttggagagtacctaatgaatatgcacttgattgctttgggattaattttgcttcggttttattggtgtatgtgagcaaatgctgagcacctgaacactttaatgggaatggtggaaataattcgagttctaggatatgaattgagaaggatttggcaaagtgtttggaagtttagaactcgagagggcattctatttatgagataagttgctgtaagagttgcctcaccctaaaaatgttttggaacatgtgtatagagcattagtgatctagcaatgtttagaagatgtctattttttctctcagcaacctcatttcgttgaagagtatctacacaagaactttgatgtactatgccttggcttcaagagataatcaccaaggattgatttaaagtacttttttgcattgttagttctcaacacttgtattttcgcttggaattgagtttgaatgatattcttaaaaattttaaaaatctaactagcttttgatttttctttcatgagtaatcttattgtgatcatcaacaaaagatataaaccatcgagttccaatgatgttttttattcgagaaggcccccacacatcactatggatcattgagaaaggacaagacactttgtatggttgattgggataggaattatggacatgcttggaaaattgaaaattttcacactaaaaaattttggacttttcaatgaaggaaaaacattttgatcaaaaagaattttctttttctcaagttataagaaatttgggaaacaactccttaaaatttcaactgcactatcattattagaattatcaactgaaaaagaactttcatgaaatagacatttgacgcaacataattagccttgtgagtttgtccttcaagcgaatcatcaactttgaggatatagagccttgaacacatctcaacaccgccaattgtcttccccaaatccaagttatgaaattcacaggagttcaggaaaaatttagtaacataattgagttctcgtgtgagtttgctaatagacggtagattacagtccaaatttggaactaagagaacaaaatccagggtcaagttctttgaaataataattgagtctgtactagtcacctttgagagagatccatctactatcttaatagtaaaattttcatggcatgggctatatttatggaaaatagtagcatttccagtcatatggtccgatgctcttaagtccacaacccatagactcatcttctctcttttaacatttaaggcatttaataaatttcctctatgctaaggacctggttccaatcatagaggtgacaggagcttattgtgattgaccaaacatttttttgcagaagttctagttgttctttgttgaaaagactaggttcagattgtgtggagttctcatcaatttgttggtttaccatgaatcttctaataggtttctttggtgtgcctaggtctgcgatagtgatcacaacatggtcttcctttcttttgtcgattgtcattgctatggtgttgaatccttggagcagcaagggcagaattttctatggtaggtgtggcattttgtgatcccatcattaccttttttcggctctcttctcttcagacttctgagaaatcttctcggatattgggcaaaggcttcaatcccaacactctctcttgagtgatggacatggtcatatagaatactttcaacttaaacaattttaatgtattttcatttatggagtaggtctccttagtggcatcccatattcctttgttgttccatcgagtagaaagttttctccaatatcattgatcatggagttgataagctagggcatgaccatgttattctttttttttttatatataagtaaacacatagaaaaaatatatattagaagaaagggcgtcttaaggctgactcaaagcatacagggggtatacaagaggcgccaaaaagcaagaacaaaaagaagaggggatacaaaaaatcaccaaccctcatctagaacccaaccaatcaaaaaagttgattaaaggaagaggtccttcatctataattgacttagtccaaagccaaaaattacatacaaaacaatttttcatcttatgaatcgaaagcttctcattttcaaaagtaattttatttctttccttccaaaccacccaaaaaaggcataaggggcttgccatccacaccttactatgcttcttgcccatgttgataccctgttaaccaagaagagtatctctaaccgaataaggaaggacctacatcacttcaaaaagagaaaacaataactcccataaaactcttgccttggtgcaatgaattagaatatgatcaatagactcttcttccgcacaacaaatgaaacatctattagctaaagtccaccccctctttttaagttgatccaaaattaacaccttaccctaagaggcttcccaagcaaaaaaacccactttagtaggaacacaaggacgctaaatgatgctctttggaaactaaacaacacttcttgaatctagagcactataaagagatttgatagaaaaaatcccatccttagtctctttccacaacaccgtatcttccaaattaggattaagccttcttccttatattgtcacaagtagcctttctgcatgaccatgttattctctgacttccatgatttaaatttcagatcttccttcttgggaggaactacaaccctggtaagatgtgagatgatcatctttcccttttccacagatggacatcatgacatattgggaccattggagatagttgtgcccattcagtttggggcctgtaattggaagaagattgccatctgattctccattgttgtttgagacgacaacttcttgattggaggcgacttttgaggttgagctctactttttagtggccattcagtattttgtcattcggataactaaggtttcagaggaggctctaatacatgtagaaatgtgagaagaaagagatgattctattttttatttcttgaatagagaagaaaatgcactgctataaataatggagtggctgaaaatagcatcccactattcatgggatacaactactaacttacctcgaaagactcacatttgatggagatttgtttcaatagtagagagagattcatgaaaattacagaatttgttacaaagaggaaacccttaattctagttgttctcgagggtgttaaaggcaatgggtgggaagcccttaggaaggcgatttcttcagtgcaagatttttctgatcaagctgtaagagccttgaaggagacaattgaagattttcaagcgagtaagggcatttacagaggatgtcggtcctatgcagatgtggttgtaaaggaaggacctaggaatagagctttgttgccagttggaaaatgggccagagctgtaatttgtgaaagtaaatgaaaagttcaagattgggtttatgtaggaaaagctattacgaagatgatgggtacgaaggaatggtgtttgtaacccctatttccgcttacaaggggtgtttatttgtggattctgcaaggagggctgattggttctaagatcaggggagtttaatagtgagatgagagtctatttttctgaggagatggtcgccaagagaaaatacggttgtatttggaaaattcagaaggggttggttagaactaagaggtctttcttttcatttgtgggacgaggatcagttaagatacattctgaagaagtgagggaaggtaacgaaggtggcacgggactctttgaagcttgtagacttgtcaaaggtaaagttgtgggtggagatgcttccaaatgtcgtgctacctgcattgctagaggtggaagatgttatagaaaatactaaacaaagacaactagtcaactaatttacaactgtaaaactcctagaaattagaccaatagctaaaagatttccacactacgaaaacagagaataagttgtcaaaatattgtgtgaatgaccgaataccttggccttgagttttgtatattatatatagactttacaaggatgctatacatggaaagcaaataaaagcaaataaattcccgcatgattctagccctatacatgtaaactataatctgtcaaataatgtatgctaactgtacaaaataataaatggagaaataaggaaagaagtgtggacagcaaagctgtcctttgacataagttacatataggttgtaaacctaaacttagaaaattcaacagtcaaggaaatgataatataataattgctcatggaccagttattgttgcatattctaaacaaattccagggcttaagtatcatatatgctatgcttaaatatcaactacagtgcacataacatgcttaatttcttttagttttagatgaggaggtttttccatcatcataataaataatcttgtactatttatgtctttcacatgtcttgtattatatatgtattttgtatgtatgagatgtcaaagcaatgtcaaagtatagtatcgtgaaagaggtggaaacattaagatccaagaaaatatatacttgaaatacaaaatccaagttgaatttgattatccatagaagtgtaaaaggaaagaacaccaggaagagatcttgtatgaagaaaaatttggttgaaattaattccaacttgctgatatattgaatttgtgctaataaattggctatattttgtggaaggatgaaaccagctgatcccttgaacagaattttatattcttctagcatctatttaattttattagtggcaaaagaactctctgcaagttttactagcaaggaagaattaattgccacttgaattttgccttaggagttctgctttcttgattgtacaacccaacaacatgctgtttctgggaagtgtttttctttaaaatttttctgttgcatgctttgtgataatctttcaagatactcctacttgttgtttggttcaagaaaagggagagtagtgttagtatcagtggcggagccacatggtgcctggggtgcattttcctccttgaaattttgataaaaatattaggggtaatgggattggattccttgacctgaaattttgagaaaattagctgtgtaccaacaggctatgcaattagtttgatgttgttttcccccccaccccccgaactaagtttcatatatcgcacccgcccctcctttttcacattataggcttccttttgagtatagaaaacactaatatgcattttaacgttgactaagatccaaaatcatgttgcaaaaactagcctcctaaaactatactgttatttgttttggtcatctaccattattgatttgtaatgaacagatacatatttttaatattgtgcacctcttatttatttatttattttctcatttttgttatttttgagtttattttaaacataaggaacctaattggattcaagttgattccatttttggtcagtaagtcatgatatagatatcagataaaacttcaaaattttctgaaatgggaagtttctaaaaatacacataagggctcattactgaactcaaagtataaagagtccaataaaagagccctaataattgattgcaaaagtagcatcggcagtaatgcactacagtaacatcaataccaatgtactacagtactgtgaacaatatctcattgtgaaagcatcaacagtaacatgcttattgcagtgtgaatggtaagtgcaaagcttgattatcaattttacttttaagtgtgagattatctccttgaagataggcattgctagaacatttgaagtctctaccttaagtatcggtttttgttttttgttttgttttcaatttctgaaaaagtacgaacttattgatattatctccttaatttttcccttttaactcaacatcaggcaaagtgtgaagccgcatattttgttgtggttct

SEQ ID NO: 11996 - DNA, 3949 bp, Vitis vinifera
  Intron number 1 from transcript GSVIVT01009011001 (locus G SVIVG01009011001) derived from phytozome v7.0 (chr-ID chr1 8; pos 4264867 to 4268815)
tacaacacctgcaataaaaaggtaaaggcaaagggattaaaaagaaaaaaaaggagacaaatgtctcgatgctagatttgagccacacggataaattataagatttcaggatcaaaagacaagatcacaagtataagctcattatcatctcttcacaatgtccggattttagaatgaaaataaaaaagtggaaaaggacccaaaaaggaaagattattatagaaaacaggttcagatgggtacaattaccacctccatcacatggctgcctctgcagtcagcccacatatttgtgtagggttggctttagctatgacattcctgggataggacacgggtaccctttgccaacgtatccactgttacattgcataaaacagcaagtcgcttaccccttttgaacaaccaaactcttcgtttgataggataatccattgacagagacagagaaagagaggtgtgtgctgttgaattttggcttttgatgctcctctcaatctctttaggcaatgcactcttcgagccacttagtggtacaacaaagactgtggagtccttctggccttgggagaaagtcggacaatctccatctgctatttcatggtttttgaaagagagagaagcatgaccaccagcctcgtaggtgatgccagtatgggaattgggattttttgcttttaacgtgattttatattgtggacgggaatgggaggacttggtaaccacgagatgctgaatgtggaatatgggactcttaggatgaagaactcgagaggaaacggcggctgctatggcaacaataacggcaatgatgcaaatgaggatgcagagaatgaaacagcgagaacgataggactttttcttctgagcaggggaacgatggcgttctgcaatcaaagcattttcaggcggtggaacgcggtagatttgatctttggggacttggacaacataagtgcccgaccggaagatgttttgggaatcggggaagaggtcagtatttccattggcattggtaactggtggaacccgctcctccatggagagatgaggagcggtactgaggggagggaggagggtatcgactttggaggattgagatggattgcatgggaatgggatgagctggtgccacacctcacaatgggaggttgagaaaaacagggtcacagacagctctgtttcaactttcacgacacaatcttccagtcaatgtcctccctataattagcttccttttacttgttcaactcaactgaattaactaacctccctcaaggccccaatgccccaaacccccaatccccaagctagttatttgggctgggcttccatacaagatttccacttcgtatgctggcctcaatcctttggatgttctttcctgggagttggatagggggcccagggttgggtccacttcatcatcttcaggacccaaaaacatttcaaccctgaagcctaggctcctgctgttgccaatctccataaaccaacaaaatttgcagacgtgtttgtgttagaatcacactaaggcactaatagctttttatcagctggaatccacaatacatatatgcatatggtaccaataccaacagaacatatccaacctagcatatggccctttggattagctattccaattatcaattaactgcacttcccaggtggattggacctgtaatgcgcaacagtgactacaagatgagcggatcacactgaaattggttctctttgacttatggaagagagatttggattgaaatgaaatgtaaaagagaagtagacgtgagctccaataaaacaagatcaatttagtattggatttgaactacactatgccaaaggaatgctcatggttatagtcaaatataatctttcacttaaattggttcttttgatttatgggttaaaacttaaaaggacttggattgaaatgaaacaaaaaggagaggaatgaatgtatttcaaaatcatcataatgggttctcaactcaaataaaatcaattttaaataaagttggaggtaggttgttttaaaagattgctcatgatcttagtctaaattgtctgacactaggctttttacatggatttcagtaaaatagaaggatgaccaacctcacaatttcaatgacaggtattcaaaatataaccaggattggtacaaaggagtaagaacatgttttcgctgcttttgacattaaggcgtaagaacatgttttcgctgcttttgacattaaggcttaatacggtgcaatagataagaaatgagaaaattcaacattttgaattgcatggcagacgggagacatttcaaatttttaacacctaaatctcgaaaccattgcatcacaaatttgaattgtcgagaatcagattccgtggcataacttattcaagtgaacagtaaaagacagcccgcgatcaggcataaactactaatcacacaaggggaaacacacccattacagggtctgccttgtattttccatgaaaccatgtataatcaaagagcaagaagcagagtaaagaaattgagtcctagagaaaagtagtgaattttctgttgcagacgcggagcgacctgtgcttggcgtcatgcatgtttcatgagaccatgtggttactccaactaaagttgggaaagacaaatacgtaggaaagacaaattggcgttgggaaggaagaaaaaagaaccgaatttaaaatggggggccacaataatacctgatgagaaaatgaggacaggcctactgtaccaaatatttggctgaaaatcatgtctgaacccacgacccagtcgtatcttcaggatttgccctatcctatttcctatcggtggctgtccatctcattaaatggttttcccattggccgtcattcacccacaaaaccgtaacatcaaggcaccagtccttggccatgtgatggattatgactaataatcatggtcgaaccttccaagctctagcaaatactccaatcagaaaaattcaaaggagagtggtggaatcagccccatttcaagttttcaacccattgtataggtcgaagctcattaatgacctagtgctttagtttgtattcaactaggacgcatgagatgaataactaacaagaagaaaagatttaggcagccatcaaccacaaccacgaggagttcgggagcatgcaccatgtcatcataccaattccgaaatgtgataactgattagaatttacagggtaattcaaagggtatccaataaaattcaaagccggctgtggagggtgggcgtgggtcaaccgtcaaagccactccccccccataaagcataatgggccttgagtccattctcatatcacactctgggctttgattcaatcaaagcacggattgctgatagatagttgggagattttgtgcgctcatctcaccatccgattcacctccgctagatcctagagctagctacaccgatacaatatgcatcagatgagcgaagacagcttcgatcgattaccagacccgcttatcctagtcatcttcaactcagttgcagacatcaaaaccctaattcggtgccgcgccgtctccaagcgtttcaactcgttggttcctcaggcagagactctggtcttgaaggtggatcgtgtcatctccactgactcagatggttcctttttcctcagcttccttaaatccatcttcagatcgctgcatcatatcatatccccaaaatcactaccaatccagcctcggccgcacaactccccgacccaaatcctgcgggggttcgacaggattaggaacctggagattgagttaccagggggcgacctgtgtttggagaagggggcggttctgaaatggaaggcggagttcggaaagaggctgaagagctgcgtcatcatggggtaccgcgggctgggagagggggaagagttggattttgggggagat

SEQ ID NO: 11997 - DNA, 8310 bp, Vitis vinifera
  Intron number 5 from transcript GSVIVT01037697001 (locus G SVIVG01037697001) derived from phytozome v7.0 (chr-ID chr1 9; pos 7028391 to 7036700)
taactagcctaggtgttattggtgctttggtgaaggtacgttgtccttgctaagttatagtttttaaattatgttgttgttctttccatatgacactaaaatattttgatttttaaagttgcatttacatttgtcatatatgatataccttgtgaaaaaggttgatatacccaatgttttaaaatgctaaagttggtcttgaggcattttgcctaaatgaagcgaggcttaagcctcaaggtagaatgaggcataagccttaacttaaacaaataaaataataaaaaattatcaaaaaaaaattactcataacattacaataaaattgaataatacgaaagacaaactttataatgataaaattaattaattttcattgttaatagttccaatttagttcctttttctctcataacatttagctctctcatggttttaccaaataattttcaacattactattactatcactaggatcctccagggaatgtaattatattcaattgctatattatcctccccattgatgttagtatccatccatcccttttcttcttcatccacccatagtagtggtatccatttttatctatcaataatcaagtaatctatgagacaaaccactaggagtgtcaacaattctcttattcttctcaatctctttttcccttccattttaaatgttaattgtaaattaagtaaaaccctattttgtaaaaggttgaaccaagtggggacctaatacaaaattcatgaaatctatattagaagtccacaaaagcattgatgatagaatccatgaaaactcattaaatattgagacttaagccttttataaaatatataccaaaagcccataaaggcccaaaactctttggatattcgaggcttaggccgcaacagccttgaggctatacctcgaagctataagccttaatagagtgaggcttaagccttaattaccttaattagaggctatagcctcaaggtctaatttgtagagcctcaaggagtgcctcaaggaataagccttaatagccttttaaaacttgggatatacccatattgtagggacctcataaacaagatccatcatgtgatttgggaataaactaaaatttaaaaagaaaaaaaggaagctataattttattctctggtagaatttatttatttattttttaaaggtctcataattattagagtgtaacttgggtgggttaggttggttgacaatcaacttgacctcacaccaagcttgaagcttattttcttgaatctcaacctaaccaagttgtccaatcctaacttaatttgagtctattttcttgaacttgagttaggctcatgttagtaaatatatattttggaatttgttgaattagttgaatgagctggtcataaaatacttatttaattatgaattgactatttaataagttattaaattttatgtctgttttgaagacatttgaaatcttagtagaagaggtcaaaggcaagctgttaggaaagattttggaaaggggtagaggcttttccagttggattagatttggtgagctaagtctcttccatcttttggatggagtggagttatgcaactgaggtgatggagggaatcctttcaccaagcaatggttggaaggtagaagagcttatagggttgaatgctattgtaatgtcgctagaaggttgatacttgttcgatgccctccatggaggtgaagaggtttgtactagttttcccaaaaaggaaaagtcttccagggggttaaagtattttggttgggaaacctcaaaacttgtgagtggcctcttgctctcaattcagtagaaatgttccgttggttgtaggccaattaaaagagggaatcttaacaagggtttcctctaatgagtcttttgtagacaaggtgaagaaaggtttagaagccttcaaaaaggcaaagtggtttcaaatggaggaaaaggaggtttgtcttaaagaggaatctttgaagagttgtctaatgggatgatggggagattcttccggtttggtgctggagctttagaattataagaaattggcagttcacaattggtgcttaaaaaagggagttgatttatttctgttagggggagttctcatccttttcaaatttgattcttttgaagatgcaaaagaagtgatgcatagagatttaaggaggtttcttaacaaattgtccctgcaaagatggtcgttgaagatggtgtgctctcgaagtgatttacatgcaaaggaggtttgggttacgttggtaaggctacctttgcatttgtgggagatgacgttatttaaatatctaggggattgttgtgagagcttcgttgcagtggatgaagacattgtaagtcgtcataatctccaatggacaagaattcttgtgagattagatggcaagaaggttcttggttcccttcaagtggtggtggggcgtttctctaccattcgatttagctgtggtgggaggcctcgccttggttatctcaggttgtagccaagaaaattgagaagcaacaataggttagggtagaagaaggtggtggtgatctacacactaaaaaaaaatgtttgagagaaagcttggtctagctataaaagctcagaagatgtgtcaagcttgggagcctttggggggtttgtagttgggaaagcagttggtggccttgaaagtcattttctcttggtcttttttatggtgggtgtaggcctagagttttggttggggctactaaaggaggcccattgcaagacagataatgaagcgattttaggttgaggttgtattgatccaaggatggatggtatggatactagccctttagtccatgacgattgtggattaggccttgcctaaatttctaattgaagggagttaaatagcagaccaagggaggtaggttaggcctcaattggtattaaggggcctaagggttgttttagtctctcgccctcgaaaggagattgagttgagggctatgggaaagactctaacctgaagtccaggcgccctgttagagagaagtctctctcgaagttgtgcaaaacagaagctctagttttgaatctagatctggtgtcatctccaactatttctgatggtccaaaggtggtttgtgatgacgattcccaatctctgatggcttgcctatgcccgaggagagagtgtcttctactaatgctgctcttttatttgaagtgaaaggtttctctggtacgttttcatcttcagtttgtctgataggggaaaagtcttcttctttagctttttctatgtccaaagactaaggatgaaaatatcggtaaatacaaatatgttggtacttggattttacggatatatcataaatatcgataaaatattggtggatattttgacaaaaatattaatgaggtggaaattgttcaaaattcatgtaaatgcttggaaaaacttcaaaaagtgataaaatatgcaagaatacacatgttaaaattattttccaaatgtaattggcataagtatggtcaaggataaaaatattagtaaacacggatatgtctaacttgaaaatatgtttaatattaaaactataatctatttaattcaaatgtattcaatgatgtaaaataaattatgatacatgcatgatttttttttaatatttatattctttgtatttaattatcatataaatgatataaaaatgacttgtaaagaaaattataatggtggttttctatttttggcaatgaattaaatgaaatttaaaataaaataattagaattaatttatttatttaaatatccttttaatattaaaactataatctatttaatttagtaatgtttgtccatatgcaataaagagcagagttggcctagtggttgtcaagtgttcaatttgaaccttttaacctgggttcaaatccctttcttgtaaatttaaatcatttttatggtttgactgagttgactaggcaagaaagcaaaaggagcagagtgtgatttgactgagaggagtggagcgtgttttgaccaagaggagtggagcctagtttgactaggcaataaagcaaaaggagtgccaaaaattgaccgaaaaattaggaaatccctagaaaaattggcgaaaaatcggcaaatactgaaatatctttgatatattagtgatttttcccaattttttgtgtagttgagctttaggtgtggaattttgtgttgacctcccccgatatttgaaatattgtcgatatttcggcgatatttcccgaaattttaaacttgccaaagacaagggcatttctctaggaagaactaaatgcttggttccatggagggagcaggatgttggacttttagcagagggcaagggtgacgtttacaggcctttgtgtatgattgttggtgagggtttggatgtgaaattcccaaagaatcaacctaaagatgctaagactgtgaacctagaagtgtgtagtggggaagggacttcaggttttaggagctctaataggggcccgttggaagtagagagcctctccgatctatcttttcagaaatttatctcttttatgaagtttgtaggactgccaatggatgggcatgagaaggaaattgctcccctaccgagaaagttagaaactagaaagggtcacaaagttttggttgcaaagaggaggccctgccctctttcatgtcctgctttgttaaggagcttcgaaatttggaatgttcagttcattaatacaattcaaacaaaaaaaagagttgtaggttgtgtttttggagttgctattggttagcttaaaggctaggtgttcggatttcctcataattagaaggattatagaagaggagaggattggagttctcttacctagttttaaggtaagggttttagggtcatgggcttttttttgtaattgctagggggcagaaggtggtgctttcaggaagggtaaggaagagtggttatggtggtagtagggtgaattagtctggggtttctatgtctttctaggcctttatggtgatgtcttttgtattaggtggtggtttgttgtttctcttcccttttgcttgtattcggcagcaactcgtatactatgtgtgtactttgtgtgcctttatcaaatatttttaatatattttctttgtttacccattaaaaaaaatgatgagttggttgttaaagtgattttaaatcaatctactaccaacttacgttagacatatgtctaacaaggaagtgacaattaaatatttaaactaaatatgagaaaaaaataatcaaaatgccccatttgataagtttaaaaagtttaaaaatattaaataatttatcattactattttatattttttaaagtttatataatataaaaataggtttaagttgtcaaacccccaacttaatccaacccaaattttaatttaggatgatatgttttgcctaagcccaattaatgaggataaatctcttaagatctattgaagaaaagatctttaacatctagaactcatttttgttagaactcttattatgagaagtttgtatgaagtaagtttctaattctaaaaaaatagtttctatttttttctttttattttttattttgtagaagatttaattattttaggaaaggaataagaatcttaataagtcactacaaagttaagttcctattttcattgttttattcagtttttaaagtttttaaagtctaataatagggctaactaaggtaaagcaagataatgaatgtatgatgaataatattatgtttttttattttttttttacatgattgcctatatttaaagttctttttacataccttgcaacttttaattgttagactctatcacttggttttcttgtaagtgagactcctaaaaggtcttagtaagactttagggtttcacatctctcttctttgtttttcttttcttgtcctttttttttgtcttgttgctataattttattatcattcctcaccctaaatgctaaaagattaataatttggtgcaactacctgtcaaatttctacagtcgtccttctttcttagtctttcatgatataataataattagaatttccttctactaggagatttaagaggttcaaagctttcttctgcaacaaaccttccaaaatggttagaatctctatatcaatggctaaaccttaacccataggtttagagaatgcttttactattatgccaaactgatcctccaatcccttgctactttgtgtttacccaaacaacactcatcaaattttagcttaacaaaacccattggaggtgggcaccattcaaaaagtctttccttaatcaatcgactaattttgcaaacaaggttccaatttaatagaataaggctcaaagggatgtctgcaaaagcttccctagcaaatggctaaagggaagaagagaagtaaaacaagtcccaaattgcttctagagacatgtaacccactttgtttgattatagacaattgcccttgagttgtcctatgttactgtctattaggaaaccctggattgctcctttcccaagccttggatcattagggtggatgaactcctattctaggttctctagatctaagcatagtggaaacttggcatttaaaaaccaatatagataccatagatcaagagaaaagtgtcatacctatgatttggatgttcccagatcgattcttattagtattgaatactttaaatttgtaaatgatctcataaactcaacaatcattcacctgatgactccttcttgagtctaggcattaagatggtggagatctcagggctggaggctaggactctctctgtggactgtagaaagagaatgataagactagaaaccctaatccttaacaggtatttataggcttcctactaagctttaatgacttaagtccacaatgggcttaggtcacttaatccacctcaaaaaggttgttgattgattaatcaacccaacaaggctccaattaatcaattaacccaacccaaagataccgctcacctacccttgttcaatcttgcataattactaaaatgctcttttgcatataattgaattaaaaactcatccaacccccataagtcgtgtcatcaaagaatatgagcttgaacaaggaccactgagacctatatgatagtaatagctccctcaaaattcaattttgaagttgacttaacatcccactacaaaaagttaattgcactctagtaccctatctatattaccatgagacaccaagtgttcaggtccgtgacctactatccattatatatagtctccttatgaactagtcttctttaatctaacaagttgaaagctattagtcttttaagggtacctgtacaatccttgagttacagattcttatattatgtgatcaaatgacatactctagcttactaaaagcatatgtcaaattccattaaggaattattgcaaactcataatcacacatccttgggatcactcgaaaggatacactatctcaaagtttataagatatcatggtacctctattggaaatacttgttactaccagcttccatcaacaatgacccaatctataaggaatatataatcactttaggattttacccataagtcaaagctacttaacttttgcacatgctcaacagcttggtgaagtcaaggctacctaatagttttatgttatgactcaccatagaccctattcaatatgtaaccatatacgctaatacactcgccatgggaatcccatcctgatgatcaagaccaatcattccttcaattaggaggaggtgcactacaacttcaaataaattgtctaattccacgaaccggctatgatcaaatcatctacttgtaaggaatccatgatttggattttccgtgcaacttttaatgcactcaagtcatgtataatgcaagagatgttataccagaatgctcatagagtataatgcatgaaatgaagatatataaaagtgaaattgaaatatcattaaatgaataatgaatttcaaatctgttacatcatgtcatgcttttaagggctctatcttaacactatcttcaaaatattaattacatgtcatatgtaattgcataccctgtgtgtgtgtgtgtggggcccatcaacacacagaaactatgaatgttgtgaggctcttacttgcattaattgctatattgtttgtattgtttgtaaggtttgttactcttgtgattccaagtattgctggttattaccttttttattttttcccctctttccaggttg

SEQ ID NO: 11998 - DNA, 3575 bp, Vitis vinifera
  Intron number 6 from transcript GSVIVT01014261001 (locus G SVIVG01014261001) derived from phytozome v7.0 (chr-ID chr1 9; pos 2089841 to 2093415 reverse strand)
gtggcgttgcaacatctgttctttgctcagtaaatttgcagctaaatatcaacacaaaaagatatatttgctatttgggagtgttttaggggtagagaagcaaattattgatagttagctgtgtgataaatctatggtgagatttcgcctgttagtcagggtgtgtgaaatggttcacattccccattcgtaactttttggcattgtctttgacataagtagtaaaatgaagaactataagggataaaagtcatcctattgtcactttctggttgtaattagtgtttatgaaatcaatcattgttgcttgtcacagagacttctacatcataatttttttgataggcaaatgaaaagaaatttacaaaaagcaccaaaaatagcaaccgaagtgctagagttctacatcataatgagattacctgcataattaggggcatgtaacctaggaatcagccatctatcttcatatttttatatataatttaaaagtaaagcttacactctttaatgtttagattgcatgatgaaaactaatcataagtagttgtttagatttatccaatccgctactgttttacataaatttaactgtattagtgtatcatgcagataatgtaggttgtggtggtactacttggatttgaaagttattttaatacctaacatgctttaaattttatagataaggtgtcctccctttttttggacatccatcaatgcatctttatttgcttttctctgtatatttcaaattggtctctattcaataacgcaaaagatcaactgttagtcgatgtggtcccaccagaggggctttgggaggtgtgacttggatgtagcaactgctgttgaaacttgaaacctgtgaattcagcccttatacaatgaaagtttcatcgagctgaattcttagattgagttttcttttcttcttcttctcctaatgcaaagatgtgaatttagcccttatacaatgaaagtttcataggcctaaattcttggaatgggttttcttttcttcttcttcttctcctaatgcaaattatactctccttactcttcttctcctcctaatgcaaaactgtactctccttactcttcttctccttcttaagtgtatggtattgagtacagaatcaagttcttcttcttcttcttcttgctcctcctcctcctcctcctaatgcaaaactttactctccttaactcttaagagtatggtattaagtccagaatcaagttcttttcttcttcttcttcttctcctaatgcaaaactgtactctccttactcttaagagtatggtattaaggtattaagtacagtatcaagttctctttgagtcacctatttcattatttttcactgtgactggaagccttttatatgattagttttcatatacctgatacttgctattaatttttcaaaacttatgaaattagtgattttatctggaaatttgaattgctttgataggagggcttcactaatagaaattcttgtttataatattctcttgctttactcataaaaaaatggcttcactaaaagaaagaaaaaggactaatactcaaaatacttattatattcttaactaaaaagataatattatgttattttctcttaattgactacacttgtttggaagggccatgttagacatttacattgtttctcttatccatgttctcaaaatagctagtgatttaatgagggcagacgtttgggatgatccgggtgagggggaccattggaatccttgttccgatatatatttgaatgattgggagctagatgatgtagtcttttttttgaaggcttcaagggaggttggtaaggatcgaagaaaaggatagagtggcatggatggattctaggaatgggatccttgtccatcaaatctttacatttcattttggagttgaggcatgcaattcctttctcaaaggtcatcatttggaattcatgggttccatcaaaagtgagcttttttgtttgggaacttagttagggcaaagtgttgattggggaacctcttaagaagagagaatggttgttggcgaatagatgtgttctttgcaaaagcaaagaagaatcaatagatcacattctcctccactactctgaagtaagggctctataacaacttctattcccttttttgggcattgcatgggtccgttggtctatggtcaaagagactctccttaatttttgattaaaaaaagaaagactcttgtaagttgggaccaatcttttgtaggaagaagaccgaagaagtcttggagaattgctttcctatgcattttttggacaatttggaagaaaaagatgtaaagggtgtttgagagtaaggagcagacagttcaagcgctaaaacacacttttgttagtaatctccagccatgggctactttgtacatagaagaatgctcaatgcctttaattgatttgttagattgggtgggctctagctgagacagggagtggtgttttttattgttctctctatcatggcaatgccatttagcctttgtatatgtcctgtgtaccttggtgtatagcttccttctttattatttataatattttcttgcttataaaaaaaaacaaaaacaaaaaaaggaataaagaaatccatttaatctacatcatttgtcccgaagtattgtattagtcctcttcacattatttctctcattcttgcattcatatccagtggttcagacatttctatttcaaaccaagcagcttcatttgctggcctagcaagggctttataacttctattctatttttttcgcattgcatgtgtcctttggtctgtggtcaaagagactctcctaagtttctgattaaaaaaaaaagggactcttcttagttggcacgagtcttttgtgggaagaagacggaagaaggcttggagagtcctcctacacattttttggacaatttggaaggaaaagatttaaagggtgtttgagagtaagggcaaacagttcaagagctaagattcacttttctgaacgatctcaagtcatgggttagtttgtacatagaagaatgctcgatgcctttagttgattttgtagattgggtgggctctagttgagatagggagcggtgtttattttttgttctgtctattatggcaatgccatttggcatttgtatatgtcttgtgtaccttggtgtatagcttccttctctattatttacaatattttcttgcttcttatcaaaaaaaaaagaaagaaaagaaaaaagaaatccatttaatctacattatttgtccagaagaataatattagacctattcacattgtttctctcatttctgtattcatattcagtggtttagacattgctatttcaaaccaagcagcttcatttgctggcttagtgaagcctctatttcaatagactacttttctgtaattgtgctatcacgagtttactcagggtggtatgggatatggttgattactgtggttttgtttttcattgcataatttctgaccaatttcaactctattgttcagtttctggtgattatttctcccatttgg

SEQ ID NO: 11999 - DNA, 2471 bp, Vitis vinifera
  Intron number 2 from transcript GSVIVT01035432001 (locus G SVIVG01035432001) derived from phytozome v7.0 (chr-ID chr4 ; pos 1235092 to 1237562)
agttcttagcatccatgagctctaaaataattattttagagcatgtttcttaaataagcatccttcacataattcattcatcatctccgaaaagcaattcccattttttttttcaacaattttaattcatcaaaattaagatatccaaatcttaaatgtcaaatccaaaaggaattatcacacgagattttagatatttattattttgtatgtttaacaaaaacattgcatttcttgacatattattaattacatttacatgctatctcttactaaaagagtcatataaatatcataatctttttctaaaagctagtccaaacttaatatattatttgtcatttgggcaaataacaaataatgttcgagataaatcgatgcattccattcttattttacctttgcctttttagatacataataattctttccccacaaaatggacttaactttgaatagtttccaagatgggtgagcccaaaaaaaagaggctatttggacaaattctaaagctgtgacccaaaagactacgttttaaaaaaaaaattcacaaagtactcccatttctaaaataatgtccaatctaatgtgtctgtaccacgtaaattgtcacgtcataaaaccgtagttggtaattatggttttattttttaaaaatagtcaaaaccgtagttaccaaccacgattttaactttaagtttaaaaccgtagttggtgattacgactttgaatatttttaaaaacagtcaaaagccgtaatcaccaactacgactttaactttcctttatcctttccccctttcccgattaggtttattcattttcccaattacctttcttccctttagtttttgtgtttattttcatttgcattatattgttaactttttttttttattattatgaacaaattattatatatttaaatgaaaatatgataaattttaaacttaaattgaacttttatatatatatatatatatatatatatatatatatatatatatatagcaatctgacaatctaaaaaattggttttaggtttaaatttaaactaattatatttataactaattagttacaacaacactatattgatatagaaaaaataatgtattaaaaaaatttacaatttaaacctccaatcaaaataattttttaaaaattaaatattcacatgatttaaaatttgaacttaaaaaattggttttaggtttaaatttaaagttatgatcaccaactactattttgactattttttaaaaaaattcaaaaatcatgattaccaattacagttttgtgatgtgaatacccacatgaataagacacacatcacattgaaaattattttgagaataaaattattttatgaattttctgttttaaagaaatcatttttgcccaaaactcccattagtacccaataagaaacatttttcttattatcaatgaatttacaaaaatattctaaaagcattttcatctatttaccaaaacaattaaactaaatagtgaattgattggaaaaaaaaatgtattttcttttttacaattatatattttaagaagtggaaaaacaaatttttttaggttggcattttaagtttaacattttaagcctttccattccattttgatcccattttgaaaagagaaaaatgggaaaaaaattatttttgttgtatttaagtaattttccaattatttacccatgaagtcatattatattttgaacaagtgcataattgtctttaatttttgcacaaagttacaaaataatataatattctttattatgagggtataaaatagtatatttataactaattatatttatattgagtgtagtgccaaatattttaataaaattatcaaaatatatttttatattaaattaaagacatcaattatttaatttcatatattactattctgtaaataataagatcaattaaagttaaatatttttattacaccatttacatatttttaatcaatataaaatcaaaataatataatattttatttaaaaaaattaaacttaaatatatatatatatatatatatatataaaattaaagttaaagtcgtagttggtgactacggttttaactttaagtttaaaatcatgattgatgacacggttttgattgtttttaaaaagtaaaaccgtaattggtaactacgattttatgacatgataatttacttagagtaaacgcattagattggacattattttggaaataagggtactttataaattttttttttaaaacatagtattttgggtcagctccaaattctaagggttgtttgggcttgtccattaatttgggacatgaaacccactaaaggctaaagccagaacaagactagtctcatccaagaaggtagaacataaaaatatattccacacaaaccttatggtagaagttaaaataaaacttttgctcaatcactcttaaatc

SEQ ID NO: 12000 - DNA, 5248 bp, Vitis vinifera
  Intron number 7 from transcript GSVIVT01000338001 (locus G SVIVG01000338001) derived from phytozome v7.0 (chr-ID chr3 ; pos 11694121 to 11699368 reverse strand)
tacgttcattctaaagccatcagagaaggatccaggtgattgtgatctccttcctcatatagtgatatatgcattagataattatctcatttctaattatctgaaatatgtgctagattctctggttcgttgtatttcatatgatatgacattcaaaaagatttgtccatcttatgggtctttatgacatgttaaaagactaggttggtacaatcttcctgatgtacatggcatggaatatactgtagcatgaagctcttgaaggtatgactgaaaagaattatagctacaagagggagatgaaaaatacaaagttcttccataaaatggccaacgctcatagaaaaaggaactgtttggccaaaaataaggtaaatggggaaacgttatttgaggatgcaaatataaaggactgggtggcaaaacacttttcataattttctttttgagttaggggagtggagaccaaatatcagtgggatgacttttgaaacttagggtagagaagatttagggcccttgtagacactgttttttgaggaggaggtctatacaacgccttctagtttgtatggggataaagcctttaggtaggatggcttttccatgaccttttggtaattttgttagggctttgtgaaaaatgaggtgatgggattttttatggagttctatgagctaggctctttggaaagaagcttaaatgctacttttatagcattagtcccaaagaaaaagggtacaaagatttaaaaatcctcagatcaattagtttagttgggggttatactagcttctagcaaaagtcttgaccaatagacttaaaaattggtgggaagaaaggtttcagctttttaacatgtgtttgtagatggtagataaattttggatgtggtctttctaacaaataaagccattgattcaaggctaaaaaacattgagaatggagtcatatgtaatctaaatatcaagaagatgtattattatgtcaattgggggtttgttggtagtcttggaaaaagtgaaatttggtcccaagtacattaaagggtgcattttttatggatagcttctccatcttggttaatgggaccccattagtttttttcccaaagttctagagctttgagaatgtgtgaccctttgtcctcatacctcttcattatggctatgagggcactgtcctgaatcttgaacaaggttaagaagagagtcagcatatattttggatagctgtgatttacagttgtgtatattctgtatagttgtgatttacagctgtgtatacgactgtaattataaagctgtaattattaattatagaccaataatgattctatatagttgtctattattctgtatggttgactatcctaaaatagtcttgtgtaccttgtataaatacccttgcaatatatgagaataattattcaacaatttatcaagttggtattagagcaaaagcagagaatttctgttgttgcctagtcaacacttcttccattctttttcaccctcttcgttaccatatcatgttttcaaaaaccgatacgagtatttctaatagcaaaaagccatccatggtgaccattcatgagattgcctctccaataatttctattaagttggatggtgctaattatcatgtttgttctcaaattttggagatgcatattgctagtagaaagaagaagggatatatcacatgaagtaaggctgcccccatagagtatgacccaaactatgatgaatgggaggccgaagatgctctagtcaattcttggctcatcaattccatgactagccaactgatgtcacactttgtgcgatgtggactggctaaggaggttttggatgcagtcaagaggagcaatcttgatgtctccgactcttctcgagtatatgaattgatgaagaaatcctttcaaacatgctaaggtggttgcccttttgcaaaatactacaatgagttaaactcaatattcatggagcttgattatcgaaggcccaatgttatgacgtatgtagctgatattgagaaatagaggaagtatacttctgaggattgggtttatactctaagaatgatgttctacatgttatttctcaattttccaaaatgattgtcacacaatttaatacttaggttaaggtctttcactttgacaatgtttgtgattttgtgaatcaatcccttgttgatttattcaatgacaatggaatcctccaccagacaatgtgtacatacacgccataacaaaacgacatagcagagtgtaaaacccactacattctagaggtggcctaggctttatgctttacaatgcatgttccaaaacatttttgggctaaggctgtcatgattgttgtttttcttatcaatcgaatgcttgctcgtggcattgattatcaaactccttttcaaatgttatcacaatttcactctattccttttgctttgaatctttgtcctaagtttctggttgtgtatattatgctcatatatattctcaccaaagggataagcttgatccttgtgctcttaaatgtgtatttcttggttactctaattcccaaaagggctgtaaatgctttcatcctcctataggtaaatgctatgtcttcatggatgttcaattctacgaaggaaagtcttatttttctgggaatgtttctctggttcctttttaggggaagattagtaaggaagaggaaaagttatggttagaagagaagaggttatggatttcaagttaaggggaggatacaattgatttgggtaaggttgagtctttagatactcctaaccatatggcgattgaatttgaatatgaggaaagaagggatgaaagactagtcggattatgccaacaaagttatacaaggaagaacaaagatgctattgtcatccccactctaggctctaatgctcttcttaatgatactaccatgccatcgaatgactcttttgagactaatcctgaggtacatgttccttcacctttaacttttgaaactgctaccttgaatccacaagttagtgatcaaggtaggaggtatcctttttatgattataaagaacctaatagattggatttctcaaaattatcctctaatgttgtttatcccatttctaattttgtctatcgtctatctaaggctcaccctgcttttgctcttcaattatcctttgtgtttattcctaatcatttttaggaaggccttgaagatcctatgtggaagtatgaaggctctcgagaagaactcgacttgggagatggtcaagctccctcaggaaaagaagacaatgagatgaaggacttgggtgctctaaaatacttcttgggcattgaggtgtctcgatccaagcaaggaccattcatctcacaatggaagtatacattagatctcttgattgaaactggtaactatgcttgtgaacctgtagatactcccattgaggtaaatcatggcttgtccatctattttgaccggattccaacgaacaaagaaagatatcagagactagtggagaaattaatctatccgacccgcactagacctcacttgtcatatgcagttagtgttgcaagtcacttcatgcataatttgagtgaccgacacatgaatgcaataaattgtatcctggtctattagaagttctatctaggaaaaggtattatgttctctagacaagaacatctagatagtgagagttacatagactttgactttgttgggtccaaagtggataaaaagtctacttcaaggtatatgtcatttgtaggggaaatttggtgacttggaggagtaagaaacaaaatgtggtctctctgtccagtgcaaaaactgaataccatgcattccatcattcaactatgaaacttacttggctgagaattatcttaagtgagcttgggtttggtcctacgaaacctatggtgcttttttgtgataacatgataactattaagattgcaaataatttggtacaatgcgatcgaactaagcatattgaacttgacaagagctacatcaaggatagcttagactttggcatgataaaggttccctacatcaagagtgcagatcaatcggcggatatgatgactcatgttgttactagtggtccattttgtgtcattatccaagttgggcatgtgcaatatctctgcaccaacttgagggaacatatattttggacaactgtgatttacaactatgtatacaactataattatagagctataattattgattgtaaagttgtaattattttgtatacttgtcgattattctatatagttgactatcctaaaataaccttatgtactttatataaatacccttgagatatatgaaaataattattcaacaatttatcaagtaagggggctttatcgtgactttctcagttagtggaagaggtggtgagggattggaggtggcccatctgtaatttttttatgacacttttatcctctatgatgtcagtaaagagcatgtggagcatttgaattgaggcaaatgttctaggctttatttggttttggccgaggagacttctttgggtctagagaccttcaagttgaaggggactcgacacttctttgatcttggttgtttgaaggggagaaaaaggacatggaagcagatggatggatttgtaagattgttgtctttctgataaatttgagtagttccttcccttggagaccttggtcatccaaccaggcaacagattagatggccaaatgaggatggccttcctcactgattttgtttgccttctattttttgttctttttctgtgcctgataatgtttggtctgtggtttatagtcatctccatgccatgtttagtatgaagaatagccatccttcattatactcctctttttattatctttataaattgatgtttcctatattcttaaaaaatgatgtcagagaaatgcattcaaatgaaaattttacctcaacctgctcaagagagctttatctggaccattcaagatgtatgtgcaatactcttgcagtcttcccttgttcaatctatctagttactggttgttggtcatgcatttccttctgctgaagctatgcatttgattattattttttttatttccacacttggttgtttattggtcttatatgcataatacaattatttctcatgcttaaaaatatgtgtgtgtcattttgtgttctttcaggggctactattatacttgcagagttagca

SEQ ID NO: 12001 - DNA, 13401 bp, Vitis vinifera
  Intron number 1 from transcript GSVIVT01030308001 (locus G SVIVG01030308001) derived from phytozome v7.0 (chr-ID chr8 ; pos 9155275 to 9168675 reverse strand)
cttccaacaatatttcttcattcagcacctcctttgttttctcaatcattccctccggctctgacggaggcggctacggcctcgcatttttgttatcaccatctacagacctacaaggggctgacagtgggcattatctgggaattctcaactccacaaatgatggtgatgaatcaaaccacatctttgcggttgaattcgatacagttaacggacacaatgaaggcaaaagcagtgaaggtaaccatgttggaatcaacatcaatagcatggattcagttgcaacagaacctgcttcatattatgtcaatgatacagacaagaaggaagaggtaaatttggacagtggacatatccaagcttggatcgactacgcggatggtgttgtgaatgtcacaatcgctccattatcgattccggacaaaccaatgaaaccactcatgtctaaaggaatcgagctatctagggttgtcacgaacagtatgtatgttggtttttctgcatccacgggagaagagaggagctctcattacatattgggatggagtttttgcatcaatggaacagctcgtccgctcaatctttctatgctcccagcgccaccaatctttttaaggttttaattgcggctttagctgtgatccttttggtgttcggagcaacggttgattcgacgtgttgtataaaagtgttagaagtttgttttttggactgccatgttatgttttaatttttcaaagtttgaataaaactgagtctttgttagttcctattcttgaggagatttgagtccactttcataaattgtggatcatgtactatctattttgaatttgatattttttttctattttcagttatttcccagttctataaatatacgctggatggaggaaataaaagtgacttccgctgatatattttctttattttctattgtgtcttctttccttagcttgtcttaaaacaccaacaattggtatcagagctttatattctttaagggattgtgagtgaaaaaaattgtgagttgagagttgagggccaccaaaacaccacgtattccaccaaaatttcaagcatggaaggagactcaagtttctcagcaatggcacctccaatcttcaatggtgataattacaccatatgggttgtgcggatggaagcctacctagatgttgtagatctatgggaggctgttgaagattactatgacgttcctccgctattagacaacccaacgatggctcaagtcaagaatcacgaggaaaggaaaaccagaaagtctaaggcaaaagcttgcctacttgcagcagtttcagctacaatcttcacccaaattatgtctttgaaatcagccaaagccatatggagttatctcaaatttgaatatgaaggagatgatcgaattaaaggcatgaaagtgctgaatctaatcagagatttcgagttgtagaagatgaaagagtcagaaaccatcaaggagtactctgaaaggcttttaagcatagccaacagagtaagattgcttggttcggagtttaaagactctcgtattgttgaaaaaattctggttactcttcctgaaagatttgaagctaccctaaccactttggaaaataccaaagacttgtccaaaatcacgttggcagagttgttgaactctttgcaggtgcaagaacaacgaatagctatgagacaagaagcaactgtagaggaagccttgcccgccaaacatgaagatggttggagaaacaaaaagaagaaaaatagaaagcaccagcaagcaaatggagaagctgcagcgcacaggagcaacaaaaacaaagctagaagttccaagggaaagtacccaccttgtaagcattgtgatagaactggccactcaccgttcaagtgctggaaaaggccagatgataagtgtaacaagtgcaatcaccttggacatgaagctatcatttgcaagaaccaaaaccagcagcaagacgcagatgcccaaatcgctaatgaagatgaaaatgatcatctctttgttgcaacttgtttttcaggtagcatttcaagcaatagctggttgattgtcaatggatgcaccaatcacatgactcatgacaaggaacttttcaaagaattgaagcctacaagaattgcaagagtccggataggtcacggtggtcatattcctgcgaaaggaattggaactgttgctattgcaacccatttaggtactaaagtcattgatgatatgatttatgtacctaaaatagaccaaaacttgttaagtgttggttagctactagaaaaaggtttcaaggtgtattttgaagataattattgcctgatcaaggatgcctctggtccagacttgtttaaggtcaaaatgagaggaaaaagtttctcattagatccacttgaggaagaacaaatagcttttccaacaaaagaaaatattgttgagttatggcataagtggctggggtactttcattttcaagggcttctcaaaatgaaaaaatcagaaatggtggaaggcttacctaagtttgaagtgatttccacaagctaccagacttgtcaatatggaaagcaaagcagacttccattcccaacagcaacttggagagcctcaaataagttgcagctgattcacaccgatgttggaggacctcaaaggacaccctcactcaaaggtagtcgctattatatcatttttatagacgatctgaccagaatgtgctggatatattttttgaaattcaaatctgaggttgggaacactttctagaagttcaaagcaaaagtggagaatgaaagtggctgcaaaatttagattttaagatctgataatggcaaggaatatatttcatgtcaactcaatttattttgtgaagaagtaggaattgaacaccaactttcagcttcttattctccagagcaaaatggagtgagtgaacgaagaaatcgatttattatggagatggccagatgcatgctgcacgagaagaatttgctgaagaaattttgggcagaggctgcaaacacagctatatttttgcataatagactctctacaaaggcagtaaagaatcaaattccttttgaagcatggtatgggtacaaacctccaatgacttttcttaaagtgtttggttgtctttgttttacctatgttcctcaggttaaacgagatatactagacaaaaagctgttgcaggaatttttattggttatagtacagtttcaaaggcttataaagtctttcagccacatacttatactataattatcagtagagatgtccacttcatggaaaatgaagaatgggattgggaagattcaaagacagagcttgaaacaagttttttagatgaaagggaggatgatccaccagtaagaggtacttgattgctctctgaaatttatcagagatgcaatgttgcaatttatgaacctgccaaccatgaagaagcactcaaaaagtccaaatggaaggatgcaatgaaggaggagctgttcatgattgaaaaaaacaaaacctaggagcttgttgatagacctcaagaaagaaaggtaattggggtaaaatgggtgtttagaaccaagctaaatgctaatggttcagtcaacaagtataaagcaaggcttgtagttaaaggatatgcacaaatttttggtgttgattattctaaaacatttgctccagtagcaaggcttgacataatcagattacttcgtgctatttctgcgcaacttggctagaaagtgcatcagatggatgttaaatcagcattccttaatggaattcttcaagaagaaatttatgttgagcaacctgaaggttttgttgtggaagacaaagaagacaaagtctgtcgacttcataaagctctttatggcttaaaacaggcaccaagggcctggtatagtcgaatagatgattatttgcttggtctggacttgaaaaaaagtctttcagaatccacactttatgttaaggaaaataacaatgaaattcttgttgtttctctttatatggatgatcttttgattacaggaagtagtgcaaagcttattgatgagttcaagctggatatgatgcaagtttttgaaatgacagatcttggtctaatgacatacttccttggaatggagatcaagcaatgaaaagatcaagtttttatttgctagagaaaatacgcaaatgagattctcaagaagttcagaatggaagattgcaaagaaatgaatactcccatgaaccaaaaagaaaagctaagcaaagatgatggagctgaaaaggtggaggatacatactttagaagtctcattggctgtttgatgtatcttacagcaacaaggcctgatatattgtatgctataagtgctctatcaaggtttatgcattatgatagtgaggtgcatctaaaggcagcaaaaagagttgtgtggtacatcaaaggaactgtcgactatggagttaagtttcaaaagattccaaatatgaagctgttcgggtattctgacagtgattggggtggttccttagatgatatgaagagtacttcaaggtattgtttcagtcttggctcaggaagtttctcacggtgttcgaaaaaataggatattatggctcaatctactgcaaaagcggaatttgtagcagcaaccgcgacagtaaatcaagcattgtggctgaggaaaaatttggttgatttgcatatgaagcaaacacaaggtattgaagtgttcgtggacaaccaaaatacaatagcaatttctcacaatcctgtgtttcatgggaaaaccaagcatttcaatatcaaactcttctttttgagaggtgtgcagaaagatggagacattaatcttcgctactgcaaaaaggaagagcaactggctgacatattcacaaagcctttgttagtcactaagtttgagtttctcagaaaaaagcttggagtttgcagttcctaaagcaaggaggagtgttagaagtttgctttttggactaccgcgttatgttttaatttttcaaagtttgaataaaactaagtcattgttagttcctattctttaggagatgtgagtccactttcataaattgtggatcacgtactatctgttttgaatttgagattttttttctcttttcagttatttcccagttctataaatgtacgttggatggaggaaataaaagtgacttccgctgatatattttctttattttctgttgtgtcttctttccttagcttgtcttaaaacaccaacaaaaaggaagacatagcacgaagatcttgaggattgggagttggattgtcctcgcaggtttaggtacaaggatctttacacatccacaaaaggcttgggaattggatagtcggtggactcaagttaagagcatttgatgtggattaatagctctcatgccttgtctataacataataaataaagcctcgattcagggcttttcagatttttgtgtcctgattgatattgaaatcatttttctttcttaatttccttatgtgtcaacgagtgcttcatatttaaaaacttttgagacccataaaatgacttatttgttagtgagggaaaggtatacctggaggagtagtagttcaattataaatgcatctatctactaaatttgacttgtttttattatcatcatctatgatattggtgttgagatattaggaatgtttagatatcaggaaagttgagatattaggaatgttaagatattaggaatgttgagatattaggatattagttgttctttccttatatcattaatttcttgtatcattctttcccattcttagaatggtgattaccctctatatatactctatacatgaacgaatgaaataataaaatgaaaaactaccattcatcaatttgaagatagtatcagagccatacaattgaaatcctggatattctgtcggtaaggccagtcattgtccctccttcgtgatcaaaagaaaaaaaagtgaaaaaaatactattgtttttcaatttgaaggtacttttaatccaggaattattttgactgaatcaaactatgacgtttggtcacaactcgtggagatgcatattgccgaacaggaaaaactttcctatattcgaggtaatacaaatccctaagagagtcaaaagatggatatgaaaaatggtatgctgagaatcaaaaggtaaagagatggttgttaatgtccatgagtccagaaattatgaagcgttacttacgcttacccaccgctcaagaaatttggagtgcattatcaaaggccttctatgatgcaagtgatgaattacaagttttcactttgaataaaaaagccttcactgccaaacaaagtgataggtctctttctgaatattatggagagttaattgaaattttttgtgaattggataattgggataaggtagtcatgaaagaccttgaggacattgcagcatactgaaaatccattgaatgacaacgagtgcacatctttcttgctggattggatggtgactttgagcaagttcgaggagagattctacgcaaagatcctcttctggatttggaagaatgttatgcattgattcgacgagaggcagtgcgtcatgctagtatgaaagtagaatctgacaaccttgacacctcagctatggtagtccgacaacgatcaacccaaaattggcaggaccaatccaagaccaaccatcctaagacaaaccctaatattgataagtcaaccttcaaatgcactcactgcaataagactggtcataccaatagtcgttgctttgaaattgtgggatatctagactggtgggatcataatcatgatcaacggaagaatgattccaagaaaacctcgactgcagctgttgccgaaataaaaacaaaggctaatgttgctgagaaagcctctgcattggtaaccgctacaaattatggtggtaagtttttaaatacttctacacctgttattaatagtgcatggataattgattctagtgctacagatcatgtgacttttgattctagacaagtctcacctcttagacctttctcacaaaaaattgtttctacagccaatggtaacacaaccacagtcattggggaaggatccttagctcttactgatactttgaatttagattctgttttagttgttccatctttatattacaatcttttgtcagtttctcaaatcactacagccttatcttgtattgtcatttttggcttgaattttgtgtttttaaggacatccaaacaagacagacgattggttatggtattaagcggggaaaactctattacttggacttgcagtcaaaggattcaaataagttgcgacaagccttgatggcagatggacctgagggggaaaggaaaaagtctaaaattgggttgtggcatcgacgtctaggacatgcttcatttggttatttaaaaaaattgtttcttagtttgtttgcaaaaagtgatatttctagtttccgttgtgatatttttgaattggctaaaagtcatcgtgcttcattttcgttaattttgaataaaagtccgtttccttttatggttatacattctgatgtttggggcccatccaaagtcccaactttgagtggttcgcgttggtttgttacttttattgatgattgtactagaatgacatggttatgcttgatgaagaccaaagatgaagtgaacttgttgtttcaaaaatttcataaaatgattgaaactcagtacaatgcaaaggtttgggttttgtgtagcgataatggtggagaatatcagagttctgatctttaaaattatttggaaggacatgacatcattcatcagattacttgttccaatacaccccaacaaaatggagtcgctgaatgaaaaaatcggcacttgttagaggttgttcgtgcttccttgatagcagaaaaagtatcgatattttattagggagaagcaatcacatttgccacatacttgatcaatcatgtactttctagctcaattaacttccaaacacctctccaaggtcttactaatgtcgcaattgccccaactgtcccaaatctacctcctcatgtttttggttgcgtggcatttgtgcatctacataacaccaacgcaccaagttaacttcccgtgcattgcaatgtgtgcttgttggatatgcattgcacaaaaagggatatcgatgttaccattctccaactcgacgaatgtttattacaatggatgtggtgtttcatgaagattcgatgtatttttcatttgagtctaaactttaggggggtaccagaaggaaattcagactctcaattatgattatcatatctctaaggaggatgaatctggacaatctgaactagtgaaccaggaagtgggtgagttggatatgagtggtacaactttggaaccaagtagtaatgaccacccagaaactgaaaaagtgattgaagaaggaagagacagtacaattgaaccatcaccaccatcttaatttgggtcagaagatgtcttcactgaaataccaaactaatcgtcgtttgttgagggtgttcttaatttggaacttgatccattcatgaaacagttaccacaccgttataatagaggtattcctaaacccacatatgaacctgaattgtctactaaagtcaaatatcccatgagcaactatgtgtctaaccattatttgtctgaattaaataagtcatttgtaaatcaattatctactatagctattcctaacagtgtgtaggaagccttcgttgatccaaggtggaaagcagccatgaatgaagagatgaaatcattgcagaagaatgaaacatggaaactcgtagaacgtccactaggaaagaagccagttcggtgtcgttggatctatactgtgaagtacaaagcagatggtagtattgaacgatttaaagcaagactgatagcaaaagggtacactcaaacttatgaaattgattccatagagacatttgcatatgtagttaagatcaacacagttcgagtattactgtctttagctgcaaatctggattggtcattacaacagttcgatgtgaaaaatgtctttctgcatggcgagttatctaaagaagtatatatggatcttccaccaggatgcatggtgttagaaaagcaatgtcaagaggtgtgcaaattgaaaaagtcattgtatgggttgaagcaatccccgagatcatggtttggaaggttcacaaagtcaatgagagcttttggctatcatcaaagtaatttagatcacactttgttcctgaaaaagcaacatggtaagattacgatactcatcgtatatgtggatgacatggtagttacaggaaatgatcctgaagaaagaaaagctctgcaaaattatctatctagagaattcaaaatgaaagatctaggtcactgaaatactttcttgggattgaagtttctcgatcaagtgaaagaatttttctgtatcaaagaaagtatgccttagatcttttataggagactggaatgtcgggatgtcaacctgttgatacaccaatagaagaaggtctgaaattgtgtgttgagcctaatcaagtatcaaccgataagggaagataccagagacttgtggggagattaatgtacttagttcatacaagaccagatcctgcttatgcattgagtgtagtaagtcaatacatgcataatcctggagaacaacatatgaatgcaatcatatgtatttggaggtatttgaagaatgctcctgggaagggaattttgttcactaaaaatgttgatcattagagtataaaagtatatactgatgcaaattaggccggtgcagtggatgataggcgatctacatctagttactttacttttgtaggtggtaatcttgtgacatagaaaagtaagaagcagaatatcgtcgctcgttcaagtgcagaagtagaatttaggggtatggctctaggactttgtgaagcattatgactaagactcctcttataggatttaggttacctatctaggcaaccaatccgattgttttgtgataataaagccgcatgtgatattgctcataatccagtacaacatgatcgtacaaagtatgtcgaggttgacagattcttcattaaggagaagttggatgataagattgtggaattgcctaagattcgatcagaaaatcaattgacctatattctcaccaaagttgcagtctcaagtcgagtgttctcaaaatttttagacaagttgggtatgtgtgacatctatgcaccaacttgagggggagtgttgagaaattaggaatgttgagatattagaatattagttgttctttccttatatcattcctttcttgtatcattctttcccattcttagaatgatgattaccctctatatatactctgtacatgaacaaatggaataataaaatgaaaaactaccattcatcaatttgaagaattgggttgtatcatcagcatcttggggccactgtttcgtaattcaaatccaaaacgaggagtttctttttggtcattttctcatcaatattagattaagattggttgtgaagcagagtatttaaggtgaaaaatgaagtaatattcatgatttgggtatcaatcaaagtgacaaggatctttttcaagttttatgcactcataccatcgtcactcatggaataacagaagacttttttggtttataggttgatcttttgattagaaagatcaattaaattatcattatcatggatggataagtaggactatgataaacattccaatatttatgggcttttgatgtattctaatactatttgaggcaattttactgttgattgaagttaatagaatgcaggcgtagtgacagataaataaatcattcttttataggatcacttgcatgaaaacttctcccaaattaccttcatgaccatcgtcttttattctagattttattccattgggtcgcatgcttcaaatcagggaatctggggatgttagagaggaaaaggcaccatcttttccatatttgtctggttgattcgttttttcactttatccactggttgagtcatctatatacttcatccatatttctttggatttgaatccaagatatccttaatcctggttcccaatcaaagaatcatagtcaacatactgagcttaagagtattagggttgtttgatggaatgatgtagtgttgaaaggaggcttaagcatcatattttggatgatttgtatggtgatacatctttgtagttgttcattaatttttaggaaatcctctgtggatgcctgggcactatattttttttatgatagatacttcattcctgtctctaaagatgtaaccacagcaacgctagtcaatgaatcaaacaaaattagtaatccaaatacgtgggtttagggactctgatgtggcactctccagaccatccatgctaacatacatacaaatttcaacttgatagtatgtagattccttcccttgatcaccatttgccagtgtgacattcatgattttgatatcaaccaactcgatgaggatcagatatttgttcatgccttctaatttctaattatatgaaactcctactgtcacaaaaataagctgaaggacggttcagttgtcactaccaatttctagttcaaatatttaaattctcatgaactattttaatactctctatcaatcaagatgatgggaaggagaagcaccattgatgattcatctctatggttatccttcattatcatgatagtgttgggctgatacaagttagacatttccataagacatccttattcctcctgatcctcaaatacgaaaaaccataacatcagtcaatggttcaaaccaaaaatatcccaaaggcatggtgaactgaattaagaggcgtttgcatcttaacttcctatcaatatcaatatacgtgttagccaatacgggcaccacaacttttcatgcagtagcccaagaaaatcttgaattctggacaggtggcacctggattagaagacaaaggtctccatgttaatggtattaaatttatattaagttacggtatgctctctgcttcaagacttttccttcttgtccttattaactggataaggattcattatcatcctgacaatgattaagtaatagttaagaaacagctaaagcaggaatcaatttccatgtcgacaacgacatgtctgtttgaaagcattgtgaagttggtgaaatttttgagtaggagtatctttgaactaatcttaaatattttcctgaataaaagaccaatggatggaaaattggtaaagaaagaagccaaacaacaaaacaaaatggtaaatttgatggggagcaagtaatggtgttgatctagcatatggtattttttgttgattatatcatagactccctcttccttcttcttttcccttttttttttgaggcagctaggcttaagagctgccgtgaaaagcaaaatggactcattcgaagtaaccaggtggtgaatggccgaattatcattcgtgaacacctgaacgtgcccgaaagaattttgtcgtatgcttgatcatggataagtgggagtttgataaacattccaatattcatgcgcttttgatgtattttaatactatttgaggcaattttactattgattgacgttaatagaatacagggttagtgacagataaacaaactattcttttataggcctaaaggtgtcctcatttgtgcagcacttgcatgaaagcttctcccaaattatcttcatgaccatcgtcttttcttttaaatttactctattgggtcgcatgcttcaaatcagggaatccgaggatgctgagaggaaaaggctctgtcttttccatatttgtctggttgattcttttatatactatagccatattcctctgaactttaatccaagatatccttagtcctcgttcccaatcaaagactcataatcaacatacagagttttaagtcattaggggtgtttgatgaaatgatgcagtggacggacatccatgcctaggcaccatatttttatgatagatacttaattcctgtctccaaacatacagccacgacactagtcgacgaatcaaacaaaataagtaatctgaatacctggggttatggactctgatgtggcactcagcaggcaatccattacacggatgaatcaaacaaactcaacattctatccatgcgaacgtacttacgaatttcaacctgatataacatgtagattccttcccttaatcaccatttgccagtatggcattaatgattttaattcattgacgaaaatgaccgagacatttgctctgaactcttgttatcacaaaaagta

SEQ ID NO: 12002 - DNA, 20883 bp, Vitis vinifera
  Intron number 1 from transcript GSVIVT01029225001 (locus G SVIVG01029225001) derived from phytozome v7.0 (chr-ID chr1 1; pos 18325374 to 18346256)
aaagctacaaagtatttccaactgtgcttccaaaggtgatattaaaatatattcaaggtcaagttagttagaaaatgttagtgtagaccttccattttgtcctagtaccacatgttattctatgtgctttcctccacttctcattgctttatagtcgtctcatagtggtccattgtcactcattaggtacctttattaagctacctttggagattcattgtctaggggtttttatggatcccaattgtgaccttaatcacacctcaatttaggtcacttagttgtgtttttttaagcttagttccattagatgcatttttaggtttaggtcacttagatgcatttttaagtttaagtcacttagatgaatttttaggtttaggtcacttggatgcatttttaggtttaggtcacttgcatacatttttaggtttaggtcacttagatgtttttttagatttgtcacttagatgcatttttaggtttagtttccttagattgcttttataggtttaggtcacttagatgtatttttaggtttaggtcacttagatgcatttttaggttcaggtcatttaaatgcatttttaggttcaggtcacttagatgcattttaaggtataagttacttagatgcatttttaggtttaggacacttagattgcatctttaggtttaggtcatgtagttgcatctttagcctagctcacttagtggcaccttagatttagctcacttagctactctttagctcaagttcaacttacattagctcacttggtcacactttagctcaggttaaactcacttagctactctttagcttaggttcaacttacttgatcaacttagataaaactcacttagctactttttagcttaggttcaattcacattagttcacttggtcacactttagctcaagctcaattcacttagtcacacttaacttaagttcaactcacatcagctcacttggttacacttcaacttaggttcagctcacttagtcacactttaactcaggtttagttacattaactcatttaatcatactttagcttaggttaagctctattagctacactttagttgagatttagctcacatcagcttacttagtcacactttaacttaggttcaacttgcttggctacactttagctcaagttcaactcacatgaaatcacttggttacactttagctcaagatcatctcacttactggccctttagcttagttcatctaattgcacctcagcttagcttgcttagttcactttaggtttagatcacttagttgtacttcaatttaactcacttagttcacttaaatacactttaatttagctcacttagatgcattttgggttagactcacttagttgcattttaggaaatttcttagtttcactttaggatagttcatcttagttgcactttagttcatttcatttgggtacactttgagatagttcctttaaatgtattcttagttcattaaacttagatacccttaaagttagttcatctaggtgtattttaggataatttatctagatgcattttaggatagtttcatgtcaccttgcatggcatgtgcatggacatagagtttggattcttgttggcatcttagatctaaacaacgccttaaattccaagtattgaaaatgaccttgaagttgttgaaagtctcttaaacccataatcttttacctgatgactcaaccttgttcttggcacacttctggtaatgaggaagggtggagactatggttttctttctctctagattgtggaagacaaaagtgatgaaaaccctaacccttagggggtatttataaggttcctaactaggcttaagtgacttgagctcacatgggcttaggtcaattaatccaacacaaattggatcctaattgattaattagcccaataggacctactaattaattaattagcctagtctaaagaccttattcacttaactcggtataaccttgcataattaccaaaacacccttatacacaaaagtcaaccgagagccaattcgaccctcataactagtgctaacaagatatatgagctcagaatgaggaccattggatcccataggagtacttgctcccttataatccaattatgaaattgatttaacatcccactatagaaaatcaactaaactctagtatcctatgtaaataataatgagacactatgtgcttgggtccgtgaccagtaattcattgcgtttagtctccccataaactagtgtatatagtctaataaggtgaaagctatcaacctttcaaaactacttttactattcttgaattacaaatcctcctattatgtgttcaactgacatgtcttaactctcaaagagcttatattaagtttcaattaaagaactactatgatcataatttccataaacacaccttcttaggatcacctaaggtgacacactatctcaatcccatgagatatcatggtgcctttattcaaaatatctattactaccaactttcatcaacaatgacccaatagggaatatatgatcagcttacaatctcactcgtaagtcaaagtcactattaattttagcacaagttcgatattcttttaaggttaagacacaacataatgaagcaacttagtgaggtcatgactacttgataaccttaagtcacaactcacctcaatgtgtaaccatacacattagtacactcaccatgggaaaaccatgttgatagccaaaaccaatcatccctcaaattaggaagtggtgcactataacttataatggattgcctaaacccacgaatcgactataaacaagtcatctatttgcaaggaacccatgacttgtatcttccatgcaaatcctaatacacttaagtcatgtatactacaaaagatgtaaacaagaatgctcataaagtgtaatgcatgaaataaggatagataaaagcaaaactagaatatgattaaataatgaatttcaaatttttttacatcacatcatgcttttaatggctcaatcctaacaattctcactcaatttaggccctttgactatatatgatcaatggcttagggtttctcaacttggtttttcattgcttttgcgtccttttatggttgtttattggtaataattatagatgttaaattttatgtcacttaatatcgtagaggtttttgtgtttaatattttgtatgctttaatacccactttttcaaaaccttttccaaagaaaattaatccttaaactttttctaaaaaaaaatatatgtcatcttaggtcattagggtttaaaaaaaaattatatataaaaaaatgtaatcaatttcaatcggtatgcatctttccattgttttctaaaaagattgaaattcgatttttgacacacgaatccaaattcatggtttcaaatataataaaatgatctttggccttgatgaattcactaatattcatatgaggtttagaatgcataaattaaactcatgtataataaatggggacttggtgaggccccacatattttcaattttcacaaaaaaaaaaaaaaaaaaagcctaatgcccctattaatatttgatgtatttgtgaccattgaattgaaaaattagaaacaaatggcctaagatttttctaaaattttttctatgctcagaacatattcctaacttctcaaacttgtcatttgaactttgtatggacctaaaatcatttttcaattagaagacctaagttggtttttacacaagcctagtactagccctattttaaacacttgaactaatttttttttaaaataatttattttttgttccttttaattttatttaatctaaaatttttgaaattattttttgacctattatttattgaaaaccgatttcctaaatggtagaaaaaaaaaatcattttgctttcacctactatattggccttgttccgtggtcaggggatatttggctagatttaaaaatccttcttatgcgctataagtactttcctattttttctaagtagacatcatgaatgaattgcatgaattttggtaggattttatcatacatttaaataggttgattaaatttatctttacatactattgaaaattgttctatttcttattgatatgcttttaatttaatctagtacgaattgggatatagtttaatgattcaacattttggattgtgatttagacacatgggagatgttacttaatttttttcatgataaaattctatatctaggtttttttcgattctattctatgtgctcgcttcttctgccatgttgctgaatgttttgaaaagtgatgatgaatttgatttaacctgaaataaccaataattgattaaattgttttgacacttgtcttatattttagatactttgaggatgatgtagaattttttattttaataaaatatcaggtttaaatattttttcggatttattttgttcatgtctcattttgatcctattattatgtaatatcagcttttgaggtacgctccttcctcttcctcatttatttgatttcatcatgtatacatgttttgtttaaatagtcttttaccatattcttatttattatcatgtcacttttgttctttgctatccactaatttactaaccaattatcatattttcctcaactcattagcagagacctttattcaaggcttagagatgtgtcaccttatggtacctttctaataagtaacttgacccttaaatttaaaatcagatttttaaatatatatttttccaaataaagagtcattcttaaaggttttatttcttattttgttttccttttataaaaataaaataaaataagtggcaactccacctttttcaaaaaaaaaaaaaaaagtttttcataaaaaaagtaagtcttaccattgagtgggaatgcacaagaaaaatgaaggtccacaattaaaatgaaaaaaataataaaaagaaaatattttctcatgttttcaagaaatattcacttaaaattaatattcttaaatagtgacttgtgtagggacccctccctccgagatacgtggcatgcatcttacaatgacacgtggcacgcatcttacagtaacacatgacacgcattgtcatccgagtcaccctcatccggatcttcctataaagcacacatggcacgcttttctggactacctcaaggaagatcaaacgacacttataaacatatcatccggacggcttacacaatacatccggatgatcaacataggccatccggatacaatggtccggatcattgactaaagtaaagcgagtcttacacgctatcacaacaaccagtcatggcccacgtcccatcacctacagagtgaaaggacgagttgaggtgacaacaagtcacttcccacgatcattctacatgatcacttcccacgatctctgacagccgcatcacctaccacggtttctgacagccgcccgtagggtggtgatgaccctgctgccatctaatatcatcatgacaacataaaatatctccccaccattaatgagaggaacagtacttctggcactatatataaaccttcacacgaagaggaaggtaatctcttgatacctagtaaaaggccaactgatttatatctccctctctaaccacgactaacaaaaccatcggagggtgcgtccggacaccctgtccggatgccttttgcaggtataacgactgaatcaagaacctttgtgggttgagatcgcgtgtccatctattcggcaactgcgtggatcgtcagggactcgaggtatcaacaacttgcataaagtttcttatgtatatggatctaccaaattaccttagtaagttcatgatagataatttaaaacaatatcttaaggtcaatgagatcatcatcacttggtttcacaaatgcttaaactaaaatcttaaacttttagtatataatagtaagccaacaacatatatcaagccaatattagccacaattctaacttttgtaaaacaagttttaacaccatgttatgatgtcctaaaaggttaagcatttaaatcggttagatagttttgactaaaggattaaggctttatttgataattatttttgaaaataattccaaaaaacagtttttgataacaatttttgaaaattttctttgatgttttatagaacaaaagtttatttggaaatccgaaatgtttttatatttttaaatatgttttaaaaatattttttatatctagtgttttatttttaattattttacatgtttatataattattgttgggttccctcgtatgtgaggaagtgggccccatatgctagggcccaagtcagttacaataataaaatataaaaaaacaaaaacataaagtttttggaaaaaggaaaaacagagagaaatgaaaaacacatctcattgcccagatttcatcaaagagtcgatcctgcttcatctgtggtccgatcgagttgaaatttggaggaaaagtttgaaactcgagtagctacaatctaaacggtggagatcagattttgagctcaagaactggtgttactgtccattaatagtaacagtgtgtttttaggtattctttctccaagtttccttgtttttgccaagagagattatataatccaaggttatatgtgctcttgatatatttggtagcctttagagattattctagagaagacaggtgtaacccattattgttgataatggaagtttgaactggactaggtcccgtggtttttcccttcacattggggggttttccatgtaaaaattctagtgtctaatttatttttccgttgcacgagtttatttatttattgctactagttgttattacctatttcattttgcacaaagaaatggaagaaaaatcctggtgtttgttggaatattgtgaattaaccctaacaattatttaaaaaacaagtgaaaataattaaaaataactaaaagatattctctaaaaatactatgttttttgtgttaagaacagaaaatagaaaccaaattttaaattatcaaacatattttcctatttttttattttagagaagaaaaaaatattctcaaaaataattatcaaacatgtcctattgtatcaatcaatgaacatatcttaaggtcattacaaaaaaatattattattattattattattattattattattattaagaacagaaaatagaaaacaaattttaaattatcaaacatattttcctatttttttattttagagaagaaaaaaatattctcaaaaataattatcaaatatgtcctaatgtatcaatcaatgaacatatcttaaggttattacacaaaaaatgtgcattattattattattattaacaaaaaaaatgtgcattattattattattattaacaaaaaaaatgtgcattattattattattatttttatttttattattcacccttacagtatttgttttctattgtttctaagtatgggctacctcatgtgtagagcccgataccatatgtgtctcagatgatggacctgagacacagatggcccaatctttttaacggaatggtccctaaggcaggagggtatataaagggtaagtgtcagttcttgaaaatcacatcttttgaaacaagaacagaactcgttctctctcgctctcattgtcagagataatacagagaaaggtggtgccctctacaacctttgaagatccataccttatccatcccgataaacaatggactcaggtatgttccacaaaatctaaagaatgcatgttttaatgcttgatagatatatacatatattctgtatctgtgttgggtgatcatggagatttaaagaattctcacattatcaagataaatcacatgaattatcggtgtagggacccctcctcctgagaacacgtgccacacacctcatggtgacacgtggcatgcattatcatccagatcaccctcatccggattttcctataagatacacggggcgcgcttctcctatccggactgcctcaaggaagggcaaacgacacttataagcataaacatccggacgactttcacaatacatccggatgaccaacataggtcatccggatatgattgtccgggtcattgactgaagtaaagcaagtcttacacgttatcacaaacagcctgccatggcccacgttccgccacctgcagagtgaagggacaagatgaagtgacaacaagtcacttcccacgatcatttcacatgatcacctaccacgatctctgtcaaccgcccgtagggtgatgataaccctgccaccacctagtgtcatcatgacaacacaaaatatcttcccaccattgaagaggggaacaaagcttctgatactatatatacaaactttcacacaaaggggaaggtaagcttactatacctagaaaaggccaactgatttatctctctctatccatggctgacaaaaccatcagagggtgcgtccggacaccccgtccggacgccttttacaggagaaacgactgaatcaagaacctatatcggttgagatcgtgcgtccatccatttggcaactacgtggatcacaagagacgcgaggcctcaacattggcgccgtctatgggaaaatttttcattttgattcagtcactagcaaagatggccacaccttccagaagcagttcatctggtaggggagaggaaaataattttgaatgacgtcaaaccatcgaaagaagacagttggcaagcgaacgacaattgaaagctctcctccaggagacagaaagattaagaaaagaaaacgttgtattatgcatccaggcctcaacatcagggccccctcgtcgttagcgttcaagaggccaagtagcaaactcaaggccagagccagagtctatatatcctggaacagtaggagctatcccaggagcatgcaacgtgaggcctcatgagccacacacgcctatgtctcgagctccccgtgaggaaagctcggactctactcatttttcagcaaaaagacaacatgatagaaaatctcagttgtccaattcgatgcgcgcaagactaggcccacaagagcctgagagatcaaggccaccagtagccacaacctgggcaccacgccctgaccctattgtcacccccatggtgcagaacgtgcacccgcatcgtgacctcatggtcacccccatgatgcagaacgttcactcgcacctagcggtacaataagctgggggaaacctcccaaacgagccacccattggctccatcagcaaaaggttggatgacatactctccacacccttctgctctcatatcattcattacgagcccccaaggggattcctcgtaccaaaattttccacatacgatgggtctagcgatcccttcgatcatatcatgcactatcgacagctcatgacgctcaatattggcaacgatgcactactatgcaaagtgttccccgccagcctacaatggcaggccctatcatggtttcaccgcctacctcccaactctgttggcaatttcaggcacctgtccgaagctttcgtgggacaatacttgtgctccgctcgacacaagcagaacatcagcactctgcaaaacataaaaatgcaagacaacgaatccttaaaggaattcgtgaagcggtttggccaagccgtacttcaagtagaggcttgcagcatggatgctgtcctacagatcttcaaatgaagcatctgtccaggcactccatttttcgaatcgctagctaaaaaacctcctacaacgatggatgatttgttccgacgggccaacaaatattcaatgctcgaagatgatgtacgggcagccacctagcaagtcatggttgctgggcaggcatctagaggtggcgcggaaaggaatgctaaacttccggaccggccaaagccgtctgaccgaaggcaggaagggccaagtcgcccggaaaggccggctcttacacctttttccatatcatacgaaaagcttctcccaatgatccaaggtttgtccgacttcaagtgacctagacccatcggaacagacccatccacaagagatcatagcaagagatgtgtctttcacaaagatcatgatcacacaacagagacatgcaggtgcctccattatttggtcgaaaaactcattaaggcgagacatttaaagcaatacctctgctcaaatgctggaggaagagacgctccccaaaatcacaactctggagctcccagagccctagccaccaccaaggccgttataaactacattaacggaggcccatctgacgaagaatatgactccaagcgaaagaggcagaaattgctgcgggccgcgtcagtacgcgaacgtatcaactccatccggcctgggttaactagaggggaccctcgccccatagatgggacaatcattttcccaccagttgaccccacccggacattgcattcccatcgcgacgccctcatcttgtccctagagataggagacttcgacgtgagacgcatcttggtcgacccaggcagctcagccgatcttgtacaagcatcggtcgttagccacatgggacacagcctcacaggccttgaaaaccccgaacgaatcctgtccagattcaacgggtcatcaactacatccttgggagacattgtactgccggtccaaacaggcccagtcactctcaacgtacaattctcggtggtacaagagttatcacccttcaatatcatcttggggcgcacatggctacactacatgaaagtcatcccctctacatatcatcaaatggtgagtttcctcaccaacgatgggcaaattgacttatatggcagccagttagccgctcgccaatgctaccagatagcacgagaagcagggaccaagcagaaggatgcattcctccctgagcccagcaatgcacgtgaccaatagcaattattgggttcggtggacaaagatcccccgacagcaaatcccttaaaaacaatccaaatttcggaggaaaatactcacctcacgaacatcagttccctcatgacgccagaagaaacccagaacatgcaaaatgccctcaggcaaaactatgacatcatcgcatgggcacattcggatatgaagggaattgatccctcagttacctctcataagcttaacgtcttgccaacagccagacccatctgatagaaggttagacgtttccacccaaacagacaaaaagtcatccagattgagattgacaaattgctagaagttggatttattagagaagtagattatccggactggttggcaaacgtagtggtggtacccaagaaagaaggaaaatggcgggtgtgcgtcgactacaccaatctcaataatgcatgtccaaaagacagtttccctttgccacgaataaatcaaatcgtggattctactgctgggcaagggatgctctctttcttggatgccttctccggatatcatcagatccccatgtccccggatgacgaggaaaaaacagcattcataacgccacacggcctttactgttacagagtcatgtcattcgggctcaaaaatgttggcgccacttatcaaagactgatgacaaaaatcttcaaacctctcataggccacaccatagaggtatatattgatgatatcgtggttaaaagcaaaacccgagacgagcatgtttttcacttacaagaagtttttcacctcttgaggaagtatggcatgaagctgaatccttctaaatgcgcattcggaataagcgctggcaaattcttggggtttatggtcagccaaaggggcatagaggtcagtccggatcaagtcaaagcagtcatagaaacaccaccacccaggaacaagaaggagttacagcgcctcacaggcaaactcgtcgtgcttgggcgctttatagcccgcttcactgatgaattgtgacccttcttcttggcaatacgaaaagttggaacaaacggatggacggacaactgtcaaaacgcttttgaaaatattaaacgctgtctcatgcagccgcccatcctgagcagccctatcccaaaagaaaaattatacatgtatctggctgtatcggagtgggcaatcagcgctgttctattccgctgtccctcaccaaaggagcagaaacctatctactacgtcagcagggcattggcggacgtagaaaccaagtattcaaaaatggagctaacagcattagcccttcgaagcgctgcccagaagctccgtccctatttccaagcccacccggtggtcgtgctgaccgaccaaccccttcgtaacattctgcacaaaccagacttaaccggaagaatgctgcaatgggttatcgaattgagtgagtttggaatcgaattccaacccagattatccatgaaaggccatgtaatggctaacttcatgctggaatattcccgaaggcctagccaaagccagaaatagagtgaagaagagtggtggactttgcgagtcgatggagcctcacgatcatccggatccggcgtagggctcctactgcaatcaccaattggagaacatctggagcaagccatccagctggggttccccgcctcaaagaatgaagcagaatatgaagccatcttattcggattagacctcgctctggccctatctgtttccaagctccgagtctatagtgattcgcaacttgtagtaaaacacgtccagaaggaatacgaagccaaagatgcgcgcatgacacgatatctgacaaaagtaagtgacaccttacaacgattcaccgagtggagaatcgaaaaaatcagacgaactgaaaatgggcgcgccgacgccttagccggcatagctgcctccctccctatcaaagaagctattctgttgcctatacatgtgcaaaccaacccttctgtcgtagaaacctccacttgcaccattgaggcaagtcaaccagacggccaagaatggacaaacaacattgcacaatacctccggacaagcactttgcccgaagatcccaagcaagcacacaagatccgggtgcaagccgctcgtttcactctaattggggggcagttatacaaacgttttttcacaggcccctaccttcggtgcctaggtcattcagaggcccagtatgtgttagttgagttgcacgagggagtatgcggaaaccattcaggaggacggactctggcacatagggcccattcgcaagggtattattggcccacaatgaaggaggcggcagtatatgtcaaaaaatgtgataaatgtcaaaggcatgctcctattccacatatgccatccgagacattgaaaccaatttcaggtccatggcccttcgcgcagtggggtatggacatagtgggacccctcctagccgcaccagcccaaaagaaatttctgctcgtcgccacggattacttcagtaaatgggtggaagcggaagcatatgcaagcatcaaagacaaagatgtcaccaaattcgtatggaaaaacatcatctgtcgtttcggaatcccccaaaccattatagccgacaatggtccacagtttgatagcatcgccttccgaaatttctgttcggaactgaacatccgaaattcttactccacaccgcgttatcctcaaagtaatgggcaagcagaagcaacaaacaaaaccctgatcaatgccttaaagaaaagactcgagcaagccaaaggaaaatgggtggaagagttgcccggcattctgtgggcctatcgaaccacacccgaacggctaacaggaaacactccctttgccctcgcatacggtatggacgcagtcattcctaccgaaattaggctacccactatccggactgaggcagcaaaacaagatgatgcaaacgtggagttaggaagaaacttggattgggcagataaagtaagggaaagcgcagccatccggatggcggactattagcaaagggcatccgctcattacaatcacaaagtaaggcccagaagcttcaaaaatggtacgctggtccttagaaaagtttttgaaaatactgcagaaacgggagcaggaaaatttcaagccaactgggaaggaccctatatagtatctaagtcaagtgaaagtggtgcttatcatctacaaaagctagacggaactccttcacactcaatttgtcaaccaattttttggcatgagcagcaccgcatgggacaggcgaagtcacttcctggttcgcagacatcttttcgcttcgtaaaactgcatgaaagtgacaccaacagtaaaaaaaaaaaaaaaaaaccctagaaaccaaaaaatataccaacattcacacacagtcgcaagcagcttgcccaagcaagtcagaaccagaccaataaagacaaacgcaaacaaaggaaaagacaagagtaaatgcacgtaccaagcggaaatctggaggcgtgaggttgaaatccacagtaacgtcgccgacaataaacgcaaaaatcaccggtagaaaaattctagggcttcactcaggaaaacaaaggagagcacagaaggaagaagaagcagtactctcaggaaaaacgcagtaggaaaaatgcaacaaaaggcatagtatgctatttatagggggcagcccctcgaaaaaccaaacgcacagctgcgccatcattgaaacgacatgctgcctcggaatacctagagtcggcggctcatcataaatgccttttttggcttcctcacctccgctcgccacgtggcccaaccaaacaaaaagacgacttcagtttcaaaaaaaccaattattttttaacccgcccattttttcgctcaagcaaaataggcaagttaaaaaaaggggcattgtagggacccctcctcctgagaacacgtgccacacacctcatggtgacacgtggcacgcattatcatccggatcaccctcatccggattttcctataagatacacggggcacgcttctcctatccggactgcctcaaggaagggcaaacgacacttataagcataaacatccggacggctttcacaatacatccggatgaccaacataggtcatccagatatgattgtccgggtcattgactgaagtaaagcaagtcttacacgttatcacaaacagcctgtcatggcccacgttccgccacctgcagagtgaagggacaagatgaagtgacaacaagtcacttcccacgatcatttcacatgatcacctaccacgatctctaacagccgcatcacctaccacgatctctgtcaaccgcccgtagggtgatgataaccctgccaccacctagtgtcatcatgacaacacaaaatatctccccaccattgaagaggggaacaaagcttctgatactatatatacaaactttcacacaaaggggaaggtaagcttactatacctagaaaaaggccaactgatttatctctctctatccatggctgacaaaaccatcggagggtgcgtccggacaccccgtccggactccttttgcaggaggaacgactgaatcaagaacctatatcgattgagatcgtgcgtccatccatttggcaactacgtggatcaccagggacgcgaagcctcaacaatcgggatcatctagaagtacgtacttatattaaaatggtattattcctaaagactgacatagtttgtgaactctggtaccctaaaaatgattttaaaaagaggttgatcggagattgaaaatgtgagcgccatgtgataaggtaggagatgtggggctgatggatggcttttttttaacttgtacgattattttaaaaaataattcttataaaatggtagtttgaaaaaaaaatcttaaaatatggtagttacaaaactattgataaatatacgacactttttaccactttagaaagtgtttattgaaaaaacatcttccatatttttcatatcaataatacatgttaaaaaaaattgaatttacactacaccttccataattccataaaattgaatttatactaaagaaatatcatttccacaataccataaaatcaaatttatactaaagctttcacaattttcatatcaatcacacaatgaaaaaaaattaaatttacattgatggcatctctacaattccacaaaattgaatttatactaaatatgtcttttgaagaaatatttttgacaatttttatattagtcatctatcaaaaaaattaaatttatactaaaagtgtctattgaaggaaaacatctcaatataaatttaattttatagaattgtggaagatatcttttgaaaagaaacttttaatataaattcaattatttcaatggatgactgatacaagaattgttgaaggtgtctcttcaagatacacctttaatataaatttaattttatgaaattgtagaaagtgtcgacatctttagtataaattcaattttttactatgcagatgatatgaaaattgtgaaaagtgtttcattaaaagacaattctaatataaattcgattttgtaaaattgtaaaaagtgtctcgtgaagagacatttttaacgtaaattcaaatttgtttaacgtgtattattattataaaatttgtggaaggtgtctcttcaagagatatcttcgatgtaaattcaatttttttaaatgtgtatcattgatataaaaatgatgaaatgtatgttttcaagagttaccttttaaagtggtaaaaagtcttatagatttggaaatatttttcaatgtgatgtattttaaaaaattaattttaaattcaccattcaattatatatccaaaataggctgatggatagtggagtggaggtggttgagaccaaatagcaaggaagggattagctggagcagaatgtggagtcaacagttggctgaaatgaaggagaggggatattttccaagtaagaaagacaagtaggaaggaaaattgataaagcacctatagaattaatcatgctcaacttgtattatatattcttatttaatgtaatactatatatatatatgggtacttcaattttacgaatatattataaatatatcagtggatattttgacataaaatatggatgatataaaaattctaaaaatatttttaaaaaaacttttaaaaaattatataaaaagtaaaaatatacattttaaaattatttttttaaaaaatataaattttataagtgtaagtttattattaattacacaatattattttacgataatatgtttaattttaaaatatatttaatattaaaattaagatccattttaatttaaatgtattcaattatatcaaataaataataatatatgattattttttatatttaataaatatatagattatataaaataaataaataaaagacataaaattatatttttatatttatggtaataaattaaatcaaatgtaaaaataaaataatttgaattaatttatttaataaaatacttttgattatttttctatatatattttgatgcatattatttatcaaggagcaacttgcacccatggttgttgcatattttagagggtttgacgttgatcgaggcaatccacgctggccaagcgaaaaatcgacaaaaaatccagatacacgatgtatcgaagatattccatccatataaatggaaatttactactatcaatcaagccaatacttgaattgaatgagttaggaatcgcaaggcattcatataatattaatactatcattttttttatttttttattttgcttgttatagtggtgatcatgacatgtctattccacatattggcacacaagaatgaacaaattcactcaatttgacagtagaagacccttggcaagcatggtataccaatggtcaaatttttacctatagctcaaagctaatgctactatcttatggtcacactgttattgtttcatgaagataaacagaaagctttacaaaggatgactttgatctaacatttgcaactctgaaggcaagaccaattctcacttcattcttctcttcatgttttaattatagaatttctcaagagaaaaaacaaaaagcatagttttaattgtctaatttctttggatacatttacagggtcatgtagctattgagtacaaccccaaggagtcttatgccttgattgataggtgttttgctcattttccactctagttaacagtagttgaggtgagcatcatgacaggcccatttgaggaagagaacaaaaagaaaaaaaaaagggggcctcagttttctaggtcctatttgagaccaatcatttttaagtaaccgaaaaggataagtcagctttaatatctcgatgcttatatttaattcataaaaaaaataaaaaaataaaataaattatatgttattttttaatatttaatatttatttaaaataaaaattatattacattctaatatttgttattaaaaaggtacaaaaattctcttacatctagtgttgtttagaagttgttcaacaatttaaaatttcttaaataattttttatttgttaacaatatttataattgaaatatttaaatatcatggtaatttcttttcatttgaaagaaagcactttggaagctacaaagtgttttcaaccgtccttccaaaggtgatattgaaatattcaagatcaggttaattaaaaaatgttcgaaaatgaaagaatagattaagaaagtattttctcatgtttttaagaaatattcacttagaatagtcatatcgtaaggaactcgcaatgacccaagagcaacaccaagtaaatattaaaattaatcatctttcttaagcattgaattgcataaagataccactatatatatatatatatatatatatggatccacctaaataccttaacaggttcatgatggatatttacaacaatatcttaaggtctatgagattgtaatagcttgatttcataaatgcttaacctaaaatcttagacttttaagtgtaatagtgagtcaacagtatatatcaagttaatattagctacaattcttatctcctggaaaaacaagttttgacaccatgtcatgatgtcttaaaaggcttatacttttaaatgggttaggtagttttgataaaaggtgaatttaaggttctattttataatcattttcgaaaacaattttaaaaaatagttttaaaaaacagattttgaaaactattttctaatgttttgtaaaacaaaaatatgtttgaaacctaaactattttcaacctatttttaaatatgttttaaaaataatttttatttctaatattttatttttaatcattttacatgtttatataattattttttaaagcaatcatcaataaacaattaaacataatttaattaaagatgttctctaaaaataccatattttctatttttaaaaataaaaaacataaatcaattttctaattgtcaaacgtgtttttcctgtttttttcaagtttcgaaaaacaaaaaactgtttttaaaaacaattgttaaacaaaccttaatgtatggatcaatgaacatattttaaggtcattgcgagaaaaatgtgcatcatattaattattatatataagtggataatgcattgcttgctatatatagcatcgacatggaataataattcgtgaaaacaattactatttaaaattttttatttatatgacaaatcttagtgaaacattttttgtaattggcattaagatttatcaagataaatcacaggaattatcgggattatctagaagttactacttctattaaaatggtattgtatcgaaacaatatagatttggaacagaggaaaatagtaaaaattaaaaattaaaaatgctgcatgataactattagttaatttaattctaattatattggttgtaaagatactaaaaagtctacatccttgcacgctaattattggagctatttcttagaagaataataagtaaattatcaaccacctagaacatgttattatgaagttgtgtataattaatgtaatttcttaacactttctgcataattagtgtaatttttttaaattttaaattttttttctcgaaaactataacaccaaaaataatgagttcaatgtagaaatgaattcactttttcaaaaaacaatttcaacataaaaaataccaactgtattttgaaaatatgagttcaaaataaaagctttgaaggtaacataaaaaattttaaataaataaataaatatagacttattttttcaaataacgaattcaagataaaaaaatttatacgagttaagaatattgcatttgagagagagatttaagtttcagatctcaatccacattaatcacgagcaattcttttaaaaataataataataataataataataataaaaaggttgtcatatgctgatgtgaaccttttctcaaggtcgcacaacacccagaggcgggcggaagggttccaccgacaaacttggaaaaaaaaaatgtataggtatgtacaggtaatattaaaaaaattaacatctcgtggccgtccgaaagtctcatgcacttgccaattgcccccgacaactttaaatcctgcttcggcgacccacaccttcctttttttttgacaggaaggtatgtagcttggcatagatttgagaccctcccacaagcccaagaacggtcgctttcagtattccatttactcgttcaatctccaaccaactttctccatttccaaaccatagaagatcaccatgttgacagtgagttacgttccacacccatctcttatttatttaacaacttcaaagtgcttattctgcaaattcattaaccccatcgtttt

SEQ ID NO: 12003 - DNA, 4158 bp, Vitis vinifera
  Intron number 2 from transcript GSVIVT01003791001 (locus G SVIVG01003791001) derived from phytozome v7.0 (chr-ID chrU n; pos 12751939 to 12756096 reverse strand)
caatctggcccttccaaatttttattgtcatctagtagttatactttgtttaagtcgattgattattagattttcaattaatgcagatttagggatatgttgtttaatttaccaaagatctcttgtttgtaattcccgttatcatatatagatcttggttaagatttgccaatttcctcagtagcaacaatatcagttactagtggaataaatcttgtgtaacctgtagcatcatttttgtgtaaccttatttataatatttttcagaccaagaaaaattattattttaatagggttattgatttatcgataaatgaatatttattaatttataaaaaatattatatttttattttataatatttatacatgtatgacttataaataaggtattctaattacaataaaaaaatagatacctcggagataggtagacccatcaatggaccctttaccctttttttttccatctaatttttcatgttcatcataaaataataagatggataaaaaacctttattttttcaatcccattgtttttttgtttttgtttttttttttttttggaaaaaatcatctttatcaatattaatttgaccagaaggaaaacaaatttacccaagcatagcattatgaccaaaatataaaaataataatagaaaaaaaactcatatggtttaaagcatcttgttttggtagttaccatattaaaacccatgaaatctaggtagtagatgaaggaactaaatcctgtagtagagatgatattgatatttcaaatcattcacatacatgaataaatgcgggttagtgtaagaggcaatagttgtttcatcgtggacacaatttctatcatttgcccttctaatgctttcatgattcagccacaaatgtctgttcttctttgctccccattttcaatttcagctcattcaaccatctaggactggaggaaagaatcacatgagcttggatggaagccgcaagtccattaccctatgacccatacttcacaacaaggatcatattcatcatttcaaatagacaaattcattcagaatctgactatattattaaatatattaaaataaaactaaaaaccacttctacaaaagcataatcacttcattacaataaactagcatattaaaaaacccggataagcaaaaaatctaattttcatcttcacaaagcatctcaaccaatatattttacatagacaatataaattctaactggtatagtaagaaactcgagtgttttcaacatgaaatgaaacatattaacgaattctgtcttcaagatctgatatcatagttgatgccagggagttgaatttcttcatggtctcacatgtagtactcttaagagaactcttagagaagactaatccttttcgagcctatgaagagaataccattagcaatattaatccatatgtagtgccttaaccaaatttaataaaaaataacaataaaaataaaaaataaatttaaaaaatttactcaatttgcaatatctatgtgttcaaactatagccttgtcctagaagattctaatgcatttttctatcttttaaatgtcaaacttcaagattaaatttgcaaatgtccacgcatctccttaaggaatcttgacccatacaaaggctacctagagatggcaaaaaatatgcatactaattgatccaagcctaagttttttttcaaaggtagccaaaatacgcattaaaagcaccaagaagagcgcactgaagcacataggatgtatacaaaggttgcttagagatgaaaaaaatatatatgagaatgtttagatcctcttactcaaaacttggatcattggtttagtattcatgtattctggtttaaggaaggatcttgtaggggttgttggttatgattatctattggaaaatggagaaagaaagggtgctaaaattttttattttctccttaaaggttgaaactatggattacatcttgattgaatggaaaatgtagctccatggttgataaaggaagtacctaaggttgacaaaggtagtacctaaggttcactaaggtagtacccaatgtttaccaaggtagtacttaaagttcactaaggtagtacctaaggttcacaaaggtagtacctaaggttcaaaagggagtaacctataaaataagaatctcatgctcatatctaactgcaattgaagaagtagcttagaagtatacaagtccacacttatctcaattggtcttgaaactatggattccaccctgattgaatggaaaaggtacctcctattgttgagaaacgtagcacctatggttgacaaaggaagtacacaaggttcacaaattaagtgtctgagctcaattaaggtagtagctaaaattaactaaggtttgcattaagggagtacttaaggtgtacatttaagtagtacctaaggtttacatacaggtagtacctaaggtgcattcaggtagtagtacctaagatgcatttaggtagtacctaaaatgcattaaggtagtacataagtttaaaaaaggtagtacctaagtttaacgaaggtagtacctaaggttgtgtgggtgtggtggatgtttatagccttggtgtcatggtattggaaatcttgtgtgggcgaaaaaacatagaccaatcttagtctgaggaagatatgcatttactgagtattttcaagagaaaggcacaaaaggagtagcttttggaaacacagtatcacgaaaatgcaatcacatagaataaaagtagtgaagatgatgagagtgggtgcatggtgcctataaagtgattttgctaagagaccttctatgtccatggtagtgaaagctctgaagggtttggttgatgttgatgagaacctaaattatagcttctcacctttgccactggctggacccttaccagtggttggtttaaaggaaggtgttgttggttctagtactactccattatcagcattagttttattggggccaaggtaaaaaaggtttcacaaattcacgaaacttaaaaatttctttgaggagaacacaattgcaattctggatgcatagtagtcatatgtagatgaaaatcattgaaatttcatattttccattacattgttgttccaaggttcaatatgggagaatcatcaagatcaatgaagatgaaagtatgagataatgacttataattgcttattgctttctttttagggttgtagaatggtattattttatttttaatttaaaataaggaaaatgatgtaatgaatgaaaagaaaatgaagtgggataggaaaggtaataagaagaaggcgggatttaagattttttttttcaggaagaggggaaggaaaaaaataaataaataaataaagccattatgtaattttatatgaccattttgattaaaaaaataaaaaataaaatgatgggtatgaaaaagtaaatgtagttttgaaatggaatttccaacttaaatcttaaaagcattttgttttaaaacttaagtttaaaaaacaagttaatacttaatacaatgaactaaattaaattaagatttattcaaatttaagaaaaagaaataagttaaaaaccttttgccatgtttggtagcataaataaaaattatttcctaaatttattttgaaatataaatgaaacagagacaacaattggtatgatttctacatatgaaaatttacttttgattgcatgcatattgcaggcagactgaaaacaaactaacaaacagtgaaaattttaattagttcccactcaaaattaattttactctcaattgaacttccattgtccactaaaacacaattagttattaataacaaaataaaggaagatccaaatttgaaataaggtaataaaatctttataattactagtatcacatttttttgtaatacatatattagttagtcatgtgtcacgaaaatataacaccgatgcccaattaaaaaaaaatgtcatatgacattaaataaaaaaataaaattttgaccagagttttctatatcctagtaagatacgtgacatgtatcatatgagacttataaaataagaattatcttttgatgaaatataaaatctttggttgactttactaggaccctttaagtgaattagatcaaaatt

SEQ ID NO: 12004 - DNA, 6936 bp, Vitis vinifera
  Intron number 4 from transcript GSVIVT01022434001 (locus G SVIVG01022434001) derived from phytozome v7.0 (chr-ID chr8 ; pos 2934538 to 2941473)
gaagaacttttgcaaatatacattcattctgaaaggttagggaaaaaggttctctcaaagtttagccttataactatcatttaacatgaaccatacataatatctactgtgcatcattataattgccattcagttcttacttacttaggctgatggacttttcaaaccctagcatcataatgagggattatgttaaagttgcccatgaaagagtttgaagttgagtaaggattgatggaagaggcacttaggatggaattggagtttttagggtcttttgatgatttgaagtgttgtgtttgtttgaaattgtaaaacaatgtgtaataccataaagattgagaaaagaagtcataaagctaactctattgaattgtcatcgtacctttggtacaaggcattgaacttacaatccttagttgaagattcaaaaatccaaatttatgcttataaactctttttataaaccaaaaaacctaaaaataattaatttttttgcttgaatcatgctaatccttatcacagtttttggacaactttctagagaaccatttcttacgttgagatgtgatgttttaaacatcaggggaaaccatgggtagacttttggaatatattttaaaagtgtttttgaaactctgagaaaaccttttgaaacagttgaaaataattttttttgagaaatatgtgagcaattgatttctcagaactctatctctttctacatgcgtctctcccaacacttctcaagcctcttccccaaaatgactcactaacatttgtagaagatttctttatcccctaaagttgacattttggtttattaaatttcttttctaacatttattttggttttatcgaattcttaacttttatctaaatattttcctggcctcacattttccacatagtttaaccatgatcttgttgctttgtttccacctgtctctgttttctgcttttgatagtggtaactatcagttggtaaacttggttgcatcctattatctattcccctcatacttgatgtgtttaaataagggttgaaaatcacttaaaagaatatgtatatgtgatagggaaatgctattagtagaaaggaaaaggatacaaagaaggatggcataccctttagaaaaacataaaaccaaggaacctagagttttcccttaaatacactatagaaaaggcttcaactaaaaccaaacccttatgaacagaaactttgagttattaactttcccaaaagcttaaattgttgggatttaggctcgcaatgtataccatggtctatttgtctacaactattgctatttgtgcacctcccatggtgactatagggtcatatgtgaagagagagggaggaaagaggagggggggagggagggggagcgttgtttatgttagagcatgatgtacatggtgtgacttaactagttagcatttcaaaaagtaggtgattcaagatggcattggagctatggttaattggaggtcttaagcttaagtcctccctttatttatttatatgtttgattatctatgattaaaaatatatgattttcttacagctattattgtttttgcctcctacctctagctattgctgtttgtgcctttcatagtaattacctttgatcacaaaaatgtggtttgtatgtagctaatgttgtctttgcctcccatgatagatatggggccacatgtggaaggggaggagggcaggatgggtttgtcttgagcaagatatccattgtggctcaaaatctgagcaacttgagcttttagtaaaactagcaactcaacaaaaatggatgaactcaaaaagggagaatagtgtcataggatgcttcaaatgagcctcccatgggtttatattaagcctaggaagcttctggagactcctggagccatctacactaagccattggtgggaagagtgtggaaggttgtagagatgcctagagatgtccacacatctctccactatggtggaagacatgagaggagtctaaggctttctagagaattctaggaatctcttgaatattcttgtacataagtttgtacatagaattgtatagggtattctagaatcttcttaattcgtaaggaaccctctaagggtccagagagttccattggtgcctatatataggtaagggcctcatttggccaaggcaccacccaaaaccacccaagaacctaactaactaaacaagtgagttctcaaagcacttgtaaagcttcctttgaccacatagttttaaaaggctcaaggcgcaccaaggcgcaaagtagtcctatagcctaaggcacaaggcgcacctaaggcgcgagctttagtgaagtgaggcgcaccctaatttacatatatatttttatataatataatcaaatttaacaatcatttatttttcctaaacacataaatcatcaaatatcatccaaaacttcaatttaatcaacatgatgaggtcccggaaggtacgtgataaactgattaccttccagagtcttgggtttcaaaagtctcatggatatactttcatcgttttatcctaatatgagaaccacaaaccatcttattcctaagatatttaggtgtgtgtcctttgtgtatgtttacagtccaaataagagaaaattgaaccaaagagcagtcaagtgtatttttgtgagatattccctaactcaaaaggggtataagtgttaccatccaccatccaaaaagtttttttttttttttgtctcaacagacattactttcaatgagagtgaatcttattttcttgctccttatctttaaggggagaattccattaaggaagacaaggatcaagattcctttctcattgatccctttcttattgaccactttcttatcgaccctcttacaatctttagtctagtgtttgatccaaatgatctttggtctaatgtttgatccaatatttgtaccccacttctctgaactcaagtcgtttgatctagcatccataccccacttctttaaattcaagttgttgctgcttgaacctgctccaaagaatcgaatgactaacaaagtgtacttagggaagaaagttgcaattcctaaacttacacaagtctaagaatccgaaccaacttttggaaaggagataacagtttctcatcctttctcacgaaccaagtcaaaatttttgtttgaaaaatctgtggatcaaaatctccttattgccatcatgaaggaaacgagggaatgcattaaacacccttggtgggaatctagtgacatggaaaagtaagaaacaaagtttggtggcaaggtccagtatagaagcagaatttcgagcaatgacttaaggagtttgtgaactattatggttgatgattaaatgggatgggccaatgggactctactgcgacatatcgaggagacgcttagattgatctatactccctaaatatctattgaccactaacttgtagacatttttataaaaggtttaagcagtacaaagttttaagcaagtgtatccaaattgggaatgaaaaacatctattcactagcttgagagggagtatggaagaatgggattcgggaagttgtgattttatagagagaattaggtaatcccatgatcaaagggatttgttgtaattaagttggggaagttcctaatttaggtgctaggattttttttatatatatatgtgactctatgtgcagaaaagaatcaaggaaaagaatttttaccttgtactccttccatttcttttctacaccttgtcttaattctctagttgctttatactatcctttggcacttccattcactaagaccacaaaatttgtcaaagacaagcaactccctcatctaagacttccatattaagctaaaccacttcatttctagtgcagaatctaaaaaacctcaatccacatgattgtatgccttttcaaaatcaattttgaagactaccccttcctctcttatatgtcttttcttatctatcatttcattggctattttgacaatatccagaatttgccccccttcaacaaaagctccttgttgttaggatggtttcatgaaggactccttagatatgcttagataatacttagacaatcaatcgcccacttgccatttcagggaagaaaaactcaccagagttgcaatccctttcttttacctatctccccctagctttttgcctcaaatgcacctcttcctttagcaacaactcccccatttccgcctaaaccccttagagctgaaagttcaagaatcaaactcccttcctactcataagcatcaatactaacactatcattaagaatattcttcttcctttcttttaagtctccaaaagacaccttattctaatctttcaatttttatttaacaaatttgagcctctgcatgaatttatgtctgtcccacccttcactttgaaactatctccaccaaaagctaaaattttccttgatttatgggtggagtaaccacatgttctcaaacctaaagattagtccccacttgaatggcttagagtctaaaacgatctgacaatggcctaaggagaactttttagtggctttgagggaagcattgctcaaacccatttgaatataaaaatctatccaatctcttgcgtctacagaggactataacatatttgaccaagtgaaagaagcattcctaaggggagcatcaattaactcacattcttttataaatccatctaagtccttcgtgctaggggctaatttggaaacccccaacttttccaaaatttttcttatgatgttaaaatccctacccatgcaccatttcggaaaggttaaaccaaagagatttagaagctccacctagatgtccttcctaagagatatattgtttggttcatacatttaggtgagccaaaatatcctagctccatctgataccatcttaattgtaactaaaaaggatccttctaccactttgagcaactatacttgttgattactagaaattgttttatggttgtataaattgtttctccttttgttgcatactccatcaggccaagaacttcaacttcgatcccaaaattgatgttgaagagcacaaagatagatggctatggtcaagtattgatgagttaggactctcctttttggctttaaggagaggagtggacaattgttgtctacagcaggaacaaaggtaataacatttaacaagaaaaaagagaagtgatagtaatttttggagccttactataggttttaggagtgtcatctaaaaagtcttcaggcttcacaacgaccttgtaggagtttcacctgaaagagagaatgataacagctctcactattaaagattctgatttctgaagttctgttttacaatgttaacctcattcttaggttttagaaaaccacaaaagtgcaacaaatgattcgaaaaaatgacctatattgctctaattctttttgtagaaccctaagaccctgtaaataatacaattacaaaatttctatcaaagaaacctcagaattttaagtaggattcaaataaccaactacagctatctttcatttcaaacaagcccacatgcagatgtggcagatgctgcctgttgaaagagagaaaaaaaaaaacgaacacttgctgatgtggttaagagcagtgtgctgcttagtggtctccacaccagaaacactcataaacgagcattttaaactccttcaaaattgtaattttcattcataggtaattctaaaaaaaaaaaaacaaaagaattctctacatcctttctaccaaaaattctctttgtaaaatttctcagcggaatgtaatcttatcagttcattgatatagttctttgaacaacatcacatttctagaatatgaatggcaactcactgtgaatgagcaaatgctactataactggagaattttcctcattataatctatatagaaacctatcgtatttgtctgccagttcgttgccctgcatcaacttatgtataaggcctttatgctgtttacttgagtactatttatttttatataattccttttttgggttgtaagtcgtttgtacttatgtgtacatattgaagtctgccaacttatttcaagaatgctgtattcacactgggcctgttttgatcatcagtaggttccttgaaaactattgttaatagttgtgatataattctgtacaattgcatagaaccaatatgccatacaatttttcaagctaagtttgatcaatactgttgattcagttaccatttgatctatttaccttgttcagatgtttttatccctttcttttttttcctttcttttttctctactttcaagtttgagtcctctgttctccattacttttgttgttttggtgcagatggctaaatcttagaaactcccataaagttttcaataatttcattgctcttcactgagcattttgaaatgtattaacctccctttcaaattaaatgcaaagttaggttttttctccacacgtaatattttaattaagatatgtcagatctggggtagaaaattgtttttattgtattgaaatattgtttcttttctggtaactgaggttcttggtcttgataatcacatcacaacacgagattagagatattttagagacataactggaagtaatattttctgaaacattggccgagtttctgatatatgctttaactacatgcatacgtatttatgtgatgatgagtagagagagtacccgaataatacttttgggcaaccatcctttgggatgaagtttatattctaatatgctctaattctatctttagtgttgcctattcctctgtttattcttaatgttactgcagaacagtgctgattttcatgttatcttcactacagtgttgcacttgctgtggacaatcctgagttgttcg

SEQ ID NO: 12005 - DNA, 12170 bp, Vitis vinifera
  Intron number 8 from transcript GSVIVT01016080001 (locus G SVIVG01016080001) derived from phytozome v7.0 (chr-ID chr9 ; pos 18527056 to 18539225 reverse strand)
gagggaactatatttgagtagtaacgacttgacaggtatgattatatctattttttcttaaaatttgttgattcccctccggaaatatttaattgatttattacttttcatgacctaagagtttctcaaaagctttttctttacaaagtcttttatgcatttcattatcaaaaatcacttggcatacaataactttgggtctgtttggcaactatttgtaaaaacagttttctgtttttcaaaacaaaaaaaataagaaaacagttttctaagggttgttttaaaaaataattatacaagtatatagaatgattaaaaataaagcactagatataaaaaaatatatatttttaaaacatattcaaaaatataaaaaataggttaaaaatattttaggttcccaaacagacttttgttctacaaaacaacaaagaacaacttttaaaaactattcttgaaaactattttttagaactgttttcgaaaacagttaccaaacagactcttatgcacagtttttctcacaccctaggttatgaaaatactttacactcaatcacaagcttctgaatttactatggaacttctcaaacttcctaataagacacctatcattagagtaaactttcttatgaatttttttttggaatctctagattgcttcatttcaagccctagacagttggggtacatgaaaaactatcttaagcatctctagatctatacatatagcaataaagaccattaataaccatagatctagagataaaaaccatgcttgtgatctagatgttcccacatttattccagttgatggagaagctggtgaggttcttaaaaaccaagggatctttcaaccactggctctctttcttggatttaggcacttgaggatggtgaaatcctctcataagggtggaagtctctctgaatcctcagaagattgaagaaaaagactaaagcttaccctaaggaggtttacataagcttccttgtgggtttattatcctaatcaaagatagcattcacaaactcatgtgcaaccttgcatttgtaccacaacacccttatgcacacatgtgaataaaaaacctaactaaccctaaaaaaccatgccacctaggaacatcagttgaggcgaggtgttaggataaagtccttaaaagcatgacttgatgtaacaaaatttgaaattttttatttattaataaagttctagtttcacttttatctatcctcattccatgcattgtactttttagtcttatggcttgcatctcttatattgtacatgacttgggtgcattaggatttccatggaagatccaaaccatgagttcattgtaagtggatgacttattcacaatcagttcatgggcctaggtttcccatggtgagttcattagtatctatagttacacattaaacaggacttacgatgagtcatgaaataaggctaatgggtagttatgacttcaccaagatgttatattgtgttgtctctcaaccttgagaaaatattaagtttgtgcccaagttagcagtaacttttacctacatatgagatcataaagtgatcatatttccctatgtattggatcattgttaatggaagtcggtagcaataggtattgtcaataaagccactttgatgtcttatggattgagacaaagtgtcttcttaggtgatcttaaggaggtgtgttcatgtaaatatggttattggagttctttaagtggaaattgacataagctcttagtgagcttacatatgtcagttgatcatacaataggaggatttgtaactctaaggtagtaaggtagtcctaatagactaatagcttttacctcattagactacaaacactaggtcacagacccgagcactttgtgtctcattatcattatataaggtactggagtggagtcaattctctatactaggatattgaattgagttcataattgcattttgagcaagccaatactatcctatgggtctaagtggtcctcgcttgagctcatacaccttgttagcacgatttataatggttggatcaacgcttggttcactaatgtgaataagggcgttttgctaattatacaaggttgcatagaagttagtgaattatatctctgaattaggttaattgattaattagacaaccattttgagttaatcaatcaatcaatcaaaagccaatttagcctagattcaatgactttaacccttggtggactcgagtcacttaagcctagtaatgaaccctataaataccctcttaagggttagggtttcaagctttgtcttcttccaccatccaaagagagcattatcctccaccctcccaaacttcccactattttggtgttaaagaacaaaggagagtcatcaggcgtaagatcttaggtatacaaaacttttgacaactgcaggattgatcttcactaatgagaactcaaattatacacaaggatggctcttaaagaacctattttagtgtatttgagacatttataataggctcactcatttagtttgttgttaatgctttagaaaaattcattttgatgtgttttgtgacaattttataggattaaggacattttgcacacttccaacatttcatgaacaaagggtatttaagtaagggacgttatcactaatagtgcactaagaaagaacttgaaattgcgcactaagtcaagtttaatatgaatagcgcacattgagggcaacaaagcatattgcccacttagagaaacacttcaatagtgcaactttaagtgttagtgtggattgcacactcaagggagccactatattatgcacttaaaggactcttctcatattgtgctatggtaagataatgcacctttcttaggcactccagcaatggcacaactaacactcgagaaccctttttaggttgttgactgcaaatctctattgtaattaaaatattaaagcttaaatacatgataactctgaccaagaaaaactagagatagagttaccacaactttatagtattctgggttgtcgtcctatgggatcaactttaatgtgtttatttgcttttagattaaaagaattaattatttgctaaagatactgaaatcctaaattaaataaatggaaataaaatatgaataaatatttcctaaaatatttaatgaaataaaccaaacaaaagaaagaatgttccaaagagtttcacaatccaatgtcaaatccttagagagagaaagcattatagaatctaaagtttaggatcaaagtcaatccgccaccaaattgaatcttaacacaaatattacatccaaaacttagatttttcctttctaaaacatattcctaaaaccattaagtgaatgagattcattaatggttaaaggtttggttttttaacccttcctactccttgtagctttcttttaggagggataactatagagaagaccaggataagtaatgatcaagagttaccaagaatcactagcattaggtaataatctaccgtatcattccctaatacaactcataaggataggtgatgggtaattttaattttctattttatttatttaaaacctatatctatctttatagatttggcccttagggtcattaatagtaggatcaaattatagtaactagtgatcaatgtctttccaagaatgactagtatcttgataaaaatcctctataatttatctagggtgatctcacatagaggatttattcctatcaattaaatcttgaaaacataaagaaaatcataactttattgtgttcttgctactcttctttggatttttcaccttcatgttagcatttctggatcaatcaagctagccaaacatggtggaggatttctcctcacaactcattttggttgtcaagaaaataaaatagaaagatgaaaaagaaaagaaaagaaaagcaaaccttaaactttattaaagaatttcaagaaaagagatcaatctccttccttatgctcttttccaaatcaaaaagtccctagaaaatcttacaattgagtttttatagtttccacaaaacccaacacatggcatgttcctattggccacttattttacaaataattacctaaaaatgactaaaaaataataaaatcatgatttctagttgtataaggcccaagatgcaattcctgaggtggaggagttgaaacatcaaagtggtagtgtaatttcaaaattgggtcatttcaaaatggatttcgaaatcataagttgaatttcaaaatcatttggaaatggtccttcaactatgcctagttgtcttcaaatggctataacttttttgtttcagctctattttgcacactgtttaaagttttcaactcctaacttcctaagctttgaaatgatacatagcatgcccaaaaatgacacaaaaaatgctccaaatttcaccttaaattcaaattacatgttgtgcccagattttgagttccaaatttccatgtgaacttgattacattagcttcaaacctccttcattatggttgtttgccctctatttcacttcataacatctgttgctagtattttatgcctatgacttgctcattacgccctttcttagactctttatggttcacaagcccggagtctcacatttatgcatatttagcttcttctattctcttggctgagaatgaaatttgtacttagcattcttttcaccccttaactgtttaagaagctacaacatattcgacttctatagtgaagtcaacaatgcaagattgcttcacacttctccaactaatagtcgtaccaccaaatataaatacaaaactataggtagaccaacaagaatccttgtcaaactgaaagtctgagtctgtgtactatttaggtattaactcctcattctggaatacaagcatataatctatcgttctcctaagatacttgagtatatgcttcacaattgcctaatgctttggtcctgttttttattgatatctactcaccatgcccactacaaagtaaatatctagtctagtacatagtaccacatacataaggttacccacaatagaggcataatgtactacttgtatgcactctttctccttaggtgtcttaggacactaatactgggaaagaggaattccatgtttgaagtgtaagaaacccttcttggaatcctacatcacatacttgactaaaagcttgctaatgtaagtggcttgaggcagcgtcaatttcctattcatgtagtctctcaagaccttaatcccaagaattgattgcacttctcctaaatcattcatttgaaactaagtagacaaccatatcttgactattgacaataaccttatatcattaccaatgagtagaatgtcatcaatgtacaagaccatgaagaccaccatgtttcccttcatcttcttatatacacatggttcgtcctcattttgatcaaagtcaaaagtattgactaccttatcaaaatgtttattctatgagtgagatgtttgttttaatctataaatgatttatgcaacttgcaaatcatatgctcttagccatttgctatgaaactatttggttgcatcgtatagagacactcatcaagattaccattcaagaatccaatcttgatatccaattgccatatctcatagttgagatgtgtcgcaatggataggagtattctaatggacttgagcatggctaccagctactaggtttcctcataatcgaaactaggtttcctcataatcgaaactaggtttcttcataatcgaaacaaggtttctaactacaatcttttgctataagtctagctttaaaggtctcaacctttccatctactcctctcttcctcttgtaagcccacttgcaccctatgggttttatccctttaggtacttctactagttcctagactcaattagaatatatagattctgactctgccttcatagcctctttccagagatgtgtagtcacatcactcattgtttcatcataatctatgggatcaatctcatgttcctcttgaatggccttaaaaaactctcccaaatacatgaatccttttggttgtataacaatcctcccactatgatgaggcactagtgcactaaaaataggaatggttggtattggatccatggtattcaatgttgttatgagagtcttatctagtgctctcaaatccaacctcactccttgtcttattactcatcatgtagtgatcttctagaaatctagcatttgcactcacaaacaccttctagtcaacttaactatagaagtaataaccccttgtcccttttggatagcctataaactgacaaacttcttatcttggttccaacttatggagctttggttttaactcgtgtgttgagcaccctcatatgtgaacatggtgtaaaccaagtttacgtctatctgtatctccataagagtcaaaggtgatgatttaaatggaaccatattaagtaggtatcctattgtttctaaggcatatctcaagaacgatgcaggaagtgttgaaaaactcatcatgaatctcactatatcttataaagttcaatttcttctttctaatactccattttgctatggagttccaagggtagtcaattgggatataatcccatgatccttaaggaaagaatcaaggtcactagacatgtattttcctcctcgataaaatagaagtactttgaggtgtttacctaactggttctctaattccaccttaaattccttgaacttatccaaggcatcaaatttcctatgcataaggtaaacataaccatatctagagcaattatctgtggaaatgattaaatactcataccctccatgtgcttagacattgaaagctccacacacataagtatacacaaattacaaacattctttggctctacccctttaaaaataaagtgtatcttggttattctaccttctatacaagattcgcatactgaaaggttttatggaactaatgagtgtaatgttccaaacttaactagtctttggatcctaattagatttatatggcctatgcatagatgtcatagatatgtttgactagtggtaaacaatagataatgtagaaatagaagtggtatgaaataaattatctaccaatgcacctgagcaaataaacgaatcattgtttctaataaaaccatttttatttaaataaattgaataattggatttatttaaattagaaactaaaatcaaattctttttagactcaagtacataaagacaatcattgagttgtagatgtttcttattctctataactagggtaatcctactacttgcataactatccttgtattaaatgctaaagtcaggtacatctctccctcattcagccttctacttagttaaaacccttgtaaagagttacagatatggtcaatggctttaaaatctatccaccatgaattggtggaatccaccactaaacatgattcaactaaaagtgaatatggcataccttcctttttcttcaagttatcctaagtcattgattaacacaactttgtgttcaacctttagctagcacatgcaagtaggagcattttaggtgattctaccacttcatgtctaagttaagtgtataaccaagatccttcatatcaatgttaccaagtgaagagtttcatctttaggattggtcactcccactacaaacatatatagtctttgtcctttcaagatagttcatatcccttgattccttggatcatcctatctttaggatgttgatgagcccaaaatcaagatgggcttgatcttagaggttgtggtcttgcttatggtcctctctcacttgatatcttgaataagaggctttaagataattctagtaaccttcttaaaataaattattcatcatcagattttccaaatctttatttatcagttgaattggggcttttgtgcacaataaaaatttcatttatattctttatccttgaactttcctttcccaatcatagttcttcttctcttaaggggaaagcttgaaaaacttggtgttatcatcttcttaactgttgttctccttctttaaggtgggagagcctagagaatgtcccacttccaaaaataggaaagtcctaaaaggaattgcaactcaaattagcaacaactaattatttaaataaataatattggaaagaatcttcatgaatatgtattcttttaagaagatccggagttaccaattttttaaatcatacaaatatatttcctatcacatgaaatatataaataaaagcataaaataaataaagaaaataagatctcatggccttagggatcttgttgtttatttagtaacctaaatattcgtattttttaaatccaaatatatcaaatgaacctacaacaaaaatagggttaacatcttttacaaaagaccataatgccctttaaaaccataactataccactaaagttgctaggagcgcttgaaacaacttttggtgcacttaaaacaacttttggtgtgcttgacaagcattgagaactggaagtaacttcaagtgcttgaaagaaatgcttaatccctcgagcgataatctaactgctcaagcgctcctatagaaacccatattttgactactagtttttgcatcttcgactattgttttctccatggaaactcctttttacaattggggactatgcatgatcacctcatgattgtccaaacttccaaatcctccataggttacatagactgaaaaatttgcaaaaccttttacattagaaaaaagaaaacgtatatatgcttctttcaaattaaagcttaccacccaatctaaacatttaaataaataaataaataaataaaggaatttttacattgaataaaaatcttataccccatttatagggcttacaacccatctagagaaaaatgaataccaatccaacaacaataatcacaattataatcatcatataagattacacatttacatgcatatatattcatccctaaaaccataagatgaataacatatcctaaaaaccaaaggtaagcacaccttagaaaggttctaacatgttttttccatacctatggctctgatactagttgtacggaatctcgaagtcgtttcctatcccaagaccatgttaggtgcataaaatctccctagggcatctaaatcctatgcaatgagagcaaaaatactatttttaacataaaaaaaatctagatcaatgcattagaaaactttatctatgatttggatgttctcaaatcaattcctttcgatgaaaatcaatcctacaatcaccgaaagtctcatacacctaagatcttccactcaatgtctctctcttgttctttaattagcactaaaatggtggggtgttaggagggtagaggttagggctttttctctctaaatggtgaaagaagacaaaagcttgaaatcccaacccttaagagggtatttatatggttccatactaagcttaagtgacttgagcccaccaagggcttagatcacttaatctaactcaaaataagtcataattaattaattaacccaacagggttatccaattagtaaattagccaatcgagagatacagttcactaacccctgtacaaccttacatgattaccaaaacgcccatatgcacagtaaaccaataacttatccaacccttataaaccttgctaacaaggtgtatgagctcgagcaaggaccactaagacccataggatagtactagctccatcaaaatccaattgtactctagtaccttaagtaatgataacaagacactaagtgctcgagtttgtgatctcttatccactatatacagtctgcccatgaactgatgttcatactctaatgaggtgaaagctttcaacctctcatgactacctctactatctgtgagctataaatcctcttattgtgtgatcaattgacatatctaagctcaccaaaagcttatgtcaagtttcacttaaagaactaatatagtcatagttcacatgaacacaactccttaggatcacccaatgggatattctatcttaatctcataaggcatcatggtgcctcaattgagaatatcaattgctaccagcatccattaatagtgactcaatccatatggaatatgtgataactttaagatctcatccataggtcatatgtactagtaactttggcacaaactcaatatcctttcaaggttgagagacaacataacattgtagctaagtgaagtcatgactaacggatagccttatttcatgaagttttgacacactagtgcattcactatggaaaacctatcctaatagccaagaccaatcatctcttcaattaggaggaaatgcaccacaacctctaatgggttgcctaggaccacgaaatggttgtgaacaagtcatccacttgcaaggaactcatgacttagatcttgtctccaacttctaatgcacctaagtcatgtacaatgtaagagatacaagtcagaatgcttatgaagtacaatgcatgaaataagaatgactaaaagcgaagttagaactttattaataaataataaattccaaattttgttacatcaaatcatgtagttaagggctctatcctagcatttttttcccatatcaaatgtggaatatcataatcattcctcatgcaaacatgatgtcctcgtcatatcccataggattacaaggccaaagagacaaagacttagtacgggactaaacaaactcctacaccaaggttgaagatcggctttgatataatttgtaatgactagctcccccaattaggagcaagtgtactataacctctaataggttgcctaggcccacgaactggttgtgaataagtcatccacttacaaggagctcaagacttcaatcttctcttcaactcctaatgtacccaagtcatgtacaatgcaagagatgcagatcagaatgctcatgaagtacaatgcatggaataaggatagataaaagtgagactagaactttattaataaataataaattccaaattttgttacgttaagtcatgcttttaagggctctatcctaacacttttccccatactagatgtggaatatcataatcatacctcatgaaaacatgatgtcctcatcatgttccataggattacgaggccaaagagacagacacctattacgggactaaacaaactcctacactaaggtttgtaatgacaagttctctctttctctctctcttgccccccctctctcctctcctctggtgtagatatcgatagctttaaacctctcatagctttaaattgtttctacatggttaagaaaagcatcatgattttttttcccttatctaatttgggatatcataatcacccccatgcggacataatgttttcattgtctcctatgggattgcaagatcaaatatacagaaaccctttgcaaagccaagcaaactcctacatcccttccaaggccaaacaaactcctacatcaaggtcaaggattcactctaataccatttgtaatgactcacttccaatcatgtaaatattatctgcttcgagtcaaataaaccctcatggctttaaaatataatatatatattactatgaactttttcccctatttgatatgacatatctcacaatctattatgattacagaagatctaatgtatgtgttgtacaataagtaaaaatgaaaataaaaatatttttaatatatatatatagtactatgaactttttcccctatttgatatgacatatctcacaatctattatgattagagaagttctaatgtgtgtgttgtacaataagtaaaaatgaaaataaaaatatttttaacacttttccttactttaatatagagaataattgtgtaatgtcctatactttcgatcttccaacttattctaacaaatagattctatggaaagctccaaagatagtataccttcaaattttcgctcaatgaaagtttgaaagaaatctccatggtttagttaaaccatttcttccattatggttgattttgttacattctatatagtttagaacaaagtagttatatggaaaactcatgaaatgtttgttcaattatagcaggtgaggtacc

SEQ ID NO: 12006 - DNA, 1249 bp, Vitis vinifera
  Intron number 6 from transcript GSVIVT01007604001 (locus G SVIVG01007604001) derived from phytozome v7.0 (chr-ID chr1 7; pos 11354478 to 11355726 reverse strand)
ccagaagggattgaggtgaaccttttgttttaactggtccttcacataccatcttatcaagttaaataatcatcaaatacattagtgggaagggattgttattttggctaccaacatgagcatttggaagttccagggaatggaaaagttctattttggtttttgtagcatttgaaaatgaattggttttgctctattgcattcaaaataagcctattctgtgtttcagaaaatgaaaccattacattccttcattcttgcctattactatgacctcttttcttttatgtatttatttatttttttcattgctgctgaaatcatgaaaactgacatttttctcagatgcgtttaggagaaatttgttaattttagtctttctataccatgaattgagattcattcaaccatataagagggaaaaaaaatggaattgtcatcaaaattagttcttttaccttcagtcttccaggttcataaaccaattggatgtaaaatataggatctcaattccaggggaaagttccagatgacacagctttttgattggaatataacatccatgttggaatttctgctcttgcagcccttctggcagtttctaagccatgtttcagatcaaacatgattttttattttattttattttgtctggttgaatctctgcttctggacacaattctgaaccattgaccgaattggcattcaacctggccaagaaacactaaggtcatgtttagaaactggcctgggaactgtatggttcaaattcaaattctgtttatgaatgaataatgaagcaagtatcagggaggagactcacccttgaatatgatgaaaatgactcaaaatatcattcatgtcataaagaccacttcccagtctaggaaaattgcagagggttctacatggttatatgagtttaaagggcataaccaatagggtggttttccagcttgccaactcatctcaaccaagtttcatggtgaaatcatctcctgctagcaatttccttttgaggattttggcatcaatttgtgtagggttactgtcagctgcacaccaatcataggaatctcaaaactgtgatggattgtacttctgtcaataaaataagcctgagttcttgggaggaggctttttggttcaaatcctaaacaactaaaatgttgtaccttctcaaatttctttcatcgtactgaaccacatttatatagcagatctcttgctgcttgtgagctactgtaca

SEQ ID NO: 12007 - DNA, 15172 bp, Vitis vinifera
  Intron number 4 from transcript GSVIVT01020234001 (locus G SVIVG01020234001) derived from phytozome v7.0 (chr-ID chr1 ; pos 8743482 to 8758653 reverse strand)
ttgagcgaaaacttgccagtctgttcccccaagaagtaggtgttttctactcctgtgcaaccccacctcccctctttcagggaaaagttgctgcattatatttggattcattgctagacaaaatgttttgtgttgcacatgttgtctcactgttttatttgcttttctgttcattattatctatttgctgttgggttcatgacctgcatgcgatttctggtgcatctgatttgcatattggtgtggttttctatatgtatatgtaaggtattgtatataaagttatttattgaaaggtcaaggaatttaagtggttgcactgatatggcttgttaaataacaaagcagatttaccacttaagattgaatcctactaacaaaccaattagtctattgagtaggagatatcaatggtttttaaacttttataactttaaatttcatttctacctttcaaattaaattctatttcacctttatcctgttaacttggcaataacaatatttgaatttcatgccaaaaaaattgtctggttgaatgttttaggatttatttgcataagatggttctaaaggatatgagtatttcagtttttcaccttttcattaaagaatctacacaaaacttagatagtttgttagtgtttttacgatttttattactgaattttgattttgccttttgagtatgtatcttttatgtgtatgaagaaatttggttctcctactatacccaaactccaaaattagtattctcatacatatatatataatttttttttgataagtaaaggatatgcaataaaaaggcaaaacgccacaaagtatacagggagtatacaaggcagctaaggcctcaaaaaacaaagacaaaaagaatcacctccctttaagtggatgctatccactctaggaagcctataagggagaacgcctcctcacctacatacaatttggcccaactccacaaattacagacaaaaaaattctttaacttctgaacgttcaacaccccccccctaaaagctaatctattcctctccttccacaccgtccaaaaaatacacaacggaatggtgtcccaaatctttttccttttctttcccacaaacgagcccctccagttagctaaaacttcctttacagtttctggaaaaacccatttcacatcaactaaaccaaaaacaatatcccatagaactctaaccactgtacaatgtataaggatatgatttacactttcttcctcacatccacacaaaaagcaacaatttggaagttgtagtcctcttctttgaagtctatccaaagtaagcaccttcccccatgtcgcctcccacgcgaaaaaagcaactttagttagcacccttgccacccaaatacttcttgatggaaagcctgtgttgtcagacttcgccaacaaactataagcttccttgaccctgaacttaccacttcttccttgcctccacaggactgagtattcctctaaagagggtttgtggcccctcagtatatggagaaaatccccaaccaactccagctcccaatcattttttttgataagtaagcacagaatatattgataaaaggccaaaaagccacacgtatacagggagtatacaatctagctcaagcctcacaaccaaaagaacaaaagaaaagaaccccaccagcccttatgtggaggctatccactccaaggagcctataagggacatcgacctctctccactatacattctcacccaaccccataaaatacagacaaatgaattttttaatttttgaatatctatcacccccccctaaaagcaaacctatttctttccttccaaatggtccaaaagatgtacaacggaatagacttccatatctttttcttttttttccctacaaaagggcccctccagcttaataagacctcctttacagtttctggaaagacccacttaacaccaaccaaagcacatatcatatcccaaaggacttttgccactatacaatgtatgagaatgtgatttacagtttcctcttcacagccacacaaaaaacaccgattagggagatgccaccctcttttctggagcctatctagcgtaagcaccttgccccaagtagcttcccaagcaaaaaacagaatttttgtttgaactttatctacccaaatgttgttctttggaaaattgttagccacagaatttaccaccaagttgtaggcttcttttactttaaactttccgtttcttccccctttccaaaacacaacatcctcttctaaagtaggaatgaaccccttcaaagtatgaaacaaattacctaccatatccaactcccaatcattaaagcccctcacaaatcttaaattccaatcaccttggcccacattctgatcccacatttcttctactgtaccattcctatgagtagccatcccataaaggtgaggaaacctttgggacagcactgtacacccgcaccaaagatcattccaaaaacggattctggtaccattccccatagtaaaagccatattctcccaacaccaatctttttccttcataatttccttccaaacccctactccaaacgtcccattagcctttttggtcatccaaccaagaccctcttgcccatatttcgccaaagcacttgtttccacagattttccttttcacaagcaaacctccaaatccatttccccaacaaagctttgtttaacgggattagcttccttaagccaagcccccccttttccttctccgtacacacaacctcccaattaacaaggtgcactttcctttctaagcttcctcttccccaaagaaaatccctttgcaatttttctaatcttcgcgcaaccgatttgggcatacggaagagagacatttgatacaatgtcatactagccatcgtgctcttaatgagaataagtctcccacctttagaaatatattgacgtttccaatgcgcaagtcttcttctcatattctcttccaccccatcccacacggctgtactcttgttaggagccctcaatggcagccccaaatacacagaaggcatagaacccaccttgcagcccaattccgcagccatctcctccatctcttccacctcgccaactgggattatttcacttttctccaaattgatccttaaccctgacgcggcttcaaaccaaaacagaatccagcttagataagttagatactccttcctggcttcacaaaaaactatagtatcatccgcaaacagcagatgggatacatgcactggctgccttcctcctcctcggatcctacaccctgacaaaaaacccccttcaacagccctcctgataagattgctcaacacctccattcccatcacaaagaggtaaggagataggggatctccttgcctcaaccccttagaacttggaaagaaaccggccgacactccattcaccaacaccgaaaatttagctgtggagatacaactccacatccaacccagccactttgatccgaaccccatctttctcatgactttcataaaaaactgccaatttaagctgtcgtaggctttctctatgtccagcttacatatgagacctctctcttcccttttttgccatgcatcaattacttcatttgcaattaaggaggcatctaggatctgcctacccattacaaaagcgttctgatcagtggatactattctccctatcacttttttgagtctattggctaaaaccttggccaatagtttgtacagcccccccaagagactgattggcctgaattccccaagatcctctgccccccccttcttgggaatcaggaccaggaacgtactgttaatgctcttgatgaaggcactgtgctcataaaactctttaaacaactccaaaacctcctctttaactagagcccagcatctttgccaaaatgccatggtaaacccatccggtcctggggctttgtccccattcatctccatcagggccctatgaatttcctcctcagagaaagggtgctccaagttctctgcctcttgctgatttagttgctctaactgcagcctttttatatccgccttccaatctgaattttccgtaagtaagtgttgaaaagcattaacaaccccttctctcacatccttctcctcagtcagccacaccccatttatcttaattctgtccatatgattgaatctacgatgggcagccaccatgcgatggaagtagtctgtgtttttgtccccttcccttaaccataattctctggaatgctgcctccaatgagtttcctccaaagaaacccacttagcataactatcctttgcttccttttttgatattgtttccttctctgatagtcttctcccactttccaccatgtcccagtggtccactagttgaagggcagcagctttgttgtcttccaatctcccaaaaacttccctattccacactttaagcttctgtttcactgctttcatttttgtggccaacctaaagctagcactgcctctcacctctattccctgccaccagctctggattagctcttgaaacccttcaactttaagccacatgttttcgaatctgaacggggaaggacctcttctcacagtaccaccctctagcaccaccggaaagtggtccgaaacaggcctagacaaccttttttgaaatacgctactgaattgatctatccaactagaagtaaccaaaaatctatccaacctggcccaacactgattatttggccccccactccacgtataatcacctccttgcaacgggagatcaatcaagcctaactcatctataaattgagcaaatttcctcattgctgcagaaattctcccttgcctattcctctcattttgagaaagaataacgttaaaatccccccctacacaccagggttcttcccatactcctctgattgccctaatctcatcccacatacagtccctctcatttttggtgaacgggccatacactcccgtgaacacccagacagcgccatcttccaccttcctaaaccgacatgaaatagagaattgcccctcctcccactccaacagctccagcaaccttttatcccaacagatcagaatgcctcttgccgatccagaagcatccaaagtcctccagtctaagaaccttcccactcctatgcttctaaccaccccctcagacatcgatttaattttcgtttcctgaatacagagtaagtctactttctggcttctcacaacggctttaattaacttccttctcgagctatcatttgctcccctcacattccaacacaaaatcttaagcttcattaacttctacaagttggcaccctctatcctgtgaagaacttctttgcttgcttcctccctcatagtttattgagcattcaagccttttcagttccctttcaaattttgtcttctctaacgcacctctactgtatatcttttctcttctttttctgatttttgccaagaaattcaaaatttccttctctaacccttctgtcgagaagcctaaaaactggctaaatttggccagattgcaatcctcccatccattctccctttcctctctagcttcttgagtcactgccagcattgaccctctctcccactccttgtcgttattattaacagtgatggcttcgaccagatcccatctcctaccaccattctcggcagatttgatcatgctcagcggggtttcgttttggatctcctcacatgccaccccagaatgatcgtaatactccccctccagagtccgatcaaaaggaagagaagaaaaagacgggtatcctgaggccctaccccccctttgaatcagaatgggcccatacctcgattcctcttcgattaacgcccaatccgtcactgagtgagatgatgccctttgctgcttccatacgtcttccttctcccttattttgaggaattcagcttctctatttcttccatcgctgaaattagtctgcgcctagagggaacccctttctaactttcctttactgctctcaggctgggacgggcctaaatattcccccgccagtccattactcccagacaaatctgggctctcaccgacatcaaaccacccatctggcttagaataggacggcccaatcccaagcccagcctcctcaatcaccaccccttttagttttaacccttttaatgggctcgaagctattatgtcccccctttgggccttaggagatggcatcctacccgtagacgggcctgagtggagaagcccatccaccggattcaggtccacaggaacccgggccccagaccctgctctggcccgcttaccagtcccatccccaaccgcccctctgacctgcccatcattctcgtcagcatacggcaacaacgcctcgggccttgcactttcctcctctctaacgcgcggggtagcgcgtgccgcatcgtcacccttgacctcctctctgtagttacctttcgaacggcttccagatgttgccttcctcatctccggcctcacctcccaccagagataaagggaatagcaaacctcctctaccactaagtctagcctgctcggcaaacctccattcttcttcttgactaggatgcgagcccattccagatccaccatcttctccagctcccaatcattgaagtccctaaaaaaatttagattccaatttccttgacccgaattttgatcccacatttcctcaaccgttgagttcctttgaaccgccataccaaagaggtgaggaaaacagtgggacagcgctgttctgaacaccacacatctgtccaaaatctgatcgtgttgcccttccctacttggaatatcatgttatcccaacaccactttgattctttccaaatctccttccaaacccctactccagccaccccattagccttctttggcctccaaccaagaccctcctgcctatacttcaccttgatcacttgtttccaaagattaactttgtcacaggcatacctccatatccacttgccaagtaaagctttgttcaacatagctagcttcctaaggcctagcccacctttatccttgtctgtacataccacctcccatttaaccagatgaatttccccctccatatttccccctccccacaaaaagtccctttacactttctcaagccttctagcaacgaccttgggcattctgaaaatagacatttggtagattggcatgctagccaaagtactttttattaaagtgactcttccccctttagaaatatattgccgtttccaaagagctagtctcctcctgactctctcttccaccccatcccacatataaggcgctctattgggaacccctaaaggaagacccaagtactgagaaggtaaggaccccaccctgcagcctagctcaacagccaactcctccatctccaccacctctccaattggaatgatttcactcttggctaaattaatccttaggcctgaagccgcttcaaaccagaatacaatccaacttaaatgagttagatgatcctttctggtctcacagaatataattgtgtcgtcagcaaaaaacagatgagagatgttcaaagggggttcactaccaccccttatgttacaccctgataaaaaacccccctccacagctctcctaataagaacatctagcacttccattcccataacaaagagataaggagacaggggatctccttgtctaagtcctttagtgctagggaagaagcctgcatgcactccattaaccaacactgaaaatttagctgaggataggcagctccacatccaccccacccacttagacccaaaacccatcttttgcaacaccttcagcaaaaactttcaattgatactgtcataagctttttctatatccaatttacatataaggcccttttcttttcgtttctgccacgagtctatcacttcatttgcaattaaggaggcgtcaagaatttgtcttcccctcacaaaggcattctgagaggtagagaccacttttccaactactttcttcagtctgttagctaccactttagccaacaacttgtaaaggccccccaggagactaataggtctaaagtctccaaggtcctcagcctcacttttcttggggatcaaaaccaagaaagtattgttgaggctcttgaggaaagaactatgttcgtagaagtccttgaacatttctagaatatcctctttaataaactcccagcaactttgccaaaatgccatagtaaagccatccggaccaggggctttatcaccattcatctccatcaaagccacatggatttcatcctctgtaaagggcctctccaggttctcagccttttgttggctaatctaatcaaactgaagtctcccaatatccgccttccaccccgtatcttctgagagcaaattttgaaacgcattagcaattccttccctgatttcctgctcctctagcagccattccccattgatcttaattctctctaaagagttatttctacggtgagcgcttgccatgcgatgaaagaaacccgtgtttctattcccctccttcagccatatttccctcgagagctgtctccagtgagtttcctccataatcacccattttctgtaattttcttttgcctctttcttaagttttgtttcctccacagtcagaattctctcactttccttcctatcccagaattccacttgttgcaaggctaaggatttgttgcactccagcttaccaaagacttctctattccaaactttcagtttctgtttgatttccttcatcttagtaaccaatctgtaactagcactgcccctaacatcaattccttgccaccaactgtgcacaagatctttgaatccctcaaccttaagccacatattttcaaatctgaatggagttgggcctcgtcttatcccaccccccactaacgtgattgggaaatgatcggatactgaacggggcagcctacactgattaatcccactgaattggtctatccagctaggagacacaaggaacctgtccaatcttgcccaagcctgattattttggcccccattccaagtaaattctctcccctgaaggggaagatccaccagcccaagatcatccacaatctcagcaaatttcttcattgctgagctaattctcctctggctattcctttccctcggaaacaaagtgatattaaaatccccccctaaacaccaagggtcttcccacagccatctaatcgccccaaactcttcccataatgcatccctttccactttggagaaagggccatacactctcgtaaaaacccagatagccccattttctacgttccggaatctgcaagataacgtaaactgtccctcttcccaatctagaatgtccaaagaccttctatcccagcatataagaattcctcccgagcccccttcgcattcacagctttccaatctaggaatctcctggagcctaaacttctcgcaatactgtccgacatagattgattttttgtctcctgaatacagattaagtccaccctttggttccttatgaacatcttaataacttttcttttggagctatcatttgctcccctcacgttctagctcagaattttcaccttcattggacaatcacaatttggccccctttgccctgtgccgagcctttctgtttaatccccccctcataatttatggaacattctagtctttttaactccctttcaaacttagacttttccagtagctctttgctgtgaattttctcccgtctttttctgattttggtcaaaaaattcaatatttccttctccagcccctccgtggggaagcccaggaattggctgaacttcgccaagccactctcttcccatttgccctccgactcacttctctcaacttgagcatcatatgtggcaccgaccccatccatccccctgcctttgtcactactacttttgattactcccaattccttacagccattgatcctttcattacaagcctcatacactgttaaccacattgtgttatcagcctgtacttcctcatctaaatccccagaatgatcgtaaaactcccccccccacccccctccccggagtccgatcaaaaagaatagaattgagatgagaagcccccagagcccttttcccccaagaacaagaccctgttccatacctcattgattccttttcaagcgccctatccgtctctgtcagcctaaccacaccttgtagcttcctcatctcctcagactcccgcgcaacaaaaggctctgattcaagaggattacttgaggtgagacacttcaacaggaagcccgtctcctgaaggttgttttggtcttgggctactgatgagtttgggccctcccttagctttccatctggatcgggctgttgggggcaaccctttgaataatttgggcctttgtttgacgttcgggctataggcaaagctgggcctttagcaaagcaacccacctcttcaatcctatacgacgggcctacttctgggccaatctcacttgtagccacacctttcatcttaaagcccatggatccgctcgtcaggccaggcccaccaaccctccttgtctcctttgggcccgcgattggacttaagaaatgcagtttaccagttgaggcccaagtccggattgtagggcttagatctgcactggcctctgccggacccgacccgaccccctgctcacccgtcccttcatctgacgggttcagggtctcgagcctcacgctcacccactccttcgtcactcgctgctccgcgcgtgaggcctcctcacccctaacctcactgctatgatgaccggcttcgtgtctgcgattcctcctcaatatcggacgacattcccaccataagggcacaacgtaaacctcctcctccacttcaaattccaggacgctcggtctaaattctcctctcgatctcaccaagattctggcccattggagctcacccatcgttttcgtctgttcatcgactgtaataaaaccgccacattcgtcccccaccctcttcaatatctctggactccataacgagattgggagcccaactattctcacccaaacttcctttctctcttcttcctctgcccaacatccactcctagggctccagtgctccagccctacctggattccttccatcgcgcgattcccagaggagacaacacgtctagcctcttccaaatcttcaaattctagtagagctctttccttttccaacttagccaaccctaagctacctttaaggtcccaagactttgcccacaattgccccaacttctcaagatcatcttctccccctgaactatctttccaactcgccacaacacaatgttccaatttctataataaccctattgattcctcccttttcatcttcactgcaatgacatttgggttgcccgatagtggtcgtttcgctattgttgcatacgatcttcccacaacagccttcttcacaacctttccttcctggttttttggttttctgccaagaaaacctaccatctggttaagcttctccgccatggtcatccacccccttttatcccttctgcctctcgggatgaagatgcaaaacctcatcctctctagatcggagacccctagccgtataaacccccccgctctgtttatccctcgtgtcatagagtacattctcccctgctccttccattcccttccccatcttgcttctttctcatccttgatacagagattcagcccttctaagaaaaaccctaggctgtccgatcccagtcggacccatgacgaaacccctcccttcttctccacaatgaggacttggatttttccttttctatcatccacaacaatctcgaacgccttggattccactgtgaaactgcactccttccttctgcttcgcggcgccaagctctcctccccttcctcaccatcgcattctctctcgccctctctcgccctctctcgctctctctctctctcccatgttcctcatatatattttattattttaaattcaatgcgaacacttcaatgatatagaggcaagcatgtgatataacttttagttttagaatcttattataaaaacaaaagcatgagctttctatcaaattaatacaatttaactatttgaagaaaattgtttgtatgaattttttgtgttgttgggtatttgttaatataatattcctaaatatcatttaaagaatgttgtaagaaggttggtgtaaggaggcttatggttgtagcctctaggaagccatttgcagagattgggaatttcttgcataacaactagcatttctgttggccacaaaattttgtatggatgcattgtgtggggaatcaactttgaaggatatctttcaagctttgtttactttagccattcatagagaagcttaggtggtcgactattagcttgcaaaggtcgggactagggcttgtcagaatccaacatttaggaagagcttgttcaattgggagttggaggtggtggaggagtttttgctttgtttgagtttagtatccattcaagtcaactttatccatatgttggtgtagaaggcctccaggaatgggacttatcaaaaaaaaaaaggcctccaggaaggggatattctcaattaggtccttttactagtatttgtgtcctgaaagaatatatctcttccagcttgagaggattaggcttttaaggtgccatgcaaggttagtgtggcttgaggaaaagttttatgattgatcatctaatgggaagaggtttgacttcagtaaccaagtgctgtctatgcaaccgacaagaagagttggctcactgtattttcatccattatgattgggttgtccaatctttggtctttggtaatttttttttccttcttttggtttgaggtggttgcagtccttcctttgaagtccttagggcatggtatgggagttttgtgggtccatgtaggaaaattgtgtagaagatgaacattatatgcttattctggacttcttggaaagataagaatgaaagaaaatttgaaggttcagattgcaatttggtggtaaaaggcctagttttaaagtttactttcttctttgagctgctaaggggtggaatcgactattccttacttgatattgtagatggtgtatgctgagagtgatttttgatggtgttttatgttctttgtttctttgaccttgttgtgccttgttacttcttgtatactagggtgtgccccctttttgattaggcaccttgatgttggactaatctagggtggttgcctacaatcaaataagcagagctaggccttttttttttttcctctttccccatatctaaggagagggacgaataattaagattgtgtagtgggaaaaagaaaaagaagataggtatagaaaagataggaaaactttaggagtctcatcaccttctaggagtctaacataaagagagacaatggaatctcacaattgaaaattgtaaggtatgtacaaaaattggtaccattcatcatagtttcattttgcagcaattagcattatttataggttttagaaaaaccctaaaaattcaataaaactatgaaaaagaaacctgacctatataatatcttattgtcggtcaataattttctcagagcactcataaatctttcatataatggaattggaaagaaactggcatttctttttagaattacagaacttagaaatttataaaatcttcttgtaataagattttctaataaataagtctttctagattttaaagatgacttcaatagaaacttttaagaaaagagactattagagatcaaaactgtagaaatatggctctaaagaacctaaatcagcaaaattgtccttttcatccttctcttgaatacatcttgaggttaatccccatcatgctcttcaatgcatattatgctactttacctctcaaaataataatactaataacaataataataataataataatgtgcttttgtgcacccttttgttaggcgatgttaatataattgatctttgcctataaaaaaataattataatgaaaagagaagagtataaggacaaaatttttaaagtgacagggtttggacttcaatttttttacttatcaaacaatggaattacatttagcatttaaatttcaaatgatacttacactattgttaattcagtagttacaatttttaagagtaaagttttcaatgcttatatttcagtttgattcaaaaaatggaattaaatttagcattcaaatttcaaatgatgcttacgctattgttaattcagtagttacaatttttaagagtaaagttttcaatgcttatgtttcagtttgataaaaaatcacctaataatttgcatactgtttggttattctccattgcagctgtgcatattattgcagagttacttgactctcttaaaggggtaaagcttatgagtcagtcagacagagtaattgttgccttactgtatgaatagatagcagcatggcatccttggagtttttttcttcccagtaatattgttggtgcatcataattgaaaatctaaatttttatttaatttgtcatttaaacactgaaagagcctgaaaaaaaggaggtttcttaaggattcttcagactgataagtaaaatatggtgaacttacttcttcaaccttgatgaaaactcaattgattgctagcaaagcctttgtttcatggttggctggtggacagccatctgttgtgagatggttgtcgtaaaatagaaagattactcttgttttttccttcgtctgctgctctccttcttttttggttatattttttcttgtttcctttttcttgtgaatctatatctaatgcttctgtgtgtgtctgagatggatggatagggataggagggattttccattggtgcaaggtttgtccaaggttcccacccatccatatcattgttagcattttagatgtatatcatttagttcaaaggtcctttttcttgacctgtgggatattaggatactttaaaaaggcccttcttgtatttgattggactgaatgaatgcattccttgtatttaattttctttccctaggaggagtgcttctcaagtccttccttcaa

SEQ ID NO: 12008 - DNA, 1106 bp, Vitis vinifera
  Intron number 5 from transcript GSVIVT01025353001 (locus G SVIVG01025353001) derived from phytozome v7.0 (chr-ID chr6 ; pos 1599386 to 1600491 reverse strand)
ctacaccaagatccaagagcaagaagacaaaaccagtgagttaaacaattttggactgcaggtgttcttgaaagataaaaatttagttgtttatttttgttatttgctgtttttggttaatggagggaaacaaagagaaaaagagggaggggacagggagacaagaggagagaggaaaatgcaggggatgctttacttcaaaccccaaattttcttctggaaatgctctcttctccaaggttcaaatcctcaatttctttggcaaatcctccaaattcttggcatccaatcactggtatttgcgccaggtttcaaatcaaaccagaaaaataaactaattgtacatgcaagaaagaagagaaaaggatctggttcccaattattaacaaaattcatacttgaatcaatgtgtgttattcattgattctgtaaatcctaccagagccattgaagttggttgttttggaatgtggcagcgggaatggtaatggtggtagattggggttttggaatggttttggatgaggaagcttttatggttggagaaaaaggaaggaacaattaggattagggctttctgggttggtcatggtgtgtgggtttgctgtgttgattggagagtggatatttttttttttttggataggtagttgttttttcttttttctttttttgtccccattgggactttaacctcccataaacccacccttaccacttgagccaggcctcaggggctagagattttgggagtgaatatttttgggtagttttagggttttctcaatttctgttttccattggagggtcaaagagaatgcttaaaaattaggtttgagggtttttctgctatgctgttttgttgtgtttggggttgatgaaacaggaagtgcaaacagggctgagaggtctaaggtttattctccaattatgaacattgtaagaagaaaacaaaactacaaatcaaaatttgttacattatttcatcttataacaagtagatgattctttttttggataaaaaaaaagggtgagacaatccccatcgcatccttaatgaagtccatgcagtacccttctgcaggtcttactggaaggccccaact

SEQ ID NO: 12009 - DNA, 2347 bp, Vitis vinifera
  Intron number 8 from transcript GSVIVT01003123001 (locus G SVIVG01003123001) derived from phytozome v7.0 (chr-ID chrU n; pos 7465368 to 7467714)
gaagcacagccaagtatatacacaaacatcatctggtatgcctctaagttgtaactttactgatttgttagatttgagaacaatgttgttgccctgggttactcatttcttgaaggttaccattctcttttcgtttttattttattttatttttatttatttattttgttttatttttgttctttgggtagggggttttggttttaccagcgttgtttcttccatttttaggggaataaaaaagccatgacatgtaggagactgattcctagggaatttggcatcacttacaaaggtttacttcaacaatgtaaagaagaataagcatgctatttgttagaaatcctttagattggagcttaaattaaattgttctgattgcataagtgagggccaacaaccattgctgtagttttaattggagtctttatagatatatattattagaattgattttagtagtttacttttttggtcacatttttatttgttttagtttctaatttcactaggaaaataaatcatattcttattacgaaaaaggtcttagtcttattaggattttggaaaaggagttccatgaatctatataaagctttagtctttcaattttaataaatagaatttattgagaatttaatagccaccttggtgtgattgtcaaggatacatttttttttctttacgttttacctaagtgtgtttgctaaagatctattcatctcactatgtttttgtgcttatttttctaaagatccggcttcactggctttgtgggcttaatccccaatttgtgagatgactatattataggttttaaaaggcttctggggctaatgtttagtttttaactcttaaggcaaggtgcaagaggaacaccttgaaatgtttaagatgtacacctccatgctagcccttttagaaaatcaagattctgaattatttattgttaattttatattttgtcttaagtaggatttattttattattattgttgtttatttgtttacttttatctgagcttttaatattcatcttaaatttatttaagattaaggattgccttgaaggtattttgagaatatattcagaaactgacttaaatgttacacgggacatttgctcaaaacttgtgttctctttttgttttcatctgctatgtgattatgagggtctcatattaagtttctttgggactttttgacctcagtagtcctaaaattttttatgctgctcactgtgctacttatagttgattgaaaaaaaatgaatattgttttttaaaattttagttttcagaaattggctctttctttgcagcatgttttactgcattcacatccatgcttgaactcatcacttggataagttttcttcttggaattggactataatgttatctttatgctaaagggttacattttgagaatccggtcattttttcatgtgctatggatctattcgtattttgaacctttcctatataaaacttaaaatattgattttttatttttttatgatttgtaagtgttatagcatgatatgcattgtggcttaaatgttaatagttcttaggaaagttagtaattcaacatggtattaaagctccagttaactggaggtcttgagttgggtccttccccatctatttgtttctgtagttatctatgattgtaaaatttctgatttgtttgtttgtccatctctctttgtgttggtctaggactctcacatggtggatgttagagcatgatataccttttgagcccaaattctaacattgtaagcttttaggaaagttggtaactcaacatggtactagatctctattatcctgagacggtgatcacaaaatttgtggtatgattcagtgagagtgcatggtctatttatctatctaattatccagtatcacaaaatctgtgatttattgtctgtctctccacatatggttatggggacctgcacgttagggtgttaaggtacaatattttgtttttgataggtaaatttttgtccccattgggacttgaacctagaacctcccacaaaccctccccatcctttaccacttgagccaggcctcaagagcgtgttaaagtataatatattattgactcaaattctaaaaacttaagatttttggaaagttggtaactcgacaattatcatgtgcttccttgaaattttttgctttcatatatttaaattttttttcccagaacttaaatacatgtaactgtttgttatttcttcatttactttctgtttctgcgttttatcttttgatatggctcaaaatatgctttgatatattactgttatgtgcagataaaagttcttttg

SEQ ID NO: 12010 - DNA, 6814 bp, Vitis vinifera
  Intron number 4 from transcript GSVIVT01010270001 (locus G SVIVG01010270001) derived from phytozome v7.0 (chr-ID chr1 ; pos 18646005 to 18652818 reverse strand)
gtaaaactttcagttctgatttcgcattagccgtaaagatgggagatattgaacctctcactggcgcggctggagagatacgtgaattctgcaatgccataaactaagttgttgtgcctacgtgctttaatttgaaatgtcttttaagcgtcaataccttccattgaaattttctctcttcctttgtctttgcaagtcgtgttgaaaattacggtcgttcattgtcttgtattctatgtccattaacgatacaaagttggttttggagtgtgcccatcatgacccttatgcctactagtacaagtctccttatatttccttcaataatctcctgctgccagtaaatcaattagattaaattgcattcaaaatgtgatgcacatagaaaccaaatacaaatcatggtgtcacaacccacagtaaaatatatattatccaaccaaaatattatgcaacgtcattttttatggccatatgcaaaattttgcaaagctccatgtgatctagtcattgcatattatattggcagtttgcaaaaccagggcttcatgcaggcttcatcaagccgaaagtaccacctgaccattgtcaactaatatcagctgtctaaccttaggatgaatgttgggtgtaattccagcggcccatgccaaaaatggggctctgtccaatggcacaggcctaatttctactgcttgggccttaggatctaaacctatgcatcaagaaagaagcccaagcccagccttatgggtatcatgggtggtctgggtctagactgccgccttgggctttcaggtccaacctatttaatttttagtatgtttaaataagaaataaaacatctttatataattatgctttaacaatgtttacaaaattggaaaagttattaaaccagaaaagttattagatacaattcatttgttgggctgatgatggttgaatagtgagtgatagcaacatgacctcataaatatataattttaattttaatatgaaaatataaataaatagtttaaaactttatagtatttcatattttttcatctttcatactaccaaatttaaacataataagaataactataaatatattaatatatttaattttattaaataaaatatgtacagtatttaaatatgaagatgtcttcaagacaaaacgaaaattctattattttattttatgtacctatgaaaaattatatttcctactattttataatttaaaaactattacattattagtttatattcttttcatagttataattataaaaataaatgtgacgttaaatatttacatttttttaagagttatagttaatgattatatttatttccatatttataatacacacataataaataaacaacaacgataaaggcaaacttgtattttgggcctcccatttgcaaataatatatggtttttaaattccaagaatatggaatatgagaattagttgttaatgtgaaaaataatatgggttttgtgcactttgtgttgactcatttttatgtgcctagattaccttcacctactttcatgtcaatagccacattaatagatggtttccatgaaaaaaataaaaataataataataataataattattattattattattatatctaaaatttggattacacatgcaacccaagaatcatctcaaatttggggaaactctctctctctcacttccttaccacacctgagacccatcttccctaaacttctacctctcattttgtcataatcccaaatctaaagaatttctcattttcctacctcatttgaaatctaaagacaaccgattttcagacatctttgtctatctcttcatgtcctaaccagttgaaccagatacccatcttcccaaaaccttcttcctttcatttttccctaaccccactgtctctctcttcacaacctgatcactcaaactcgatacccatcttcctaaaatgttcaagtaaattgaactagacccatatcttcttcttttatcatcaaaggtgaaaattttttaaggtttttggaaatcaaattggagttttcctttgttttggattaatcaatcataggtgagttttccatttaagactttgtttggctactgagaaaatcttggggtcgaaggtctttttattttggggtttcttatatttggcttcattttcgcatgaatgaaacagaggataaatttgttttggttaaatatatgtttgtatttttaaataaagtagaaaaattttatttcctttccacgatttgtgttatcataagattttttgggaaattggtttatctgtattacttctagttgatggattttttcatttaattttaatgggatatatgacaattactactagcaaataaagggacatgggagattctatgcttggtcatttttaactgttattgttttactaagttagtccatgcttaattttgaatgccaaattcattgtgtgtatgttgttattgttttctcctttgtctttgcttgagagacttgaatgtatcaattgagctaataaaatttcaaggagcgtgacatttttttagacggttttttgactttgatttgaaacttgataaaatgatggcaataaccatttgagagatgaaacttgaatacatatttgggatgaaaattaagtgacaactttgtgaagtgttggtcatgccttagtttatttcttgatttttttttttttattcttattgcaatatttgaattgttctttggaggattaataaatgcgtcgttaacccaagaattagtattcatttttttgagttctatttttaggataagattatatttgtaagtctttaaatttgagaagagcattattttattttattttttttcaaatggtactatggttttcaaccacattgtagccatgctttgcaccaaattagagaagtgatcctcccaatcacccattaccaaaaattgatcatgttgatgagatcataaaagtctattcggaacccctagtttactcgcctctcatctcaggatcttccattaccccttgtcctttcaacatcaaatcaacttgcaaacacttcctttgtacataaaatgtttttaatattgcaaaggggagtattcataatggttaggtcgatttatcttatataatcactcaaattcaagcttacaaatgatcataatcaattttatttttttaatattgctaaaaggagattataacggttttatttgatatcatcactaaaattcaagctttcaaacgtcctttacaaagaagtttcaaaagactataggaaagagtttccattggagacaaacaatgaaaccatttctactaaagacaaacaatgaaatcacagatgctttgcaaaatattaacctacatagtccaacaaactttagaaattcacacactacctagaatttttgctaaccagcaaaaaatttatgcaatttaattcttattttttatttattattttcagtgaataaatatgattgaattatgaagtatttggtcaaaagacgatcttgcctaattatagtcatcaaacaaccatccacaccataggctttggactttaaaaaagtctacaaaactcaaggacttccatccaatttctagatatctctagaacattctttcgaccatcaaaaagaaactaccactttaatttttcatttcatgagtcttcgatctagaaaaagattggtatcaaatcgacaatcatgcagttgaagatccacctacacgtaaagctatcacctcatggttgtagacaaaagttggagtccaagaacgactccagaatagcttacgtgctccatttgaaacaaatgagctaaagagcacttaataaaaattaattaccttcaaattttgggttgggtttagggcaaaatgcaactgaatgagaggaaaaagaaatatcttattcaggaagccaatatttcaaagttcactttttcgttcaagtctgctctgctataacaaaattagagtcacagctacacctcttcaagccttcttttaattggatgttcttatgatgaaatgcatatttggttattgagaaagtggagaaaaaaaaaatgtagattgcaatttaggattaaggtttgctttctaaaatgagagatagtgaggagagaaatgttcgacaactttgagatgaagaagttttagatttgggaaatttgatatggttccaggttaagtgtgtaacccaaatttcaaactgaataattatttgttttttttttttttttttgaaactattagttaatgtggctattgacatggaaatgggtgagggcaatctgggcatataaaaatgagttaggacaaagtgcacaaaacccatattatttagcacattaacgactgattctaatatttcatattttttggatttgaaaactatattatttacaaatgggaggcccaaagtacaagttttccaacaacaacaacaacattaataataataataataataatactaataataatggaattaaaatatatgaacgaatgtatataatcaaaaaaaggatattgttggcagatcaaagggttggtcgcatccatcaaactccccttgtgtatgtcgtggatacttgggtgaatgtattataaagttagggtatgcgtcttttctaacaacaattgtttttaggagagttgatggcatttgaggttctacaagtggtatcagagccgaagtcatgagtttgaactctaggggtgtcactggggaggggaggtgggattgttggcagatcagagggttggtctcattcatcaactccctttgtgttcgtcgtgggagcttgggtaaatacactataaggttagggtatgcgtctttactaacaacaattgtttttaggagaattagtagcatctaaggtcttacagatataaataaatctatctatttatgatttgaatttttattatcattttcttttttatccactaaacatctacaacatatgttatgatgaaacttttttagttcacaatagttaattcccccctattataattttaatttaagttggtccattctctcttaccatatattcattctctcctatcataaattataaaaccttttttgtttatattaaacaatcccactaaaaaaagcatggttttaaaaattggattggaccgactggttcgaccaatccgattgccgaatggtcacgatttcggtttggtccagttaattgagttgatagaaggttgaattaagattggatcggatgaatcgacggtccgatcaacaaatcggatgaatcaactagtccaactatttaatttcttttttaaccttaccaaaacgatgtcgttttactcagtataaaaggtttttttttttttttaagacaaaaaaatattttcttaagggaaccgtatcactccatgaggagcccatccaacccacttgtcatcaaacccaataaactttagtcttgcaaattaatgattattgcatgccttttatacctcacaatccctacatatttttttatccattttcgatgtgggattagttagtgagaataaattttttttgcaagttgaagagcttgagttaggacttttaggtgtaaaaattgaagtttaaccactaacctatgaagtttcttcattatattatatttgcaaataaaattatataacaaaattaatattttttcaattttttcttgtataaaaccctttcatgtttatttttatagtaattatataatgtaattataaaaataatataaattaattaatataataatttcaaaataataaaatataaaagacatgggaataaaattaaatattagattttttttcattttaaatatatctttatatttaaatattatatatgttcgatttaataaaatttaaaatattaatatatttatatttctcttcattatttaatttgatatgtcaaatataaaaatgatatattattaaagttttaattataaataattttaatttttttataattatttaaaattttatataatataaaaattattatttataacgtatcagtggtttgaccactgatttgaccaatgaatcgtgaaccaataatttttttgatttaagcacctcttcgattttgaaaaacattgtaaaaaagatttatttcatttttgtattcaccaaatccttgcaatgtacattattccgataaaatcatttcagtttaagtaggttgattcccgctacgatagtcattattttgcacggccttttcgacgtcccgccatctaggaatggtaatttcacgggtcaagagggtcacctgccccgccctgcccttattgggatgggtatgaaataaattaatcgggtatgggacgggtatcagatagttttgtgaaacctgaatcgagttcggggcgggtatgggtttgtagttacctgccccaccctgccccatcccaccccaccctgaaattataattaccaacaaaggagagaaatagaagagagagagacattgttcccagatctctctctgaaatggcagcgacaaagaggtacatttcaaaggaagagctcaagacccacagcagggttggggatctatggatctctatacagggaaagatctataatgtgtctgattaggcgaaagagcacctaggtgggtctgctccattgctgagtcttgccggccaggatgctactgatgcttttgtggcctaccatcccggggttttgtggagccgtttggacgatttctttattgggtttcatctca

SEQ ID NO: 12011 - DNA, 17767 bp, Vitis vinifera
  Intron number 10 from transcript GSVIVT01000528001 (locus GSVIVG01000528001) derived from phytozome v7.0 (chr-ID chr 5; pos 13724585 to 13742351 reverse strand)
ggttgagaagcaacacaacaggtacacagggacagccttaatgaagttctctttacttgaaaacattccaccaaatttgattctggaccttattgatctttggttaggaagaggataagccccttgcatatgtcatatattcccatcataatttcttttctcgtataggctgtcaacacatttcccattcatgggtgttgaacaataattcctactacttattctgattaggttattgaggtttcatattgtgacaaccctcctttgcaggtgccatccacataagatagtgtctcctctctagtttaaagactgagacaaagttactatcctacaaaaagaaaattaacttgtaactaaacataatgtgtcagagcaacataaggaagcatattaaagaaactacatattcattacccttaaaagatacaaaatttttagtacacaaaaatggccttaaggcccacttctaaacctagtacaagcgtaaggagatgactacatgccaatagtttatgcaaaaagaagcaaaaagcaaagggtaactatagctacatgccttgttgttcgtcctctagaactcttggtatctggttcaactagatccttgtttgaaaaattgagggaactacaaagtgagtataactcagtgaatgataatacaatgtaggttttagaatgatccctccaaaatagaagggagtttcatcatgcatttggtactcattataaataattttttttttttgataagtaagagtattgtattatgaaaaggcactaaaatagcggcttaagatgtacaagaaagagacactcacctacttataggggaaacaaaaaaactgtccaacaagatgtacaaaaaacaaccttcccttaatgggaacccacccaatcaatgaaatcaattagtgtctaatgaaaaaaaatttcccgtatatctttacattctgatttacaatacatatatacaaagaataagatctcctaaattcggctacttataaaagaatccctaaaataagcaatctgattgcaagagttctatatggaaatttacctaaggttcctatatggaatttacccaaattcttggtacaagaatcatgggtcaacttttacaagaaaggaaaaatatggtaggagaaatcagatatatatggagaaacttaatcgctaattttttggcttattcttctaacactcgccctcaagctggtgtgaaaatattttgcattcccaacttgtttaagattatataaaaagttgaacttggtagaccctttgttagaatatctgccaattgtttagaagaggggacatacggagtgcaaatcaacccaatatcaagtttttctttgatgaaatgccaatctatctccacatgcttggttcgatcatgatggatggggttatgggctatatttatagcagcttggttatcacaatataacctcatgggttcttttaaagtgatgccaaggtcagtaataatgatctttatccaaagtagttcataaatcgcttgggccatgaccttaaactcagcttttgccctagatctagccaccaacagttgctttttacttctccaagtaactagatttcctcccaaaaaggtaaaatatccaaaccttctattgacaattgatccagcccaatcaacatcactataagcttccaattccatatttcctatcttctaaaataagattccgttgcttggtgtagactttaagtaacgaaggattctatatattgcctccatgtgagattcatgtggtgaatgcatgaattggcttaccacacctacaacatatgcaatgtctagtcgagtgtaagataaataaattaatttccccaccaatctttgatagaggccgtggtctaccatatcatcctttatttttccttataatttatgatttggctcaatcggagtctctgttggtttgcatcctagcattcctgtctcccttagcaaatcgaggatatatttctattgggaaataaatattcccccttttgaacgtgccacttcaatctcgaggaaatattttagactccctagatccttgatctcaaattcattagacaaataagttttagtctttgaatttccccctcgtcatttctagtaacaataatgtcatccacataaactatcaaggcagttaacttaccagaggagttatgtttgataaatgatgtgtggtctccttggctttgatggtagttcattcttatcattgattttgtaaatctcccaaaccatgctcttggaaattgtttaagtccgtaaagagacttcttaagcttgtaaactttgttcttccaagccttgtcaccaagccccggtggagtgtccatgtatacctcttcttctaagttgccatgtaagaaaacattcttcacatcaaatttctgcaaaggccaattaagattagcagttaaagacaatagaaaatgaatagtgttcgtttttgccaccggtgcagaggtctcttggtagtcaatgccataagtttgggtaaattcttagctaccaatctagccttatgcctttctattgtcccatcagccttgtatttaattgtgaaaatccacttacaacctactgttttcttccctttgggaagctcaactatatcccaagtctcatttttttccaaggcttgcatcttctcattaattgctttcctccaattctcatctctaagtgcctcttggattgtgcttggaatctcaacagaagacatttgggtaataaaggctcggtatgtagatgataaatgatgtaatgaggtaaaatttgaaataggatgctgagtgcattttctagtgcctttcctcaatgcgatgggccattacaaatcattatagacacaagaatgagtattttcattacctgattcagaattggatgaggggatatgagaggatgttgtagatcttcccttcctcgaatacacttttagtttggaggtgtttgctggcagcatgtattccctttctttgagctgaatctcaagtttattggctggaatttcagtggccaaattttctacaattagctcttcattgggagtttgctggaatttcttatgttcactagctgattcattagatgaatccaaggctggaacatttggaacaacaggtagtgttggtgcagaatctgaaaaatctggggctgaaatatcttggacggtaggggaacttgatgtttttgaggtagagacatttggcacactaaccggttgtggaaggacacccccaccattctcaccattcgtaggaaaaattcccgacagctttcattcctctaatctccccctgaagataagtgtgtgtgaaatatggttggctctcaaagaaggtaacatccatagtgatatgtgacctttttgtgggtggatggtaacacttacatcctttttgattggaagaatatccaaggaagacacatctaagagctcttgggtcatgtttgtctctagattgtttgggaatgtgaatgaaagatacacacccaaatatttttggaggaagtgtttcaatatccttaaagttaggaaaaaactttaaaagtacatcaacaggggatttaaagtctatgacacgagaaggcattcgatttattaaaaatgtagtagtcaaaatggcttcctcccaatatgtttttggaacaatcatttgaaaaagtaaagacctcgcaacttccaagagatgtctattttttttttctctgctaccccattttgttgtagggtatctacacatgaagattgatgcataataccttcaccttggagataggtgacaagattatggttgaagtattccttcccattatttgaccttaaggtatggattttggtgccaaattgggtacaaatgaatttgtggaatatcgggaaaatggaatcaacttccgatatggattttaggagataaacccaagtggtacaagtgcagtcatcaatgaaggtaacaaactatctagaacctgaattgtttggaattctagagggtccccaaacatcaatatgtattaaactaaaaggagatgtttcttttttatttctttttggaaagggcacacgatggtgttttgcatgcttacaaacctcacaatgaaaatcacgggatttaattttgccaaacaatgtgggaaacattttttccaagacaaagaaaggtgggtgtcccaaccgtttgtgccatagccatatttgatcaacttttgaggtattgttggtggtaataagagcttgtgggatagaatcacaaatcttccaatgtatattgaggtagtagagtccacctttcctctcaccatgcccaatcatcctcctcgttatctggtcctgaaaaccacaatgggaaggggtaaatgttacaaagtaattcaaatctttagtcattttactgatagacaagtgattacaagacaagtctggaacatgtaacatattttgcaaggtcaaagaaggagtgatggaggctatgccttgaccaattatagaagaaaaagcgccatcagcaaccttcgcttttggcctacctgaaagtgttgtataattggaaaaaaaattggagtgactggtcatgtggtcagtagcaccagaatcaatgatccaaatgcttgataaacaatccttggaggcacttaaggctttgatattacctgtttggacgaaagagcaggaggtggtttttgcagtaggaatttcagcaggtgtatcaagctggttgagaagtgttttcagcttttcataattctccttgctgagtaaaattggtttttgtttagtggtagggatattttcatgagagacatcaatggtggcagcttgatgcgcctgtccagatcttgtgacaggttttcctcctctattgcttcccccttcacttcctaactgaggcttgccatggagtttccagcaagattcacgtgtatgtcttggtttgtgacaataattacaccaaagtgaatctttatcatttggattcttccttcaactttggatcccatcgacttgaaatttccagcagtagctagtgctgaattttctagagtatctcgatgactttcttctccaatcacataggcattaacctcccggatggatggaagaggttctttccccaatttttgtactcttacttggtctaattcaggattaagaccagccaagaattcaaatactctctcttgctccattatcttcttcaatctagtagtgtcctcagcaactaccatttctatgtgctggtaatgatctaattccagccataggctttgcaatttattataatatttagtgatagaccagcttccttgctttgtagcatgaatttggcacttcaactcatatatttgtgctgttattccaatcttggaatacgtttgactgatggcataccaaatctctctggcggtggagagaaacaagtatgtttggctaatctctgactgcatggagtgtagtagccatgacatgaccatggaattttcctcatcccataattcatatcatggatcattggagttgggttctgatttggcactcgtgatatagcccatcttctctttacttttaatgaaaagtttggctgattgggaccattgtaggaaattctggccattgagtttttgagtggtgatttggagtgtagggctatcattctgatgggtagataatggtgataaggtttggagtgtagaggagggattgaagggtagggttatttgagaggatggtgtattttcactagtttcaaacactttagggaaaaaagcaacaaggtttctggttttttttttcagagtaaacaagagatgaccttgagggaattataatgggaactaaggaaccaacaagcacaactgattaaaagagggaacaagctacaacaataaaggctgtatgtgaccgagcaatgaaggctctatggatcttggcagagtcaaacttctagctctgataccatgatgaaaaaaaactcccatatatctttacattctgatttacaatacatatatacaaagaatgagatctcctaaattaggctacttgtaaaaagatccctaaaatcaagcaatttgattgcaagagtcctatatgaaaatttacctaaggttcctatatgaaatttgcccaaattcttggtacaagaatcatgggtcaacttttataagaaaggaaaactatggtaggagaaatcagatatatatggagaaaaataattgctgatttcttggcttattcttctaatagtgttgaaggaccatcttttataaacaatttagactatgaccaaagtaaatatacaaaaaacgctttcaacttttgcatggacaacaccaccttaatgttggattagctaaagaggagggtgtggaccctagctaacagatgttttctttgtcttgccaatgaagggtctattaatcacattttagttcattgctcgaagactagggttttgtaagagttattatttgctttttttggggtgactagggttcttccattttcggttagagagactctactgggttgacatgtgtggacttgcatttttcatgtgtgtccccactcgtgcggcgagatttgcttttgatttgtgaaaaactattttttaattaaaatttggagtcctcacttacttttactttttttttaaaatttattaaaaggggaaattaagtaagaacaaaacccctaaaaatgactcctaacttttggaaaagttgtttgcgaaaaactcgagtttgggtcctgggattaggttatctatcaggaaggtacctccaaagaggtaacacccttctaagccttagtgaggtatctaatagctaagttgaggggaatatgacaattagtcaattgattatgggtatctagattggctaaggtgattttgaaagtatgctaactctagcatgctaaacaagaattccaaacacaatcataaagaaatgatagtatgcatatctgaaccgcaatttaagcgcaatcacaaaacatcaaagttagttcaaacaacaagatatataacatacaacatgcattctattctattcacaagactaggtgctaatcaaagtaatctgaaacataatcaagcatgagggtgttttacacccaaagcatatgtatttacaaaacttaaaaggataaaagggggagaggcgtacctagatagcatgcataatttaggaggtgcttccaaaaatgctagagtgggttagaacaagtataatgacaaatagtaatgatggtgaattctaatacattttgtatatacataattcaaatgaaatagcaagaacttagcaagatcgaatgacaaggaacaaataaattcgaagatgtacatctcatgcaatcaacaaaacaagcattcatatattgtcaaaaattagtttgagaccctaaaataatattaactatcgtatgtgacatatatgcaattcaatgttaaagctaagttaatgtacaagaaagttaaagatatcaaaattagtgaccaagacaagacatgcagcaaaggggcagaataatagcatttacaaggaaagtcttaattaaatacctagaagcattatttgatcatggaatgaattatacaacatcctcattatgtctaatatacgataccatagccaaagtcgagccaaggtaagtcaaataactccaaaataaataacaaagtcaagcaaagtacaagattatcagcatgtagtcagaataaggagcatcacgaaacaaatcctaaaaaaatatcttgaagtagaatttaattacaaaaattttcggaaaacatctcctacacgtctagaacaaaaaacaaaagcccaaacactcattcaaataacagatttaagcaaaaacacccaaaagttccagaaggtccagaactaggcagaaaacagtaactagtgtaaaatgagttttaaacaaatacctagaggccttctacattcatacaaaaaatcacacaagtcatttaagatgtctagattgtacaaaaaattaatccaagggcagaaagcattcacaagaatttttagaacgctataattgaccagttgtccagattcgatcatgtgcagtaagtgtgaatttgaaaaattatatctccctcaagaaagcatattttttaatattttatgtgtcaaaattcaatttcaagaagtctagaatatgggaaaaatattcatttaaattaaaaagattaaaaaaacaatttaattttgcaaagtgctcttgagtgtacagaagtagtcctaaacagaacatgctaaaagagatgatcataagtcaattttgaggaaggctttttgactcaaataacattccaaaattaagtttaagaagtaaggagcatcatacgatttttggaaaaaaatttaaacattacaaaaattatcaaaacgaattttaaaactaaagggtcagttgctgagttgaaattggcagcaaacgatgagttttgaaaacaatatttcatgtaggggttccatcaagttcctattcaatattcataagtttaacctgtgcattcccattagtttgggagcacaagctcaaacctatgtgaataaaaaataaaattttgaaaacaaacaaaggagaatgcaacttagattgaaatgagtaacataatttccaaagaaaatgtgttatttgcctaaacctagaatgaatgtttttctaaagcctttaattggtttaaatacttttgaaaataatttttgaggacgcaaaagaaaccaagtgatttgataaagccaaaacattagatacaaaatagatatttttatttctaacttaaaagaatttgaaaacaagaaacattaacttggattcccctttttggctacctttcatatggaatcaaggagccacatcaatgatggagaaaattcattttttgagtaagagaaatttgcatgtgtgtaaatcaaaaatcaaaccttagcattaatatctatcaagattgacacttaaagaactttttttttaaaagtaaaataaaataaaattgccaaactaaaaacatcctaagaattttcttagagcaaactaaaatcaatttatcaaacttaagcatcttaagaattatcatttcccgaaataagaattttaatccatcaacctaaacaactaacatgcattataataagagaatctaaaaaacctaagaattaccattggcaaaggtgaaaactttaaattcaataacacaatcaaacaatagaaaatatgaaacacactgacattcaagaataattattatcatgaaactaaatatttgacattccagaaaatttatttaatataaaatatacatgaaactgactaataacaattaaataacttaatattaacatgaaactgatttatatacactcaagaaaaattattattatgaaactaaatattaaacattccagaaaatttatttaacataaaatcaacctaaaaccaaaattttcaaagtccaatttttccactatcatctaaaattatccaaaattaaaatttacaaattctatcttttaagttattatctctctcacatgaagcatgcatatattatgttcatgtacattgatttatttattttttattttttgtgagcaaagtcactaatattaatatgcagtaacaaccatacacatcccaaaaacttgccacacattaaaaaacacaacaagtacttcacatgtgctaagaggacaaaatggagggcctatagcatgggtctttcatgggcaagaagcataaaagggcttggaagctggctcctttatgcctttttttgggtagtgtggaaggaaagaaatagtataactttcgacaatgaagtacttcaattaataggatgaagaattattttgtgtgcagtttttggtcttggactaagttgtatatagatgatgaacctttatctttaatcggtttttttgatttgttggattctaggtgagggcaggtaaggtgttttgtattccctcttattttttgttgctttttgccttttggtacctgttgtatacttcctgtatactttgggttggcctttgggtgtttttttttcttaatttataaaattttcttttgcttttacctatcaaataaataaataaattattataaacatagcatttgaccaacacattttcgaagcatatctcatgatatttactaaataatgaacacataacattttaagcatgagatataattctaaaaccaagaatgggaagaaccaaagttgattcctcaagatcgaggaaattagtgggtgaggttgataattgatactggatcacagacaagatgaagtgcaaagttgaaaggattattgtggagaaaaagtcctttcaggtagagtttgaaggattgaatggtggaacttgggtatcagtaacagaaaggagccgaggtttcgtagtttcagtaggatttgacatggaggagctggattggttgatggagcatttgaagaaagctgtggagttggaggcttccaggggttttgtacgaaagatcaggggcaagactaagaccctcttgatggagatatgcttcaataacagagggcggttcatgaaaattacagaatttgttacaaaaaggaaacctatatttcttgccgtccccgagggcgttaaaaggaaagggtgggaagatcttaggaaggcgatcctatcagtgcaagagtatcctgaacgagtcggaggagcttcgaaggagaagaatggtgatatccggatgaatagggacactttcagaggaggacggtcatatgcagaagcggtggcagaggctggttttaggactggaggtacgctgtcagctggaaaatgggccagagctataatatgtgaaagccaagaaaaagtccaagactggactcacgaaggcagagccattgcgaggatgatgggtatgaaaggaatggtgtccataaatcccatttctgctttcaaagggtgcttctttgtgagttcaactaggagagtggaaagggttcatgatcagggaagactttcagtgaaaggaaggacgattctgctaaggaaatggtcacctaaggaaaatatggtggttcacggaaaattcaggaggggctggttagtattgaaaggtctccctttccacttgtgggatgaagttcagttgaatttcattttgaagaaatgggggagggtaacgaaggtggcaaaggaaactttgaagctggtggacttgacgagggcaaagctgtgggtggagatgctttcaaatgtcgtgttaccagcattgcttgaggtggaagatggggactggtcctatacagtagcagtttcaatcaccggagaagatgacgaagttgacgctgtcacgtctgagataacccgtagcaagaacgagtgggtgaaagcgagaggttgcgtctctcagtcgtcaaaagctgcagaagggctacgaggtagtattagggacaatgagtgctacagaaagaggcgtcttccccgagcacgtcatcggtaatcaaggacaagtttggcggacaaaggggagaatggagagggaaggagcagcttgggcctagcagaagaaaattttattgggcctgagcatgagatctcttttaaagcccacacggtaagggcccatgggatgaggtatcgtgggcttcaagatggcccagaagctcctcaagcccactagactgtatcgacttcgtctccttctccccaacgagctgtttcctctgcaaaggcgattgcgatgctctgtccaggcagtgcaagggccggcgtcgcggctttctttggagaggaaggtcgggccgttgagttaaaggcctagtcccttcccaaccctagtccactgtcagacaccaccgtgggttgtaagtttatagtcccgtctgggttaggccaaaacttaggaggaacgaagccctctggtatggaagtctggttgcgaagggaagaaatcgaagcgaggaaggggaaagcccccgcggttcacatgagagatgctacgtaggaggaagagacgacaatttcaaagaagacgtggtccaccctcttccctccaagcgtcgatcgacgatagggacattggtgtagtagtgagcctattttcacatggggttcgtcgttgtcaagtgaagatcacaacatggaagaggagtttgggatgggatttcagatggagcaaggaatcagagtgaatcctctctctagatgtcctctgtctggtaatctttcgaaggaggacacctcggcgagccgcgatgaagtcaaagaagggctaacgggacgagtggggtttgatcctcgtggctcttcaaacatggtttcaccttctaattcaataatcagaggtaaaggactcatctttgaggggatttgcgaaataccgggagccaaaaacttggaggtatgtcagccctctctttctcagccacccgagtcatctttttttccttcttgtagtccgaattctcctttaacgagtccctctggtccacatctccccaattcagtccctcttcctcagtctcctacggaaaatcaagttatttcaaaaaaaatttatgaaaaaggtggtgttgactctttaaaatatggtgacatccctgaccgtgttgaggaggagaaccagtatgctttatctaaccaaatgactgagagttttacccctaaggagtctattgtcaggttgcataaggaggattcgggtgatttccttattgatggcctgtcccccgagaaaatggccaaagtgcgagaggttttatgctctcttgacattaaggtgtattccaggaggaagaacagaggccccacaggttattgagacctgatggttttggctcagaaggttagggtctttgtgttttcccatgaaaattattagctagaatgttaggggttagggttcaaggaataagcgtaggttggttaaagattttcttaggtcagagaatccggatgttgtgatgattcaagaaacaaaaaaggagaattgtgatagaaggttcatgggtagtgtctggacggtcagaaataaggactaggttgctcttccggcgtctggggcatcaggtgggattttgatcatttgggattcaaaaaatctgtgtagtgaggaggtggtaataggatctttctcggtctcagtcaagttctctttggacggttgtggacctctttggatttccgttgtttatggcctaaacagtccctcacttaggaaggatttttgggtggaactttttgacatatatggattaacttatccgttatggtgtgtgagcggtgattttaatgtcataaggagaagctcagaaaaaatggggggttctagtctaacaccaagcatgagggactttgatagttttattagagaatgtgaattgcttgacccacctcttcagaaagcttcattcacttggtcaaatatgcaagagtctcccgtgtgtaagagactggacagttttctctactcaaatgagtgggggctgctctttccccaaggccttcaagaagccttaatcaaaaggacctcggatcactggccaattgttacggataccaacccgtttatgtgggagccaacatcttttaggtttgagaatatgtggttacaacaccctaatttcaaggagaactttagagattggtggagtgggtttcaaggaaacggatgggaaggccataagttcatgaggagactgcaatatgttaaagccaaattgaaggagtggaataagttttcttttggagagcttaaagaaaagaaaaaaagtattctcaatgatttagctaactttgatgccattgagcagaaaaggggtctcaattctgatttgttaagtcaaagagcctcaagaaaaggggagctagaggaattaatattgagggaggaaatccattggagacaaaaagctagggtgaaatgggtcaaggaaggggattgcaactctaagttttatcataaaatggctaatggcaggcgaaataggaaatatatcaaggagttggagaatgagaggggcttactgctgaagaatgccgagagtatcacagaggagatcttacattactttgaaaagctttacacgagtcctataggagagtcttggggtgttgaaggattagattggtcccctatttcggaagagagtgcgttaaggttagactcccctttcactgaagaagagatttctaaggccatttttcagttggatagggacaaggctccagggcctgatggctttactattgccgtattccaagattgttgggatgtgattaaggaggagttggtgagagtgttcgcagaatttcataggagcggaattatcaatcaaagcactaatgcctctttcattgttctattacccaaaaagagtttgacaaagagaatatcaaactttagacccattagtttgatcactagtctctacaagataataaccaaagtgctctcagggcgcctaagaggggtgctacatgagaccatccactatactcaaggcgcttttgttcaagggagacaaatattggacgcggttcttatagcgaatgagatagtggacgagagaagacggtcaggggaggaaggcgttgtattcaaaatagactttgaaaaggcctacgatcacgtgaagtgggattttttggatcatgttttagaaaagaaggggttcagtcctagatggaggaaatggatgagtcgatgtttatcctcggtatcttatgcaatcttggtgaatggtagcgctaaagggtgggttaaggcatcaagaggattaagacaaggcgaccctttatcccattttttgtttactttagtcgcagatgtactgagtaggatgcttatgagagcaaaggaaagaaatatgatggagggtttcagggtgggtagaaatagaactaaggtgtcccatttgcaatttgctgatgataccatattcttttctaactcaagggaggaagagctgcagactctaaagagtcttttgttagtgtttgggcacatttttgggctcaaggtcaatcttgacaagagtagtatttatggcatcaatcttgatcaggctcatctttcaagattggctgtgatgcttgattgtaaggcgtccggatggcctattctctatcttggtctccctttgggcgggaaccctaaggcgtgtggcttttgggatccagtgatagagagaatctcaagtagattagatgggtggcaaaaggcttacttatccttctgggggaggataactcttatccaatcttgcgttacccatttgccatgttacttcctttccttatttaagattctcgcttcagtggctgcaaaaatcgagagattgcaaagggattttttatggtcaggggttggggaaagcaaaagggatcatttagtgaggtgggatgttgtgtgcaaaccgaagacaatagagggtttgggttttgggaatatttcttgaaggaatctcgctcttctagggaaatggttatggaggtatcctagagaggtttcaactctttggcatcagatcattttaagcatttatggttcacactttaatggttgggatgctaacactttagtcagatggtcacatcgctgtccttggaaggctattgtacaagtctttcaggggttttccttgtttacttggtatgtggtaggaaacggggaaagaattcggttctgggaagatttgtggtggggggaccaacctttgggaacccaatatccaagactatttagagtagtcgtggataaaaacatttctatttcttcagttctcggtccatctcgtcctttctcttggaatttgaatttccgctgtaacctgtcagattctgagattgaggacttagaaggcctcatgtggtcacttgatgatttgtatctatctccttcggtcccagatgccagattatgaccattatcctcttcagggcttttttcagtcaaatctttttttctaacattatctcaatcttctggatctccttaggactttccttcaaagttcgtttggaattctcaagttcctttcaaagtgaagtcctttgtctggttagtagcacacaagaaggtgaatactaatgacatgttacaagtgagaagaccctacaaagcccttagtcctgatatttgtattctgtgcatgaagcatggggaatcagcagatcatctttttcttcattgttccttgacgattgggttgtggcacaggttatttcagttagctaagatggattgggttcccccaaggagcatatatgacatgatgtccatcaaatttaaaggcttcggtaattctaagagagggagagttttgtggcaagctgcgggcatcgctctaattcgggttgtgtggtgggaaagaaacgcaaggattttctagaataaagcaaggaattcagagttcctttgggactctattgttttccttgcttccctttgggctttctgttccaaggcatttaaggggactccccttaatgtgattcaactggattggatagcagtgtgtactccataaggattggtccttagtgggagttcgtttgttttatgtgcattttcctataatttagttgtctttggtgggaggattctcatgcttcttcttgtacttcttttttctatcaatatatctttgtgtcgtttccaataaataaaaaaaaatttctaaaaccaaataaaaccatgcatcataagatcactcaataaaaattccaaatttcagttgcagtagcacttccattacgatgacttaaaatcctacttcaaaataatattattatatgagttttttcacacttttcttcttccctttcatgataggttaacatccctagttaaaggaaactaaggcaagtgagcttataggtgacttgttgcatgtttatgtaggtgtcaatcaaaggaaaaagattagtgtccttattggatggagatgacatgtgacaatgtacttgatccttgcagttgcttggtaggtgaagtaggtccatgagtcaccattctcaatttagatgtcacgtgatgaaaatggcttagtgtccttttggttgcatgcattttgacacctcatgcttatttgcatgcattgcaacacctcattcttggttacatgttctactatattcatggttggctacatgcctcgaacacctcatgcttggttgcatgctttcaacatcttatacttggttgcttgcttttgacatgtcatgtttggttgcctgcttttgacatctcatacttggttgcatggtaaaggacagacaagaaggtgattaaaaggggaaacttcaaacatattattcataaaagaaaactaaggtcattacacacataatgtcactttagcctgttggttgaaaagatggtggctgataaagagcttgcaagtaaaataatagtttccactacaactacaaccaaatagtcatcatctcacctattttggcaaaaaattgctcctttttccaagtctactcatgtctcatgcataaactattgccaattattattattctgaatggggtgtttcaaaatcttgtttgcttattttatgaatcttaaaagtgttccagcatgccattgagcatattagtatcatctatgggacaagtgaatttaaatcaatcctccctgatgcagttttctgtccattaatagggtagcactgtctgagttgtataaaccattacaag

SEQ ID NO: 12012 - DNA, 2141 bp, Vitis vinifera
  Intron number 10 from transcript GSVIVT01000394001 (locus GSVIVG01000394001) derived from phytozome v7.0 (chr-ID chr 17_random; pos 623466 to 625606 reverse strand)
ggattgaggagcacaatcgcattatttggcccagtgtaatttctcttatgccttgtgctccttttcttgttaagaacaatggcattatatttaaagtggaagaatgtggtataagcagttgtggttgctgactcggcaatggggacacacattatgctagttattttgaaaagctcaaaaattagaaaaaaataatcacaagaaaatgaacttaacaaactattaagaaaacatctatcgcatttgatattgtttaaatagatgtaaaaccatgtgtttgatttgatttatagtagtattaagaattagaaactcttaaaacactacaatttccatttttatgtacaattccaatttttgataattggtgtatttattggaattgtagccttctaaataagaacgaatttttaaaaaataaaaaatgaaaataataagaagaaatgtgattgataaaaagtgcaataattgtttgaaaagaagtcatcgtaaattttttattcctagtcatggattgagacattttttcttgattgatatgaagagtctgaaaattgtagacattctctgttttttgcctcctgtttttgtcatatttgagtcgtagttttgtgaacccaagaaagacctaccaagtagaagaatcactgccacaaccccaagacaacaacatggttgagggaaagatggtccagggtgaggggtggtggggtgtttgattgggggtgagggtggatgctgaatccaagaaatacttatcaagtaggaaaaccactgccacaaccccaagataacaacacaatggacaaagaactctcaaggcacaaggcacggcaggctgatggtttgtttaggtctcttagcctacagcaagttgttaatattaacctactttattaaccactaaccatgcactgactttgactttgtaggagttttagatgtttcaataatctaaccatgcggagactatgacccttgtatgagttatagatgtctcaataatcctgatttaagaaatgggtgctgaagtgagacgcgtgcgcacgtctgcgcttgtgtttgtgtgcctacttcttggttctctaagtttttttctttgctgtgtgggcacttcttccacaaaccagccacttttttctttatatttctaacctaaacctatttttttccctttttttcctttgtctggtaagtaacttgtttctagtttctatctagaggccaccattcatatacccaaaaccttgatttaatgctgtccagaaatttcagaattttttttctgaaatttctacatatatttacatgcaaaacttgcttcagtccatacaattctaaaaccacaaaacttgaggtgagcttctcaacctcctttactacccctatgttaataagctcgctcatttccatatttacttttaaacctgaaacaacttccaaatacaacctgctcaatctccattacctcttcttgcactgaaacccacaggagtaggattaaacacgtgaagcacttcgagtaaatctcaaattaaaaaaattaatctatattattatgcagatagtggtggagcaacctgattccatacattgatcaactttggctcaccttttaggtgttaaatgcagcatctttgactaaaattaagctcaaaaacttgattagtaatgcttgatagaaaagggaacaccctgagttaaaagagctgattagcattcaaataagatgataaaattctctacttgacctatagaaaattgcatatttgagtgttaatcaaaaactcataatctatgagcttcaaataatggtagtgggctatgagaacacaatagtccatatttggggttcatgtgctcctaaagaacagggttccaattggagattttgaccctaatgattcttttgattcaatggttaagctaatcaatctgaaaaaaatatcttctaataatgagttttttcaaatggagtgtccttttgaaaaacgcttcctgatatcagctttgttacttcaaaagtcagatcagcttcctcacacaggtttgtaaattttgtttgcattttctggtttcactgtttgaccagtttgtatccattggtgtctcatgcaggctgtggggaacatttttggcag

SEQ ID NO: 12013 - DNA, 3694 bp, Vitis vinifera
  Intron number 3 from transcript GSVIVT01014168001 (locus G SVIVG01014168001) derived from phytozome v7.0 (chr-ID chr1 9; pos 1039065 to 1042758)
ccatataaggcttgtttctgaacctaaacttgcaggttagattttctattgaaatgtcatatatttccagaatgctaaattttttctccaacttgaagattaggttttttaagtacacaaatcctttctgctgttctcactctattcagagccatatcttttattgaactgttggactttattgctcttcttgatatcccaaatcatgccactttttcttataaaaagagtttctttctttaagttcagattccattgttattttccttggtgtgacttctttttgtctattgtattcgcatttatttgatataaatttaggcttctttacacatattttgggtttcagtatgaagggaacgttgcaatcatacaactacttttctgtgacaagtcctagcattagtatgagttccctgcatcttcatgggaattggtgcttcaacaggctctaagaactaccaaaattcaaagattttgcattatggcattcccattaacgccctctttcccttttctcaaaactttctttctccttccttgatttcattttgcataatggtatttgagttcttatgttttttatccaagaaactaactattttctatcattcaagaaacataactttttctctagattccttgccctgttattttgtttgcactaggcatcgattttattttgacttgccaaatgaattgttacttttaggagtttccttcttgacataggataaccgtagaatgattgtctacaattaaataggtggttagggtatcaattttttagggtttaaggagagaaatgaggaacaaaaatttatggcattggagaaaagtaaaataaaatataaggaacgaaagataaagatgtaaaatcttagaatctcactaaggccttctaggaatctcacttggaagaaaatcaatggaatctcaccattgagaattgcaaggtatacaaagaaaaacttaatattattgatcatcactatttaattataaaaactttttgcgataaagtttctaataaagaagacttctagattttaaggactcaaaatagaaactttagaataaaaattttattttaaaaaaataaaaagttgagtttcttttaaagagaattcaaaaactttccaaattctaaataaaactcaaataccaattactaagtagtcatgacgcctacaaaactacaaaattatctaaatgcccttaattaagcaatttaagacatttttattccttcattcctttcttgagtagatcttggaacaattccctccaacttgggaaaaaactccacctcgggaaaaaactccacctcaagttttagtgattttccatggtcaatgaaaatcccaagcgatgtcttccaccttttctttctccgttgacctacatgaatgaattgatagtgtagaacaaagaactcttcattagaaccttataaattcattattagatacaaccatcaattgagatcttctaagcgttcttcaagttcattttttgctaatgttttaaaggatttcaaaatctctttaactaaaacatgattttagaacttggaaattaatcttttcaaagcattacaataaagccttccattaaaaaaaaatattatagaagtagtcctttcagtgttctttttcacaacattgtaggattctagaattttcaaattgcttataacaatttcttgccttggaaatgcaagcattgaacttcctcctccttggacaaaccctaaatgaccatcaatatgcgtataaactatgtgtatatactcttcaatattagcacatgtcaagacttgcataaatttgcttggtgcattggttaatccaaagatcatgactaatcattcatataactcatcccgtttaggagttaataagcatggaactctataaaggctccaccttgcttgaataaagtcttccatagacaatatattaacttgccaattcacaaggtttgaatgataagttatttgttttgcattaccaattcattgatgtacatcaatagagaaaggatggaagaaggatggaagatattgctcaggatttccattgaccgtggaaaggcattaaaactcaaggtcgaattttatttccaagtttaggggaattgatgaagatgaacctctacgatctactcaataaaagaccaaaagtatcttaaattacttaattaaggtatttaggtaattttaaatgtcgtaattagttagtatttgagttttatttagaatttgagaagttcttgaattctcttttaaaagaagctctaaatttcctaaaataaaatttttattctaaagtttttatatttagttcttagaatctagaagttttctttattagaaattttattacaagaagtttctataaagtaagtttttaattttaaaaaggaattttctaatttttttagaagatttaatagttttaggaaaggaataagagttcaaattagttactacataagttaagtttactttttcatagttttattgaaattctagtattttctaaagcctaaaaatagggctaattgatgtcaaatgagattaagtagtgatgatcaatattattaagtttttctttacataccttgtaattcttaatggtgagatttcattgattttcttttaagtgatattcctagaaggtcctagtgggattataaggttttacatcttctttaatttttttccttatattttattttacctttttctgccaccataaattattattcctcattcctctccttaaatcctaaaagatcgagaccctaaccccacctctttgattgtagacaaccattctatggttgtcttacaaattattttggtatcaattccatcacatcttgcatactagatttttatcgacaacttctttctccttacttgtaacttcgaattgtttcttaatgggagtatttgacagttattttggtttaaagactattgagttctccacctattggttagattgtggaatttccttcattggatgaagaatcttcttatgtccatgcataagtatataaatattcttatagccatcgtgttgcactctttcattgaaaagccatggtcttccaagcacaatacaggaaaatgatgatacatttctttataaaaggttgcattccggagttgatggaaatgcatagggtacaagctgtttattccttaaatcatttctagttttctatgcttatcatcgttgttttggttggtggtaacatattaattaattaacttgcattaggttaggaagttggggttttatgggccactgtccatctctatttttttagtcatactagtatttcttctgttttttggaaggaccacctatctatatttgaaatttattgttttatttagtacaagtataatttcttataaaaaaagggaacatgttaattagttgacagatatcaaatccttgcaccttcctcaaaactgagatgtttttgcttacttttttctaaaaataaagctattagctagattgaggtaaattgtcttatatcattggagtgcttgttcttgtttatttctgtactgtcacttgacatatggttattttgttgccacccgaaggaagaggaattaatatgggactatcttatcctcgctttaatgcagaagcaaaacaggaatttg

SEQ ID NO: 12014 - DNA, 14066 bp, Vitis vinifera
  Intron number 1 from transcript GSVIVT01023526001 (locus G SVIVG01023526001) derived from phytozome v7.0 (chr-ID chr1 4; pos 10279633 to 10293698)
acatagaagattttgaagaagctgaactaaaagaggtatatgctatgttgcaactctatttaaattaagtcttttgttagtttctttactgcttctatcatcgtctaacttttatgacattttttcttgttgtggttagtatctaagcatcatggtgaaattaataatgatattaacatagaataggtgatctaccttttttcttttgttaatgaccctggaattatgtctttaatgaatgataattgtttttgtgtttgttttttgtttcatggcacccttctaggtgagactcatagaaggtattagtgagactcaggtttctctttctcttctttctttctctttgtttttctgagactcttaaggtttaattttatcactctcctctttctcttctctatccttttttcttgtttcactttctttccactgctacaactttacttcttaataacctgctagggcagcctagttggttaggataaacactgggaagtgtggtcatagtaagtggtacatggttctgggttcaaatcctaccactgatgataccttaaatttacccgatgctggttgttacggggcggttagcatcccgaggtttgggtccctatggagagtcctaagtcctgggttcgaaactttacttcttatttcccctccttacattataaaagagtgactgtgtaacccaccttatttgatcatggagcatccaccttaaggctactcaaatcaggactgttaaacgaaatcttaacaaatgaataaagtttcatttattgctatgtctaacttgattaaaatttctttacttgtatatgattattcaagcatcctgcatgagtaggtaaataaattgtcaaatggcttagagtgtgcttgacaatgattgtgggaagtgtttttagtctttctaatacttggaaaatgtttatttttcaagtattagaaatgctagaaacacttctcaaaatcattgtcaaacgcattcttagtatcatttgaagttgtgtctcttggttttagttttcaactcatttttctgaaatttcctccaaatatcggttctcttcaattgataatgtttctaaaggggaatgctttgcgatctttttgtataaggaatgttgagttgtttttctttgttttgtctcttctagtaccctttggagaaggcttctctacctctaagtttgattagattttgttcatttgtaaaaggatttttcatccttaacttttacttttaatccattttaatgaatatgtttttttttttttaaataaaaaaataatatttctaaaatggattaagctctcgacttggttgtagtatcatatgaaggtgcaactcattgttttagattcaacatagcctctaaaattaatgccaaaagcattggttttcttagtatgataatattttcaactctaagaataaaatatttgcaaggtagcgtacatacatacatacatacataaaaaaaaaacttggaaagttgcttttctatacttgtggcttggaaagttgctccttcatacttgttctagactttgtggagggagagaattagtctaaaagcaagaatcctatttcaattgatttttagttaaagccttacaatcaccttagagctaggaagtcttgtttcttttccaacaggtgttacttggaactcttgaatgccactgaagatgggtttttttttggcttgggaagctatttggaataaggttttaattttgaatcatttttaaaggagaggcctcgaatcatcttcagaggagagggtggtcgttggtgaacaaatgtttcctttgtcacttggaggaagaatcgatcaatcacatccttattcactatgtcaaaacaagggttttatggaatttattgttttccttgtttggtgggtcatggatgctttctcttcagttagagaaacacttttgctataccaaggctcttttgtgggtaaaaaaaggaaaagagtgtggatagctgctcctttatgcttattttaggcaatttggatttgtccaaattgagccgcattttgttcgaaggttcaaacaatgttttctttgtaatctttgggcttggtctaggttgtttttagccttaggtccttgttctactgtagattttgttgattggttgggttcatattgaggtggtgtcgttttttgttgtctctccctcctttgggtggcatctttaggtgtccattgtatactacctgtgtactctggggcgctttttaggtgtttctttctttttaatatattcctttaccacaaaaaaagaaaaaaaaaaagtggtcagccaagtcatcatcttgcttgcgaaggtagcagccattaactaaagaccatccacttgcaaatgtagaaacttatcttagaagtgaccttggaatgccaaactgctttagttggaaataaagaagactcccttgtaaaaaaattgtagtaggatccaatagagaaagagccattcttggttaaattccacacaagcttatcctccaattcatttgctgctgacagggactcagcagctgtaacaaagagtccactaaaatctcatcccagttaaagaagttccttctatactccaatcccaacatttagtaactggggcttctttttgagctgctgtgctatatgctttggggaagcaatctttcatcggtctactttcacaccaaaggtcataccaaatctcatcttgttacaatttccaatcaagtagctcatccttgcaaaaaaatcttcactttccttatggctttccacaaactcaacccatagatagctctactctctctaaaatgccaacctcctttgacttcccccatgcttacccacaatcacttttctctccataaattatctcactcattcgcaaatctttagaccacttcacaacaaggccttattgaacggcctaagactcctaatttgaacacataataccccaccttactaaatggatcttagtattaaattttgagtatgtacaagaaaatacaaagagaatggtaaggacgttgaaggtctctatggagaggaagaccttcttggttaggttcgaaggtgaggccggtggaaaatggtgctcgcttacagagcacagtagaggctcggtttttgccttaggctttgagaaggaagaggttggttggttgatagaacatttgatgaaggccatggagatgaagaaccacatgggtttcaacagaaaattaagaggaaaaaccagagtccatttaatggaggtttgcttcaacaatcatggtaggtttataaggctctcagagttcgcttccaacagaaagtcaacttttctggtaatacctgagggagagaatggttggggatggggacatctaatgattgcgttgtcttcaatgttggtggtcccctcctcgagtattgtttaaaagggaaggtagaggagggaagaagggacttttcacaaacatgtgggtcctttgtaccggtccttcgcgaatgtagttagagaagaaggacccaggagaggaggccttgttccagtcgggagatggatgagagctgtggtgtgcgaatgacatgttggttttgttaactgagttgagattggccgggctctggcgaaaagattagggcataaaggtctggtgactatcgtccccttctccggtggaaaatgattattttttgtagaagccatagaggaagctttatcactccacgatttaaggtttatcaggattaagagtgggcttacagtcttgttgagaagatggtcgccaaaggaaaattcagaagtagtggggaaattcaaaggaggttggatagaattacggggtttgccatttcatttatggtctgaggtacatctgaagaaaataatggagcagtgagggacggtgacagagatcgattggcaaatgttgaaactgttcgatctttgcaaggcaagggtgagagttgtcatgaaggaacggtcagttctctcagctttgatcgaggtgttagatgggggatgggagttcacaatttcagttgtagtggttggagaggaagacattagacgaggcagagaaatgggtgagtcaactcggcaggagtttgagcctcactcgtggataggtggaagaaagagggttgaggaggctagttcaacggctgtaggtaggtctattgagggggcagttggcagaatgaagaaaggaagagttagtcaaatggctgaaattgctcctgtggggacacgtggcaagagaggaccgacagtggggaacaattggtcccaaccttcctcgtcattcagtttgaattcaaataacctgagaaatgggtctgccgggccaaagtaggatggagaagtatgggctggaggggacaaagcccaatcaactggtgagaaagggcttcgggtctccaaacaagtgagaagggcccattcttctcttaagcctaaaccacagattgaagtagacttgggctggaagaggggagattctttaaaaggcccatttccgaagatgggccaagaattgggaggtaagcagcccagctttgcgaagggctctttacgcagagatgacccctttgcaaaaggaaaggagaaggtaggctctgaggtttctgaagctcaattgaggggttccatgttgaagtgtggttcaaagaagctgtggaatgttctattccctccaagttttggatgccgacaagggggtcgaaaccgaagcgagcctctaacgcttgagagattgttgtcattttgcgatgctcttccaaaggaagatgctttcgaagtgggaacacagttggaatgaagctttagtgcgagtccaatcaatttttgtcgttcgttaaggtttcgaaaaggtgttccggggaaggaacgtcgccgacgagaggagatgcggatgatcatcaaaggtctcatcttaaggctccttttctttcaaaggggaaggagaaaatgcgcaaattctctgaaggtgaagataaagcaaatttaaaaggtttcgtgggttttcctcatcgtggctcatcagtcacggtttttccttcttatccagtaaccagagaaaaagggctcaactctgtggggtcttgtggagtgatggtagtggaaaactttgagatatcttcttattgacattctcagtcatctctatcatttctttctcctccctctggcttggctcttccacacttaagtccttctgttcctgttcttcccaattcagcctttcagtctcagtatcctatgaaacctcgagttatatctgaattttttttcaaaaaaaatgacgatgaggctttttgtcatgggtttgttggcaatcctaaccgagatggtgtggagtcccagttagctagtctgaaccaattgttcgtgagttttaaatctcttaagatcaagcccaacacgcctcttagggcccccaacctggttacggttagccagggtgaaacggagttctcccccgatgggtgagttccaaatagaaggcctttcccccagcaaaatggctaaagtttgtgaggtcttaagctctctggacattaaggtgtattcaaggcagaagaacagattttttacagttaattgagaactgttggtttggtttggaggtttagggtcagtgaggtgtttttatgaaaatcatcagttggaatactaggggtttggggtctaggaaaaaacaaaggatggttaaggattttttgcagctcgagaatccagatgttgtgatgtttcaggaaacaaaaagagaggtgtgtgacagaaaatttgtaggtggtgtttgatcggttaggaataaggagtgggctgctcttccggcgtgcggggcttcaggagggattttgattatttgagactcaaagaaattgagcaatgaggatgtggtaattggatccttttttgtctcaatcaaatttgtgttggatggttgcagacccttgtggctgtctgcagtttatggcctaaatagtcccttacttaggaaggatttttgggtggagttaagacatttttggcctttcttttcctttatggcgtgtgggtggtgattttaatgttataaggagaagttcagaaaaattgggtggctctaggtttacttctagcatgagggattttgatggttttataagagattgtgaattacttgaccctcccttacagaacgcctctttcacttagccaaacatggaggagtcaccggtgtgcaagagatttgatcggtttctttattcaaatgagtgggaacttttcttccctcaaagccttcaagaagttcttcctagatggacatcagatcattggctgattgttttggataccaatcttttcaagtggggcccaacaccttttaggtttgagaatatgtggctgcaacatccaagtttcaaagagtgttttagtagttggtggagagaatttgatggaaatggttgggaaggccacaagtttatgaggaagttgcaatttgttaaggcaaaattgaaagattggaataagaattcttttggaacgctaaaggaaaggaaaaaaagcatcttggatgaaatagctaacattgatgccattgagcaagaaggggttctctcttttgatctttctgctcaaagagttttaagaaaaggggagttagaggaactaattttgagggaagaaattcattggagacaaaaagctaaggtgaaatgggttaaagacggggattgcaattcaaagttttttcacaaagtggctaatgacagacaaaataggaatttcatcaagtttttggagaatgaaagaggtttggttttggatacttccgagagcatcatagaggagatccttctatattttaaaaagctttactcgagtctgcctggagagtcttggagagtagaagacatagattggtcccctatctcagaagagagtgcttctaggctggattcccctttctccgaagaagagatctttaatgccatttttcagttagatagggataaggcgtcggggcctgatggttttaccattacagtgcttcatgattgttgggatgtgatcaaggaagacttagtgagggtgtttgcagagtttcacagtagtgggattattaatcaaagcactaatgcctccttcatagttcttttgtccaaaaaaagccagacaaagaagatttcaaattttagacctattagcttgatcacttgtcttgataaggtaatagtcaaagttctatcagggcgattaagaggagtactacacgaaactatccattctactcaaggtgcttttgttcaagggagacaaattttggacgtagttcttatagccaatgagatagtggatgagaaaaggcgattaagggatgaaggaattgtcttcaaaattgactttgaaaaggcttatgaccatgtgaattgggattttttggatcacgtgttggagaagaaggggtttagtcctaaatggaggaattggatgagaggttgtctgtctttggtctcttatgttattctagtgaatggaaaggctaaaaggtgggtcaaggcatctagaggactaaggcaaggtgaccctttatcgctttttctattctctattgtcgcagatgtgttgagcagaatgatgttgagagctgaggaaagaagtatgttggagggtttcagggtaggtaggaatagaacaagggtgtcccatttgcaattcgcagatgataccattttttttttccaactcttgtgcggaagaactgcaaactcttaagagtttattattagtgtttagacaaatttctgggcttaaggtcaatctcgacaagagtaagctttttggcatcaaccttgatcagaatcatctctctaggttagccttgttgcttgattgcaaggcttttaattggcctatactcttcctgggtctacctttgggagggaatccaattgcttgcggattctgggatccagtgattgagagaatctctaggagattagacgggtggaaaaagacttacttatctttcggtggtaggataactcttatccactcatgccttttccacattcctagctactttctatccctgtttaagattctcgctttagtggctgcaaaaattgagagattgcaaagggatttcctttggtcaggggttggggaaggtaaaagagatcatcttgctagttgggatgtagtgtgtaaaccgagggcaaaagggggattggggtttgggaagatttctttaagaaatctcgctcttttagggaagtggttgtggaggtatcctagggagagtacaactctgtggcatcaggtcattctaagcatttatgggacacattcaaatggttgggatgccaacacttcacattgttgttcttggaaggctattgtacaagtctttcagaatttttcaaagtatacttgatttgtggtaggagatggggaaagaatttgcttttgggaagatttgtggtggggggaccaacctttgagatcacaatatccaagactatttagagtagtcacggataaaaatatccttatttcttgaattcttggttctgctcaatctttttcttggaactttaatttccgtcgtaaccttttcgattcaaagatagaagatctagaatgtctcatgcaatctcttgattgtatgcatttgtccactttggctttagatgcgagatcttgatcttaatcttcttcaggattgtttacagtcaagtctttctttatagccttgtcccaaatacctgatttatcttctcttttttccctactaagtttgtatggaattctcaagtccctttcaaagtcaaatcctttgtctggttagtggcacacaagaaggcaaatactaatgacttgctacaattgagaagactttacaaaactcttagtcctgaaatttgtaagttgtgcatgaagcaaggagaatcaacagatcatcttttcctacattgttctttgacgacggggttatgacacagattatttcagctagccaagatggattaggttcctttgagaagcatttcagacatgatgtccatcaattataaaggttttggcacttccaagagagggatagttctgtggcaaaatgcgtgcatcgctttaatttgggttgtgtggcgggaaagaaatgctaggatatttgaggacatagctaggaattcagagaatctttgggattccattcatttccttgcttctctttgggctttttgttccgtggtttttaagggcattccccttagcatgttacaactagattggctagcagtgtgtagttctaacgggatggtctagccaagagagcttgctcgtagttttcatagtgtagtttcttgttcttttattgtgttatttagttttatctttggagggaggattcctcatccttcttttgtacttctttttctatcattatttattattgttgtttcctatcaaaaaataaaaataaaaataaaaattgatcttagtatctacaaggcctccatccaaagaaagttccttttgaagcttctccattatcttcgttacctttttagaaatagaaaaaatggataagaaataaattggtagaagtaacgggagtgctatgcaacataagcttgcatgatttggatgggtactgccttttccaaaaggtcaactcgcttttgaatcttccctcaactaaggaccaaattgaggtgggtttgaaagaggcacctagaggtaagcctagatattagagcgaggactccctgccttacaacccaaatgatgggttatgctttctgtattccctactctcttctaactagactgagctcacttttctctgaattgatcttcaatgcagacattgcctcaaagcatagagtgtccacctcatttacactaattgctctttgttgacctcacgaaacaataaagtgtcatcaacatagagaagatgagaaatcttctatttttcgcttccctttccttccaccttgaaacctgaaataaaacccttattttcattgccctttgcatgaaacaactttgcaccaccttcaccaatataaatagatagggaaagaggggcttaccttgtttcaatccccttgagctcaaaaaatgttggtgggagtgctacttatcaacacaaaaaagcaaattgtatatatacaaaatattatccaccctatccattttttcttaagaacccatcaaaattgaaagcagagagtcccaatttacatggtcataatctttctcaacatccaacttacaaatcatctcaagcttcaaactcttagatcttgaaccactggcctcatttgcaatggggattatgtccagaatttgtcttccttccgtgaaagcattctgtgattgagaagccacctctctaatgaccttttgtagtgtgtttgctaatgcccttgccaacaacttattattttttttataagtaaatgcaattgaattaagaaagccaaaaataaaaaataaaaaatgcacctaaaagtatacacgatgtatgcaaggttaaaaggctaaaaaagagaaggaaaacacaaaaccatgaccttacttatattctaaccaatcaatgaaatcaagtatagaccatgagctagagcgtacattaaacttgacccaattaaaaaacatgtacaaaaacgattgtaaaatagcttggtctgttagtttggtgtcttcaaagtctcttatatttctctccctcgataaggaccaaaataaacacaattgggctgcatttcacgcttttttccttttcttcccaacaaaagagccatgccaactaagtaagaggtccttgatagaaaaggacatgacccactgaacaccaaaaagagtgaagatgagctaccaaatcatggttgccttgggacagtgaagaagtaaatggtttgttgattcctcttcagctttgcatataaagcacacctacttggtaaagaccatccccttctttttagttaatccatatttaggattctcccccaaaaagcttcccaagtaaaaaagctaaccttcttcggtacccaaggattccaaacaatacttgaagggaactctctagcattgcaaggagttagggaggagtaaaaggacttaacaatgaacaggtctttctttgatatccaccaattcatgacatcttcatcattccttctaagcacttgtccttttaatcttctaaacagagcttccacatctctcatttcccaatcattgttgtgttttatgaaaatagttttccaatgacctacttctcctattccatcccacaactaagcaacccaagcttttctagaggaggctaacgagtacaagcttggaaaatcctctttcaaggaattctctccacaccacttatccttcctgaattgcacttttctaccattccccaccttaaaagccaccctttttccaaacaccatccacccattcttgatggccttccaaaacaccaaaacaccaaaacaccaaaacaccaacctccctcttcctctccatatttccctacaattacttgtttccaaaaaggctcgttcttagaagtaaacctctaacaccatttttcaaggagtcttattcagtaaggaaagatttctgatgcccaagcccccatcctttttctccatgtaaacaataatacaattgaccagatgaggcctattatggagctcacctcccactcgaagaaaatctctttggttcttcttcaaccttaagcacggaggaatgacaaacaaggacataaattaggttgggaggttagagagagtgctctttaccaaagtcaatctccctccttttgataagtattgtcttttccataaagtgagttgcttctaaaatctctcctccattacatcccaaacatgaggggactcgaaagtggctcttgaagggaggcccaaataacaagaggggagagaacccacattacaacccaacaccctagttagttcctcaaaattaggaatctcccccacaggaatcaactcacttttatgaagattgatctttaacctagaaactgcctcaaaccacatgaaagcccaactcaaaacctccaaatgctccctgcatcacaaaatactaaggtatcattagcaaataaaagatgagacaccacaatgccctcctctcttctcccactagccaagaagccctttagaaaacctcctcgcaaagccctctttaaaatacaggaaagtacctccatttccaaaatgaagaggaaaggagaaagaggatctccctgtcttaagcctctagaactttgaaaaagccgatcaaggaaccattaagaaaaattgagaaacgaacagtagaaaaacaccacctcatccaacttacccacttagccccaaaccccattttttccatgattgacattaagaaaccccaattcacatgatcataagcctttttaatgtctaccttgcaaataatcccacccttagagctttttagtctcgagtctaaggcctcatttgcaaataatctcacctacttatggacctataatccttcgtgtcttctagtcaatcttctttgaaatcaaaaccaagaaagctgcatttaaacttcttccaaaaggcctgaataatgaagttcatgtaggaaatccattacctcagcccaaaccacaccccaacatttcagccaaaaatccatggtgaaaccatttggccccatggcattatcccctcctaaatcagttagccactgccaaaacttcttcattgaaatagttttccaacgtttttttttttaatagtatgatgtatgacgaataatgtgtgtatactcttcatttatttatttttttgtttctcccgatcagattatatttttgttagtgtgaaggagtgtgcgtatgtggtaaggggtggcttggaggtagacgtttggggagtggaggagagtggttggaaagagcagcaatgagtgttagtattaaatataaactgttgctaaataaaagcaactaagtatacctatgcaatagtgcaaaaataattacttattttatgttgtttttaaatatataacacataatgattgcatattctttttgttttttgttttagtttttcttgatcagatggtatgtttgtgtgtgtgggttgttttactgttttattttattttttggggtgggtagggggagggttttggaaactcattcatggtcttcaaaagtgaactattgtagacaaaagtaactagctatagctatgaagcaattactcctaaggctcttcattaagtttttgaagaatactttcccaaaaacaatgggcatgttggttctataccctaaaagtagttttctactcacaacaataaaagagaaaacacaaaaacagtttgcttgttttgtgtttttataaaacaaagttaaatagattattttaaagaactataatttgatcttagtgtgtatttagatgcacttcttatttcctacttttaaaaatagaaaatagtagttaacttatatacaaaatacaaaaactcttagaagcttgcattaaaaaagtattggtttttaaaaactgttaaaagaaaatgagatattaaaaatttttactacctcaaaatttaaaatttatcaaagttatttttaaggatataaagcaagcctatgctttttatataagagtttctactttttgtatagaagttattacttgttcctactctttctcaagtattattgccatttcttggagtccattatagtgatatggtcttttcttttggtaatgatgaaaaccactaatgtcattgcaaatgcatttgactcttctgctgcttcatcttgaatgatcaattgatctcaacattcgtaccattaatgaactatattttcctgcatgttatctgttttgacagttgcgagattttatttttgatgtggatgattctttcaaacatgtttgtttgcattgcatatgcaagcagttgaatgaccaaattctttttggtaggctgacaatttgataaaggaggaagttcagtttct

SEQ ID NO: 12015 - DNA, 6432 bp, Vitis vinifera
  Intron number 1 from transcript GSVIVT01032230001 (locus G SVIVG01032230001) derived from phytozome v7.0 (chr-ID chr1 1; pos 13421244 to 13427675)
agatagagtgatactaatcgccaaccaatagatctgagcaaatagatgaattattctttctaataaaaacctctttattaaaacaaattgaataattacatttatttatactagaaattgaagcaagattctttctagactcatgtaaataaagataacccttgagttctagatttattatctaacattagggtaacatctcctatgcccaatatagttatccttgcatagcaattaactactaacccatctagaaaacctaaccaaataggaaacagtagtggtatgattccaccaagcgaaaaggccaccaaaacgggcctatgctagtgttggttatattgaggtttttattccttagtcgaagacgaataccgcttgtagccaacccttttaagcctcatagaaacctgaagggaagaacatccaattgatttcaacacaagcataaaagccacgctgaatcaagtggaccgaatcattttcaacaacaaaggagataactttctatcgtgaatgcgaagtttcttttttctagtgacccttcttatgacataaggaagcattccctttcctttgctcttttctttcctagccttggacttctatttagtgtttccatttttgttattgttcttattcttgttaaaaaagcttgaataacccttgactaccatatgatcaccttttttatctttgagaatcctcttagccatctagagttccctcattaactctaacaagtttataaatatcttattaacaaaatactagagcttgaactacttgaaggaatccaacaaggcctctaagatcatgttgacctccatctcaccatcaatttcagctccaaggatctctatttcatttaagagtttaatcatatgaatcatatgatctctcataggagtttgttctattatcttggtgtttataatagtcttaaagacaacttgtctagctaacctactcctatcaccaaacatctcttgaaaactgaagagaatctcacaagtagtggcaagagacatgtgttgttgttgcaacacattgtccaaagatccaaatataatacacttggccttttcatctatcttttgacattttttatgaacatctctctttttttgtgagaaatgttaattgggaataagtggaacaaactcttaagttactcgtttaggttcgtttggtgtaagtactatatttagatttcttttttagtcaacgtaattagattcaattaatttatttatagtaagaatgagagtggttaggttgtaagacaatattcttgtaacaattaagctatgcattaataagttgagcattcaaggtaagttggtaagtttagcaattatgtagtgttctttaattactgcatatatctatgcaagatatctaatatgataagaatcaaacatattttagtcagatcgtgattttatcataggtaaagaccctctctaattaatctccttgccttaaacttgaaaagtttcctaagagaatatcaacatagcttttaagtttagccttaatcggactaaactagttgaaccattttaggtgattttgtcatttcatatataagtttaatgtgtaaccaagatctttgacatcaatatcatcaagtaagaagttcaatctttaagattgagcacttccactattaacatgtatagtcttatcataaaaggaaagtttatatccattgatttcatgtaaataagttataattaaattgataatatcatgtgaatagatgtttgatgtccaaaataataagggaggtgtatgtatagtcatgctaaaccttaggaaaggtgcatataattattaaaatggttaaatacattttaccccctcaacctttggtgagttttacattttgcctcattagattcaaaacacaacattttacctttcaaatttagtaaagagaaatattttgcccccatgcttattaaaaagtcaataaacaatatgttaagtgaaaaaacaaaacaaaaatgtgaataaaaaatatccaagtctaaagctattctcaactgcatgccaaaattattaatagatatgcaaacatctttctaaaataaaaaataaaaactggtaggtatcatatttcaaaattttcacatcaaggttaccaatttaaaattgattgtacttaagtttaatcctatgggtgaatcaaagtgtaaaaaaaaaaatttttataattttataaaagttttataattgaaggacttagtgatgttttttaataattaaatggaaattttttcataattattaactccttccctttctattgattagacttattccaaccaaagcaatcatataaagaattccaagtctattatattgggcttgatagtatttttctctgtcgaacacaagttaaaatttgtcaatgaaatgattcaatgttttgtcacgagaaaaatggccgagaatgggattatttcgaaaagtcatcattggaagagttgatccaagtaggcttggaccttttggtaaggcgtggaggatattttgtggccctcttcctgagagatactaatatttgtattgttttagggtccttcacaacactatcacttgacagtgccctcaaaataaaacaaaacagaacttggtgtggagccgtaccccgatgtgcgcatgcttgtctctaacaggtttacaacttagaagttgccaccgatttcggtggcccagttgtatctctttagtcgtcgctgcgacaaattccagaattgatggcatgtgattcaagaataacttgattttaactcagaagaatatcatgagttgatgaacttaatggtgatttgaaatctcaacacgacgtcatgatttcatcttaaaaaaatgaaagaaataaaatagatagtatatattttataatagataattctatgattatgtttggtttcaaaaggtttaaagaaaaatataaaagaaaaatataaaagaaaaaaaaaaaaagacagtacgtatataaaaataagaataaaaattgaaagaaaataaaaaatatttaaatttaataaattatatatatatatatatatatattactacaaaagttttttactcaattaactcttttatacaagggctaaataatttaaaaatatttaaatttcttaataattttaattatatttaactttttttttttgtatttttataataaaaccaagaataaaaaaatatttctttaataatttttttttctactactttctgcaatcaaacataatatatatattatatttttctcattgattaagaaaatatactttaggttatgtttggttcacgaaaaatgtgatagaaagaaaatatagagagaaagtaggaagaaagaaaaaaaataaaggaaaataacaaaataggtttaaactaaacaaatttattttatatgcttcttaaaactcatttaacttatttctctccattatataaagattaaataattgaaatatttataaatttcttaccaattttagttatatttgatttttatttgtatttttcttggtaaaactaaatatgagaaaactattttctttcatttttttttctttctttaatactttctaaaaaacaaacttagccttaatataaaagtaggaataagaaattcaaactaatttattttaagttaagcatttttatcaataaaaaaaatttcatcattttttttaaaatatatgagttatcaaaaattgattttgtgtaaaaatgagtatggtgatattttattttatttttttagttctaacactatcattaaataatttctcacttttataattgtttagataacgttaaatgtgatgaatgtttattcattgatttattgagtcaatgtagttataattatttttcaaaattttcattaccgtgttattcaagtcttttgactaatacttgcttgattaatcaataaagttatgtttagttcctagaaaattagaaaataagaaggaaaggaaagaaaaatattatatatattaaaaaaaatgatcttcttatatttaattttactaaaaacataaaaatgaatcttaaatataattaaattaaagggcagtggtgtaattatcttaatgactacactgattcaagcatgaaccactggggatctcaccagacaacacccaaccaattagtgagaacagaaaaagttgaattttccaagagattttttaaaataataatccaagatatgagatgaaaaaaaccttaattatctctgaaaaaataaatattttcagtgaagaaggaagtgagaacacgtgacaaagtcaatatttcattatctttgttattataaaataatttttaaattgaaatgatttaaatatttcttctttgaaatgattgcatataagcctgtagccaccataatagaatattggagcttgacgcaactgccactagagagatcgggttaaaaacactacatctaaatgtatggatctccttgctttccaacaagtcttttcttttgtccgcaaatcttattaaaaaattctcattttaaagatgtgggagttgactcaaagtttgttaaccccgttcagtcatctgctcgacttccagccatattccttttcttgacggtacttcatcattcattaattttttattttttatttttttattcatctttgatattatatttttttggttacacaataatggaaataagcaataaaaaaaaaataataatgataagaacatatatgaaaaatctcgttggagaaaaactcataaatagagaaaaaaaattcattacatcaaaatattagtacaaaatgaaataaatacgaacaattatagcaaaagtctcatacaaacggtctaatcccttcattattattacagacctctcataaaatcttataattgtagtttcattacatatgttgtggatcagaccaaatagattttggatcattaaaattttatatttttgaaagaattttattaataattaagaatccattgagaaggtgtgtttgattaaatttaatatttattaattaattgattgtgagtttgtaaaattgacttttagagcggaagctaagaccctgtagtaaaatttgattgaaaaagaaaaaaaaaaaggagtgaggaaaattttgtgaataatttataaattttttgtaatgacttttagcatgaaaggacagttaataacagtatatgataaggccaatagatgggtctgtcaatccaatgctatgatgaaattaacagagtgacctcagcttgattgacagctttgttggactcaccatgccgagtcaagagtcatctgtattagttctaccccaatactcggtattttcccatattctactaatataatatactattcttcatttaaatattgccataaaaacacccccaaaatcaattaaacgtgggcctatttgtttatgcactccaattgaaggtgcttgtgcaacacttcatttgatgccaatggtaatgtatattaatctcatttcatgaaaaacattagaaaaaaaaaaaaagcttatgcatatgaaaattaaactacttgatttttgttcggattcttttgtggtcaacaaaaaataaagttttcagacttaaatatccaaaaattttagttgattattttattgataaattttttcatcttaaattatgaatagaattacgaaaatcattcttttttacatgataaaagtttgaacctttatttttttagaaaaaatagaaaaaaatttcaatagaaaggatttgatttttccaaaaataagaataaattcttttttttgttttgagagagggagaggagaaaatgtattatttctctcattgagtctggtcggagtgttgacttgggcaccaaaacccagctccaacgagatgaatttctatatgtagatacttctatagtaaatgtgaatggaaaatgtttctatgaaagtatggtacttttagttttaccatttagttatccctcaaaaccctttttactttatagaaagtagctcgtagatgcatggagtttgtgggagaaataaagaaaaagagatccaccacctccatcggtgaattcacctcagttttttttaataggtcagtttgccttctttgacttgtatttttggtgatgccatcccccacttctttataaaatgccatcccacctagcccatttctcttcaaactaggtctcacttctcctgttttctcttgtttctcttgtgtctgtatggttttgggagaggctgtgagcaatatcatcaacaatggaggtgttcttcctctccctgctcctcatctttgtgctctcagtctccatcggacttcacttgctcttctacaagcatagatcccacttcactggccccaatctccctcctggca

SEQ ID NO: 12016 - DNA, 6469 bp, Vitis vinifera
  Intron number 4 from transcript GSVIVT01009199001 (locus G SVIVG01009199001) derived from phytozome v7.0 (chr-ID chr1 8; pos 6168729 to 6175197 reverse strand)
ataggtaggttcctttttggccatagaaaattgataatttgttgtttatcttttagatgctatatgattttgaatttaagcttttttggcctcagttctgggaaagttgaaatacaagcttatttataagaaaaaaaagttatagaagattatttattagaattttgaattctaatctgttgaagttgagaattatttattttttattatttttagttgggtgaggtgtagaagggtcttgcaatgtcttgtacacaacaaagagttcaatctccttatcgtttccctagccatcaataaaatacaaaaagagtgatgtaaatactccataatgaaatgcagaccaatgtaaaaggattttgagcaacaatgttttaggaatgtgtcagaaaactcttcttttctcaaaattctaccattttgttttctctaaatgcaccggaacaaacaaatggagccattatgtgcacgtttcttctcctcttaccccctttttaccacgtcatactagtgacaacattttcgtataccaagggaatatccaaagacatccaaatagatcaaggagaagattcagtaacattcaagtttattgcatcgatgagaatatggtgtgcaaacttcttatccttgcatagacaattataaccaacgtccatgtattctcatgggttggtcaacattagaatttttctgctaaataacttttatctgtaaagcttgccctcagatagggtgcttcctttaagtgagattttttgctatgaggaaatcgtcaatttatgataaactttagtcaccattataaggatataaaaacaaagcacatgcacgatttttcccacccaagttttcatgtctgtgtggcgcttagaggctctttaagccaacctacaccttccccacgagatagcaacaacgcaaaggcacacacgaggcttacaaggcaccaacctcaacttgtattttattaaatcgctgaataagaatacaagactgaagcaagactcccacaataactttggtgagttcaggcttccctcatgaactctctctttggatctcactatatatcaaggagaccttcccatcctccttttatagagtggtcgccacccacgcctagttagactaggagtacacatcttagtcctactgggactcttattgatgggttatggcaccaaccactcctattaggactcggagtcctagtcccacttagactacaattatgatagacatcaagactcctactcgtgcttgacttgcaatcctacttcgagtccaattcttcatgctgctgccgcatgcatctatatatgtggttcgcacgtatgccatgctcttttttggcctgcacgttcagattgcatccatgtcgaggcaacatgctcctacatccattttgttgctgttgtagctccatgccttgcccaagccctcttcttggtgcaacatgtcatggcattgcgcccatgactactccatgcacaaggcattgtgcccttgtgtcttgtatttgagtcgtcatcgttgctccgcttgatgtgttctattaaagtctctctcttggtgttgcccctgccattgcattacacccatggtcaccaagtcatctccttgcacaaggcattgcgcccttgtgccatcttgttattgtcctaggtcactcatgaggccaaggtgctgccccataaagtcttagtgccgtatagtccatgtcaaggggttaacacctagcatatagttttatcttttaatgtccttataatattgattttgaaggatagattagctttccttgtacgtatatctattcttattaattcaatttctcctttcctaaaaacaaaaattatacaaagggaacaactattctttgataaaaaaaaatctaatttattaatatgaatttttaagcataaataagtgactagaatccatccaatgtatatgaaagctgataaaaagaaaaaaagaaaaagagagagtgaaccttttgaatcagaacaaggggacaactatacatcttaagaatataagttgaacttgtacaagttagattagttgtacactcctcaaaggggaaaaaatacccccaacaaaagaagtttgatgcttggctccttgttttgctaaaagattagataaacaaggaacccaagagaaagaacacccaagacactagcaatagagtttggagaagccttccgtcatgcctttgaggtcttctctctgatttagacctccaaatatatatatatatatatatttgaataaataagtaaaagtattgtattacaatgaggcactaaaatagcgacccaaagatgtacggtataaagacactcacccccttacggttgaaccaaaacaacaagatatgcaaataatacctccttcctcatcgagaacccactcaatcaataaaatctattaagatcgaatgaccactttttataaacaatttggtcttcgaccacagtaaatacacaaaagaagcttttagcctttggatggacaacacattatcttcaaaggcaattctattccttgccttccaaacggaccaaaaaaaacataacgagtccgcttgccaaacaaccttacgctttttacccacaaaagacttcctccactctaagagggtttcctttcccgaagaaggaaacacttaagacactccaaacaatgaaaagagccaacacccacaattcccttgtcttttcacaatggagaagaaggtgatcgataaactctgcatgcgtttggcaaaaacaacatctattaggtaaaacccaacccctcttctgaattcggtccaaggttagaacttttccccataaagtctccaaagcaaaaaatcttgttttaggttgcacacaagaattccatataatcttctaagggaaagaaactggagagtccgactttaaggctctataaagagactttaccgagaaattgccatccttcgaatccatccacctcatcttatcctcctcatctaaattcaccttcttcctacccaaacaacataacaacctttccacctcatccaattcctaatcattgaaaggcctagagaagcaaaggctccaacttccccccctttccccacttgctgaaacagtccaaacttcattcacctagacctctttagaagttgctagggcaaataaagagggaatgactcacataaaggagtagttccacaccacttatccttccaaaagctcacattcttcctttcacccaccacaaagtcaagtctagggttcactaggtgctccaactttctaattgctttccacaacctactccataaccctccttagcctcgcgagagctccacccatctcttttctccccgtatttcccccttatcacttggttccaaagggcctttcttttatttgcaaaacgccaactctattggccgaagagagccttattgagtgttgtaaggcttttaacccctaaccatcctttccttttaactagacaaacaatcttccacctttctaagtgaggtctttgctcaagagccccaccaccccatagaaaatccctttgtatctgcttcaatctcattctaattgtcctaggcaataggagaatagacataaaataaataggcagactagacaaagtgcctcgaattaaggtgatttgccccctcattagagatatattgccatttccacatagccaatctcttgcggaatctctctttaattccgttccaagcggctgcagatttaaaaggagcacccaacgacatccctaagtaagcggatgacaaccttcccaccttacaaccaagctcttcagccaagtcttccacattctctatccttccaattgggatcagctcacttttatcaaaattagctctcaaccccgaaattgccttaaaccacattaacaaccagcacaaaaacgtcatttgcacctcccgcgcctcacaaaaaatcaatgtatcaaatgggagacctacaccctttcacccccttttccccacaccttacaaggcaataaaaagcctccacaaactgctctctttaagagatagctgagtgcttccatcgctatcacaaacaaataaggcgaaagaggttctccttgccttaaacccttgagctcttaaaaaacccggtaggggttccattaaccaaaacaaaaaacctggctgtggataaacaccacttaatccaccttcgcaacttctccctgaaccccatcttttccattaccgctaataaaaagaccactccgcatgatcataggctttctcaatgttcaatttgcatcgaatcgcccctttattgcttttcaagatcgagtttattgcttcattagcaataagcacaacatccataatttgcttctctttcacaaacgcattttgggccgttgaaatcaccttagctaacaccccctttagcctattagctaacacctttgttagccacttgtacaacgccccaccctcacaagctaattggcccaaaatctgttaagtcctccattttctttgggatcaacactaaaaaggttgcattcaaactttgcgcaaagcaactagaatcatggaactctttgaagaaattcatcacctccaccttcacaaagtcccacaaaaactaccagaaagccattgagagcccatctgggcttggtgctttcttcctgttgaaccttgacaacgtgccaaagaccttctccttcataaaaggcttctccaaccattccacttccaaccatccggtctctcaaaactcaatccgtttatgctaggcttccatcctccaggatctgacaacagaagttggaaagctctgctcacttcctctttaatttcactgtccttagtgaaccacatgccattgactttgactctagccaattgattcctccttctatgagcattggccatctgatgaaaaaccctgtgtttttatccctctcatttagccaaatttctcttgacttttgcctgcaagacgcttctaagagaacccactttttataagtctctcttgcttcctttctagtttcctcttctcgcagagatagtgagcgagcactcttctccttatcctaaaaatccaccagaatcaaagcaagttgcttttgaatttcaaccttgccaaagacctctttgtttgagaacatgtccaagtgtgttttttgaggattctctatataatatggtttataaattaaaacttttctgggttgctagtctaccttagagtttggtgtcttaaattagttaggatgctatatatatatatatatgataggcaaatgagcaatatattattaagtgccaaaaaagggcaacacaaaggacacgggaagtatacaagtgtgcaacaaaaaaaaaaaaaaaaaaaaaatgaaaacaaaaattactccctccctatacttacagtctaatcaattgaataaatcaaacatggttatgggcccaacctctaagcttgagctgataactcaatgttttcaaatgctattctatttctttctttccaaataatctaaaacaaacataaaggagcaactttccgtgctttcttcctcttctttctgatgaaacgacccagccaagttaataatcttgcttttcttgagaattgcaactcccacacgactccaaataagaagaccagatgtcttaataattttgccttgctatatatatatgaaaacaactattttattgcattaaaatactaagtacaaagaaaaatgaaaattcctctgtacaaagtttgattgaaaaggtagataagtgtatactagttgaaaaaggccaatctatctgcacacatcaaaatggtcacaaggctagcaataattcacagtggtctagaatgtcctacaaaagaaacttcattaattaaattcaaatctttaaagtgggttactgatcctccctgttgtctgtcaactggttgggaagggtcaatgaagttggttgattctcattgtctttctcttctttttttgtttatctcttgatttaatcaaatggaaagatgatcgtttctggttggtttggattttcttttctatatttatcacattgggcctttggcatctttttgtgctctaggtatgccaatctagaatttgagttgtttcttcttaaggttttctttatataaatatttggtttgcttcatttcaaaggaaggtcccagttgagtcagtccttaaataggcaagaccagattttggaatcattatttatgttgtgcagttagaaataagattgttttgaaattatcttatgttcagaaatccctcctttaaataaattactttctattattataaaggcagaaactttatacacttcttgttttctgtgtgattattatgatgtttggtttatcaatgataatttttatgtttgttgcttttggcatcagtgaagtaggtgtaattatcaaga

SEQ ID NO: 12017 - DNA, 2232 bp, Vitis vinifera
  Intron number 1 from transcript GSVIVT01001528001 (locus G SVIVG01001528001) derived from phytozome v7.0 (chr-ID chr7 _random; pos 1035882 to 1038113)
ctgttctgtggaactggtatatgttctaatcctttgtctggagccaaacgatatttgatttttagataaattctatccttgttagaaacgtaactgaaaattattgaaaataatggcattattccgttacaatgtatggatcttaacactgtcagatggttgcagtaactggttggggcgtcttggtactcgattgtattccttgtatatgtttcagaatgacaaattgttaatgatttagtgtattgtaagaggatgcatgctgttcagtggaactgttaagttcctcatctttatagttggaacaaatgatacaaggtcttttgatgaatgcttgaaagtattaattttgatcaacatgatgcaggccttcacgattttcatttaaaaataagagcatttatatattgcttgttgtcagaaaattcctctggatataatagcattaccatttagaatatatggattattgcaagctagatagttgcagtaactagcagcagggtttcgtggtacttgatcatgtttcctccatatgctacagttaagttcagggtttctttgctcctgtgtcctccttagggttgcttgatcggcaggttggaggcccgagtatcatctgccatttgttttctagaaccatagggcctcaaaggataggtccccgctccaccctggagttattctcaccatgcctttttagaacctgcaatcattttaggattttccctgctgccatctctagaatgagtacttggtgaactttgctattggatgattgcttcttgtcttctacttgacgcgtctactttattccacatttggccaaagcttcatcctcctggatttattggtgtggcaatgtatgcagaacttttagcagggtcatagggcctcaaagaaagttcaatctaagtattccttatggatagctgtggaggaatatgtgaacagcataataagaagggcaaactagattctagtgatccttggagtgttgtcactagattagagaggtaactgcagctagtaggtccacttagcttccctgagcagtcagcactgaagtggacttcttgctggaagaggagtttctttttgaaacttttagtaggactcctgcagtgcctttctagtggaagtttcatctgctataccttctctctacttttccctgttctaacacatttcatttcctccaaaaatgctgaataaatttcacaaaacatagtatttgattcctaagatatcatagcctataggcctgatttatgtatcatttcagaagctaaccagtatactggaaatgcgttaaatcacaaccatggtttatagcaactgaacatcaaattttatttttcagctagtgttattgttgtttcatgagttagtctcatatgttgctatatagcaacttgtagttgattaaatttttttcttttttcttcaaggaattagctaaatacggcttctttttggtaggataaacacttctaattctctttatattaagctatgtgatttgataaagcaacaaaatgctgacactcccttgtcaaaggtttattgctattgagtttattttcatggcactgaactgagaacctatctttttcatttttctttgaaataagtcttcccaaaatacatattgttctcggggttttggattcaacttgagggattttttttttttcttacataaactattttacgctctcaagggtttttcacaggaaacatttaatatgaaagttcagtattttccttgttttctggtgtatggctgcaattctgaaaatcgtctagaaatacttttcagttggttagcaaaaggccaaaatctaactgaatgagcatggtttagaagtccataaggtatttttgactgggttacactctcagacctgccaacttgagtttgaactgatttgtaattactagttattgtatattttatcttttgtataattttatgatttgatactactgtaatcttatttaaaattatgataagaatttttaactattagcaggttggattcaggttatccacactaatgattaatcaaatttatcattttaaatgtagctgtagaaaaaaacctatcttgaaggaaacaataatttaggcgcaaagtatcaacacttgatgcttttttctgactaaaaagtttgattgttctgtttgtttcagtgctgcagatcactttctcttgaaggactacgtaa

SEQ ID NO: 12018 - DNA, 5166 bp, Vitis vinifera
  Intron number 2 from transcript GSVIVT01020918001 (locus G SVIVG01020918001) derived from phytozome v7.0 (chr-ID chr5 ; pos 17240303 to 17245468)
aactgggtattgtgctgggaggttgtgcagcaattgcagatgttaagaatcagaagaacctgaaactgatgaaaaacaccaagaaacagaggatgcaaaagaaaatggattgcagaaaaaactaactaaaaaattacatcagacttgagtcctatttataatacatcaatgacacaataacaaagtaaaaaaaaaaaaaactgaaataacaacttttctaactaactcttctcatctaacttgctttctattttaattctttcttctttcctttttagtttcatgctttcaatatgagatgcaacactccaacacccccctcaagaggaacatggatgttaatgatgttcatcttgcaaagattgtgatgaaaaggtaaagaaccgagaggctttgtaaagatatctgcgagctgtaatcatgatggaatatggaagagcttaataacatgttgctgcaatttttcacgaataagatggcaatcaatctggatatgctttgttctctcgtgctgaattggatttgtggcgatggacattgctgatttactgtcagtgtatagtaaagctgactgtgaatgtttgatatccaggtcttgtaaggcatacaaaagccattgaatttcacaagtggtagttgcaagggctcagtactttgcctctgcagaggatcgactaactataacttgtttctttgatttccatgaaatcaatatgttgccaagaaaaattgcaaaaccagtgacactctttctagtatcgacacagcctgcccaatcactatcgaaaaatcctttaattgaaaatctgaggaaaaaggaaaaaagagaccttgccctggtgtggcctttagatacctcagtactcgaatggctgcttgatggtgactaacaacaggttttgctaaaaattggcagagtactagtacaaaataggctaagtcaggcctagtgagagttaaataaagtaatctgccaatgagtcttcgataacctgatggatcttcatagaaattggtatcatttgctgataacttgagggtagattccatagggaaggcagcaggtttggatctagttaaaccagtgtcttcaagtatgtcaagtatatactttcgttggcataaggagataccagtcttggaccttgcaacttccaagccaagaaagtattttagtgggcctaagtccttaatagtgaacttggcatctaaaaaggtattcaacctttcaatttccagaatgttatcacttgccaatagcacatcatccacatagactaataaggccataaaagaactttcggatttcttaatgaacagagaacagtcagaattaccttgaataaatccataggaaagaagggtctgggatagtttggcataccattgcctggaagcttgcttcaagccatagaggctctttaaaagatgacaaactttctgttcaccttggacagccaacctaggaggcaattccatgtatacctcttcatgtaaatcaccatgtaaaaatgcattattgacatctagttgatgaagatgccactgtttgacggcagccatagcaagtagtaagcgaatggatgtaatcttggccacaggagagaaagtatcaaagaaatcaaggccttcttgctgagtatacccttttgccaccaatttagctttatgtctttctatagttccatcaactttatatttcactttgaatacccatttacaaccaatagtccttttatttttaggaagagtaacaagctcccaagttttatttaactctaaagcagtaagttcatgttgcatggtagtttgccattcagggaggcgagaagcttgggtgtatgatttgggttctagagagtttgtgatagaggtgagaaaagctttatgggatgtagacagtctaatagtagaaagaaaatggtgaagagaatagaaattacctttagtgggagaacagtcaattgaagtagatgtctgagttgcattttgagaagaagagacattaccacaataatagtcctgcagatataaaggtttttgttcaattctagttgattttctgagctgtaggactttagggtaagttgaatccagatgagatggagagggaaatgtaggtgagttggattcaagaagggcaggaggttcagagagagaaggagaattattaggtggtgatgcagatcccacattatgataggaattgaagaaggaggtggtagaaggtgaatttgaaaaggattgtgaaagaggaaacataaaagaatgagtttcaggatgttggggcaacacttggaaaggaaaaattgtttcatggaatatgacattccgagaaacaaggatcttattggtgtttagatccatgagtttataacccttaatatcagaaggatatcctaggaagatgcactttgtggctcgtgaatcaaatttttgtctatgactagttaaagtggatgcaaaacaaaggtagccaaaaactcttaaatgagaaaggttaggtgttttgttaaaaatcatttcaaaaggggttttattttgaagtagaggagtgggaattctattaattatgtgggcagcagtaagcacacagtcactccaaaaaattaatggtagatttgcttgaaacattaaggctctagcagtgcttagtagatgttgatgttttctctccacaacaccattttgttgaggagttttgacacaacttctctgatgcaaaataccatatttatgatagaattttgtaagtaagaattctggtccattatcagaccttatagctttgacagaagaagaaaattggtttgctaccattttacagaaagttttgattaaagatggcacttctgatttagctttaatcatgtatacccaagtacaccttgtgaagtcatcgactatagttaaaaaatatcgaaaaaccagaataagaagtagtgccaaaggtaccccatatatcacaaacatttgtatgatcaagagtgatagcagagtcaatctgtttgaggaaatggaatcttgaactagatacatctcctaatctacaatgccatatatctaagtgtttgtgaatagaggacaaagcaagaggagcataattaaactgaaatgaattgcaggttttagcttgtgatgaagttggaatcagatggtaaagtctttctttttcaagaacaatcccaatcatcttctccattgactagtcctataaaaggcaatgagaaacaataaaggtaagagaaagattagattgtttagtgagtttggaaacggataatagattgaatgaaaaatgaggaacaaacaggacattatgtaaaaataaggaatctgagagacatacagtaccaatgtgtgtggctggaactgtagtaccattaggaagattgatggatgcattaattggtttaggtgtagaatggtataaaagtggtgaacaaatcatatggtctgttgcacccgtatcaagaagccaatatgaagtggaatttggcttagaagtaacaaaattacaagaaaaaattggtttaagtgtaggttgaactttaccagaaaagtgagaggtggtgacaaggttaacagctggttggacattattctgattggaagaattgggttgaactgaatttgcaagcgccactagtttatgaaattcctctggagtgaaacaaaacttttgttgctcattgctattttgattgggaacctctggagtagtaatggcagcatgagcagaagccatatttctttttccttttggtccattccagccagggggataaccatgaagttgaaaacatttgtccactgtgtgaccattatagccacaatgagtacagtgtagggcagatttctttggtttgtccttgaaagattgtggctggtatctctgctgattagattgctttgccatcaaagcatgagtctcattatatgtagcagaatttgtgagttgcctctaactttcttcttgaagcagtagagagaaaaccttggacatgtttggtaatggaaccattagtagcaattggcttctgatagaggcataagaatcatttaaccccaccaagaatttgagtacataatcagattgctgtctgatttgtagaaagttgaaaagttcacaagtgcatgttgccatcttgccacaagtgcatgttggaaatggcatatagctaatgtactcatcccaaaaggtcttaaaggtactgaaatattcagtaacagacaaagcaccttgactgatgcaactcaaagatttctcaagttggaaaacccttggtccatcactcctgagatatcttactttaagctcagtccaaagatcaacagcagataccacaaacagcaagctatttcgtatttcttttgaaatggaattcatcaaccaagaaagaaccagattatttgcccttaaccaggttgtgtgtttaacaagctgatcaatagagggagaaacaattgaaccatctataaattgtaccttgtttttgactgtcaatgcaatgactatcgaatgactccatgcaacatagttttctccattgaagatttctgatactaacaaagcactaggattgtcgcttggatgtaggtaatacggactcgatgagtcatctgaaggattgataagaggctgattaaaagaattagatgaagaaggatgcacaggagagggattgacaagaggagaatcaccaaaactcattttcaagaatttattcaagaaaatgcaagaagctggaagacaatcaatgtaagaattccatagcagaatttcgcaaggcagaagttgagaagaaattgattgatttaggttgcggaagctttagggtttggctctgataccatgttgagaatcagaagaacctgaaactgatgaaaaacaccaagaaacagaggatgcaaaagaaatggattgcagaaaaaactaactaaaaaattacatcagacttgagtcctatttataatacatcaatgacacaataacaaagtaaaaataaaataaactgaaataacaacttttctaactaactcttctcatctaacttgctttctattttaagtctttcttctttcctttttagttccatgctttcaatatgagattgcaacactccaacagcagattttggaacttctttgttggcaggcctaaca

SEQ ID NO: 12019 - DNA, 7976 bp, Vitis vinifera
  Intron number 1 from transcript GSVIVT01003629001 (locus G SVIVG01003629001) derived from phytozome v7.0 (chr-ID chr1 6_random; pos 528188 to 536163 reverse strand)
cttacttgatcattcatcgtcccttgttggtccatgtttgctcgaatcatgactgatttttgaggcatattttagaaaccatttatggagttatttcggatcctagcttgattattggaggctcattaagcttagtttgtttgttttttttttttctagctttggctctttagggtttttttgactccttggcagcttggaaggtagccttccattactctttaagaggctattttggcctcttgtagtggggctcctttttgggatgttttgggtgggttttttttttttttttctagtttttttgccacatggagagacctttttatgagggagataggagggctggagagcattttttttttgggtggtaaagaaatagaatggttatctagaacgagagagtactctcctattgaggagttctttttataggggcagagacaaaaacagtggtgaggaaaatcttgaggagaaagaaaactagaggaagggaagaaaaccagaggtgagctcatggattttgaaggttttctagaaaaggagaggagctaaaagccccaacagatttttttggaaatgagctttcccatgtatgggtgttatggatttcctgttcatctttactatcactgttcttcgtcttctcctcttgttgcttgggcattgtttgtttgtttggttgtggataacagaggtcacatgtgagttttgttgatttctagtttgtttatatgcttattgttgttgttttattgactattctttttagcattgtttgaattcggtaaggctctgtatgacattccactatctggagatatcgactatatttttgttttggatctgcttctagtttatctactagtctccaagcccactgaaaaaataatgagatgtggctttgtttggctattcaatttgcatctacctcttctctgtttttcttggtttattttgtgctcttgcatttctttcttgttctcttttctggtgtatgtttcctattgtgcaacaacatgcacatctctgcttggtgaccttggatgcggctgacattggcaatagtggaacaataaactatggggaatttcttgctgttattgagcacttgaacaagatagtgaaggagattattcgcgagcttgactgtcgagactactagtggtgctaccaagaaattcatttgtgaaggaaattctgacataatgcccaacgattgcccaaatggtgatttttttagaaaatgattttgtttcaagagaggactgggaaaccaattaactagagagatccttttgaacattttcatttttcaagaagatagcatctctggacttaggtgcaaacaagcttacgggttcaattccaaaatctatgtcacagttgaaactaattgataatctggtactatccaataactatttcccctggtctaattcttgaagagatctgctctaggtttcaaaaggacaataagcttactggtggcatcatgagatttcagatgcagtgatcttgtccttggctatggagctctgcttcctttctagcacaattgaactagcctgcaaagctgtatatgctcagaattgatacttgtgcactttcaaaattctacgagggcaaactacagcttccttttgatcagaaaaaacctgcttttttcggaacagatcagtgagcaatcatcaaacatggtttcatctaaccattcttacttagatgacaagtcaaatatcagtggaagtggtgcatgatccctctagcagaccagttcatacaacttctggtgtggaaagatttgttggcaggaatcgcagtcctagacgactggttattgcatctccaggaaccctactacttgaagattcccaacctgaaaatattgatctatcttgaaaccagcctatgggtgagacaccaaggctaatctattggaatgaagcattgcaataccttgggctaccatggaaatgcaatggaagttgtctttcttgacaagcttgatcctgggatgtaaatcattgtattactaaaacaatacttcaaaatgagggcattaaagccttccacaagggattgtctgttgggttgcttaggaaagctacatatacaactgcaagacttggatcgttcaaggtcctaactaataaagttgttgctgctaatgatggaaaaccattacctctgtataagaaagctctttgtggtgtgattactggagctattggagcaactgttggtagtcctccagattcatcactcattcgtatgcaagctaatgccactttacctgctgctagatgcaagaattacaaaaatgctttccatgcactatattgttgcaaatgaatgggttctaacactttgggaaggcataggtcttactacagtgcgagcaatgacattgaacatggagatgcttgcatcctatgatcaaagtgttgagtttttcaaggatttccatggtttgggtgaagctagtactacaatgggacccaatgttgtttcagggttctttgcttcagcatttagtttaccttttgattatgttaaaactcaaatatagaagatgcaacctgatgctagtgggaagtatctgtacaccaatttttggattatgccatgaaaacattgaaatctggaggacctttaaaattccacaccagatttcctgtccattgtgttaggattgctccatatgtcatgttaacttggatcatcttgcttgaaccaaatctagaagttggaggaatccatggggttgtaaacctcatcaatgccaggaaatgctagcttacttggataggccatgagttccttaactctcaagagcaaaccttcagaacgagctccagtggctctggaaagctctctgcttgctggtttttgttacattcattttctggagctcgcccaatttttgttattgccatcacctttggttcttcaatcttattaggtgtggtcagctcacaacaagaggtgttcttcctgctctggccactttctgaatcctttttcaagaccgcaacttggtctcgatgatggctcaaacaaaggtttcacttgattgaatttatggattcttggaggaggaaaagttgcaagaagatgcaaccattgttctgtcatggggcatcattaacatggctatatctctttgcatcaaacttggcatcaatttaagcttatttgaagcgtgtgaattggacagtttaataattccgaatgagttgtatatgttacttttgagctattattagtactgttgaatacttaggttttagtattaaaattgtccattttctactattgttgcctattgtaattgcccatatatatttgaatcaaaatgaccatataagtatgttttttcctatcataaacaacacttttcttctataataaagaacatttttttttccagcaatttgagtccatttacctataaattattacttgtgttcccctattttgactacagtcaccttaatttttgtgccaaacttttcatgtatttatttaatttaacttaaattactgtaattacttaatcactactacttattgaataattgaagttaatccttttctttcccttattttttcccccaaaacttagctccacttaattaaaaaaccatttttagtaaaatacaattaccacatctcatgtaggaataaaaatgtcaaaatatgatcccattttgcaaaaaataaccttcacctttttaaaaaaaaaaaaaatgttatatttttctttttcgataaaaatacatttcattaaaatttctgataaggagtggtttagttcattagaggttatatttaaattcaaattcatgaaaattattcttttaaagtagtgaatatttcaagcttttagtaaaaatatttctttcatacacttaaaactaattttcacctcatattaaatgatccatttccactttattacacatcattcaaactcaactgtaatattattgaatctttgataaaaaccatcccattccaaaccacaccatatcatgaagaaaaaaaacttatgttgtccccaaataccacttatgctactatgttgtgttcaaggttgcacccctctttcttacaatcttaaatttgctccgatgaagatcaaatggggaatggggatggttaagagatgttgtcaaaattgtttacttgaaagactcataatcataatgtagagtagacatggacaaacacaagggaaagaggagggggtggctggagatgagtatttacttcaatctaatgacaggaagatgattgagaggtggagctgtcaatttttaactagaagtctggcttgatcgtgcaatacattatttagcttagaagccaaaatgagctacacacacacacacacacacacacatatatatatatagctaattaaaatgattcaaatttttgttttactaaaactattaaaaaaatcaatatatttatattcatttatttaaaaaattaaaatatctcaacaaaattattaattttattgaatattttttataatattttgaagacaaaaattaaatcattcaaaattttatataggatgttatataattttatttgaaagtccattttaaaagtctcccgacaattttttttttgtaactttatttaaattattaaaattattgaaaattgtatttataatttatcttatcaaattattttttatgtaaaacttatattttataaaaatattaaaaaccgatcttttataaattttttttatattttagttatttgtcaataactttatcttaaaaaattaaaacaaaggataacgttggggttttttttttttcaaaaaatcactaataaatgataaatatttggtgatatgttatattggtagttagatcttttgtgatccctaaattttcctctttttttttttttaaacataagactttattttttttttcttccatattttcagccaaaaaactaggtgtacctacttcctatccattttttcattttccccatatgtgatatttgaaccaataattctaccaatataattaatttttttgctatagcatcttagactagtttcaagttctagcattttgatgctttaacattgcatattttcttataaaactccccctatctgatgcaaacaaactacaaattggtaagaatatgaaacaatctcttcaatccaaagaattagtcatataagtcaaaattgagtttaattttaaaattcttctacgaattccattttatatggagaactcttaattggggtgataatagaggttagcaaatgataacttaacatgttaatatatcacctatattcttgatcaaggaactgcgaataggtagttgtcatgttttctatacctaattggaatatcttaaatttaaaacttttggtcttattatatttgagtcaattattattttggttgattattgagatttaaagttagtttaaccatgtttttaaaaaacactttcaaccttaaaataatagtacttaatttttttttacttgaattcttcttgcaatttttataatgaccaacacctatatgtatttatcatatccacgatgcaacatttccctatactccttaataaatcaccttaaaaccatatggaggtttgataactcagttacttcttgatatttgttttttctttctaaataaacgttcaagatttttcaaacttgatcataatttttaaagtttttgaacaagaggaaacaatgacatgtatagattttcttataattttctatttaacacacctatataagattttcaaatcctttttatacttaaaacccaagtaatttagtcaataattttgaaaatattttcaaaacaatcatacctaggatgcttatgtattatcccatcaaattccaaaaaataaaaaaaaataaaaagccaaattatatatagtgagacagggcatagtagatctagtaatgtccccactcaaatttcccataaaaacatcttatgtattatatcatcaaatttcaaaaaaataaaaataaaatcttatatatagtaatagatttttttaaattaaactgaattcctataaatgtaaatttaatttttaaaacataaaaaataattgcatttcaaataccacaaaaaattagataaaaataatgttataaattttaaataaaactaaaaagtaaatttactttataaagtgaatttcactcacctctcttgaggttgagttaaatgtctttaactagaattaatttaaaatttcatcaaatatcatttcttatcctatttatttgttaatttcattttttttttctttcttcaagttttgaaaatttatcgcaattgtataaaaaaaaacaaaaaaaaaaattatactaaaatttcatagcactaactaataataaaaacaaaagagaataattttgtcatagttattagctataatataaataataataaataaaagaaatgcatttgattacctatgtattaaaatgatagtcttctcacctgtttatggtatatgatttttttaaaaccttggataaatttggctcacaaatgtgtctgattttaatgcaaatttaggaactttttggccattatcacctctcaccgtgcctttatggtaattatctagggtaaaaatgtaaatttattgtcggaagtgaagttggcactcatgtggacgttagtagtaggctctattcagcacaacatccaagaaatgctcaataaaactagaaaacgaatcacatataaagcagatttgagtgacaacctcactctctactttcattctaactcatgctttcgtatcagtttctcgtattttcccgagaaaatctcacgtcatttcctagaaaaaaccctaccaccgtatcgtttcgaacctcaagttgtgataagagatgattcctccggctgacgagcctcctgatctagggatcccacccaaccgcggccctctgccagttaggagaaaccctaactctaaacctaaccctcgcgtttgttccggccatcgacgcaatgcccgaccgtaggggattcgggaggtttgagctcaccgaggcactctatgtgagattcttgacgtgttcttttattttttctgctttgtttatagttgttctgatgatcatgcatgtgtctttatttcaagaatgcctatttctgaatagtaatatttgcttccaagcaagacgtattttggaatgacagtaatggtagcaatgcttaatggtttttttttctctgtttctttgattttttaactatgctctttttgtttctttgatttttaataatgctcattttggatatttcaatggaaattcatccattttctcggtaaccaaacctggtggtatttgtttgtctcttaatttatgtgatacattttggaataataatatttgcttcctaatgtgagaaaattattttcaaaatggtagtcataacaatgcctaattgtttgtttcctgttaattttgtagagctaccaattgtaagtaagtgtttgttgacttgatttttctaaaatgcatatataggattattgtattgcctacattttagaggaagtcttaaggtgaatattgcattttgtgttttcttagcaaccaatcattcctgtttctttttatttattattttttgttttaatttccgttgtgcccattttggatgagaaatgtaccattaggtttggtattttggaggaaaattttaggattattttctttttaaagcaagaaaagtatttatgacttgattcccacatggccgaatcattgtttgattgttctctcagagattgtcatttttgaataacatttgttgtttttgttcataattgttgttttctcttttattcatatgaaatggagtagatgtggctgggactggttaaaacagctaaggaatgagggatca

SEQ ID NO: 12020 - DNA, 6962 bp, Vitis vinifera
  Intron number 1 from transcript GSVIVT01035778001 (locus G SVIVG01035778001) derived from phytozome v7.0 (chr-ID chr4 ; pos 4215355 to 4222316)
taagaagtccttggttcggcacccatctctggtgagcctttctcattcaaagcttgtgaattttctaaatttgggtttggctgagatagcgggtcggagaagaatgacagtaagagaatggattatgcatttctctttgtgatcgtttgctgtatattcttcagtgatgaatgggtttcttatctttcgcctttctgcaatgagtgatggctattttactctactgtgtaaaaatggttaatgggcttcttgaatagttttatcaaccatttccttttaaggttatggattcgttggctgttgtccacccatccaaataaaaaaaatgaatgaatttctttaattaggtgtatgaagcaagttcttctgtttaatgtttcttagatgccacctcgtcccgccccaccccaatgacaacaaaacacctggtggttgcagacacacaaaataatgtgaatcaaagctgttaaagtataatagatctgttgacaatgagatggttaggaattttggagttcttcttcgttaataagattgccttgggaactagggtatccaggtgagggggttagggattagtgatgtgatgtgggacactagagatgtgaagaatttgatgtggccgttggtgcttttgttgataggcatctgggaggggcctactttatgggatgtggccaatgtattccatctttcccaaggattgggtatcccttgagtggttatttattgaggaggtgtccatgtgcctcttcattatggataaggcccttaacttgatgatttttctatggaattttagcgccaaaaggtggtttgctgttaagtcaaaggttttgacttgttgaggaattccaaatttttggatcttttgaggaacagtggatctgaaggactttatacctataactctagtttgtggtttataaaaactcctagtagaggttattgctaatagactgaggtttgtggtttgagaaacttgtctcagattttagagtacatttgtggatgatgaacttattcttgatgctgatcttattcccattaaggccattgactccagactgaagagttctagagtgggggtttcgtgtaggagaactgaaaagcttgtgatcatgttatttaggatttcttgctattgttgactaagatgaggtttgggaactgttagatttgtgaaaatcaaattccatctctaccataagaagaaacccctgagactatggttattgggccttcaagcccttctgaatatttttttttttttgataagtaaaaagaagtatattaaacaaaaagaggaaacaccaaaaaccgatgccctctaagtatacagggagtatacacaccaccttccctaactaggagcctatctagtctacaaaatttataagagaagaatgactctctgctaaggaacctctgacccacgaccaaagattacatacaaaagaatatttcaacctttgaagcgagagatcctcatccccaaatgctagcctatttctctccttccatactgaccaaaaaatacataaaggcgccattttccaagccttcttgcgccttttccccacaaaccttccattccacccaagaagggttgccttcactgtacacgaaagagtccaagatataccaaaaagggagaaaagaaggttccacaggacccatgtcttgacacaatgcagtaggagatgatccaccgtttcttcttcagatagacaaagaaagcacctatttgccaaagagaaccccctcctttgaagttgctcctgcggtaaaactttaccccaagaagcctcccaagcaaagaaagctacctttggaggcactcttgcccttctgaataataaatagattattgtaggagaagggatatggagaacttaggagtctctaccagctgttcttggttccaagggtgggaagctaccttttcagtcctaccattggtttcttcttttaagttgattgcaatgtgggatctagtggtagacagtttgagaggagacttgcatctcagaaagggtgatatcctgccaagaggaggatgctgactctcattaaaagtactctcttgagtacctgatttatttatcttcttcctttcttttcttttggggagggggaggtggatcagaaaccttccttggtaaattgagctgctgtttgtttccctaagaaggtgcagggggtttgggaatttggagttggcttgttttttcataaaaccattttggataagtggttatgaagattctctagtaaaaaagatcaattgtttgactagagtgttagtgggcaagtttggtatcttggatgggtgttcaaaggaggacactattgagcaagggtctataggccactattgaggagggttggaattgttggtttagaaatttgtggaaggaatttaaagagaaaaaaaatccaatctaaaaatcactaaaaaaaaggggaaaactgtacctaggctttaagcctataataaggacagtgaatgaatgttctagcttccaagaccattggagaggagagagatgtgaagatgagggttgtagaaacccaaatgattttcaactgaaaaaagaagtaaccaaacccttgaggattcctcttcccttttttgagtttcctaattaggctagaggtgagatctctagggtttgctttatgatggctgaattaggttatgattccaccaaggtagttttattaaagccctaactagttaaataattgcaagtacccttctccaccaaccaatgtccataggtgacattggtacaaggcaggatatagtggagtttttctcttaagaaggggaattggaatgggatgaaacatactctccgatcaatgtatcttttaattttttatacctaatttaatatcttttaatctctagttatactttaagtagtaagttgctcataccattgatgggttacttgtaactataattgtaattaatttggggggggggggccgggggggcggggagggaattgtagggtctacttgggaatgttttcaaaaaaaagttctcaagaaaaagtaatcaattgtcttcaaaaacaaaattatatttggaaatcaaatattaaaaacagttttcttgacttattctccacgaatgtactacgcacttgtgtacaatgcaaaagtttacaaagtattttttatattttcaattgttactcagaacactttataaaaaacaattgaaaacacctaaatttgttttaaaaaacatgtttttagaacaaattcccaaaagattgttttatatcataagttttccaaacctgttttttgagttagaaaactgtttttaagaataatttccaaacagggcctttcttttaaaaagcatgaattgtgttttgaggataagtattcacacaaccttaacaccaactacctaaacaaagcaattaaagaaaagaattttaggtgaccactctcttaggattaagagcttattgcattaaccaattatgagtatcatattaatggtgccatgtgaaaatacaacaatggtggttgtggttttaataatttctttctcataatcaattcaatgcatccatatttacaagccataccaattcagagccacatatgattgaggtagaccataatgatatgttacagtctttgatcatattgatacgttatagtctttccaataaagtgcccaatcttaccattgattgagaacaaattgatgtgacagaactataacttatatctcctatatgtgttttttttttttgataaccgaggaaccttccatggccaagcccttagaactctcgatggagacccaaaccttggggtgctgactgcctcacaacaactagcactagtaaaatttagggtatcatcagtggcaggatttgaacctaggactatgtgccacttattgggaccacactttctaatattcgccctaaccaactgggctaccttgacgggtaacttatatctcctatatgtaaatttcatttatatatctaaatcacgttcagtgcaattgaaggaccatcattcatcttagaaataaaagcatgtcacagtatgaaacatgtaagacaaatacataaacctcatctattgctaaaagaaaatgtcaatcaaaagtcttgaaggtatatatttgaacttgaatgttgtctatggatttactaccatattggagggggatggtttgaaaaccaggtcctgatccaatatatggtgtggggagtcagtgcataagggccaattccctggcctttgctccttggctgttgattggaatgcattgattgtagattattagtaattgcaaaaagggcaatgacattgagttccaacattcattagatattttcataatttatgtcctttatgaccagctttcacaaatacaatattggggagggtattgaggacctgttctggaagagccctggaaaggatgttttttggtcaaatatttcttcaaggccctctcgtctaggcccatctcttattttccattatcattggtgtagggtttctatacacccttaagatgagctttttggcttggcaaactatgtggggtggattttcaccatccattagttgatgaaggaaggaatggctctggttaagtagtgttgattgtgtgggcaaagtaaggaatcagctactcatgttcgtctatgttgcaggctggctcataactctggtgtatttggaagaagagaaattaatgctttttttatttttattttttgaagggatggggcttattcttatcatttctgggtttcgttgatgggtttctggttggtttagggtttttcttgtagctttctctatcatgtctttgtatctaaggctgatccttgtaaaaccctcatctactggaattcctcttctggtgccttctaatataatttttcttacctactaaaagaaagttgataaatatctttggtcatggcatgggaatatttcaggtgtttcctggacacatttccttaggttgatatttaactgtttttctgattacgctggacaataagttcaaagtgggatacgcttgtttcagtggagccagaaaattggttgaaggtccggttgtcattatatggaactattttgggtgggggggggggcgtaagataacaccaaagtacttgtatagcctagtggtaggcagctaaatccttcagaattgtggttaatggattgaactccactaaccccaacattttttttttaaatttcaggggggggcatatgctcctcctgggcactgcctaactctgcccctgtttcagaccatatggttcaacgaattttgagataagagattaaaacatgttttgcagttattgtgtgctaagttttatctcgagtgaaaaagtttaaacttctcaaggaaaggtcagaaggatggaatatgtttgtttttgtaaatcagaggctagcatggcttccatgttggaggaatcaaataaggaggttggtgtcaaggaagagtggatgagtttctccaccagggagagaatgggggaagagtttaaaggcttttaaggatattgactttattgaaggatcttagttggaggcaaaagttttggttgcttgattgaagactaatttggagcttagtgattggcaggctgacttgggtggaaggtaaggagttaaaggaatgttgagtttttaggaaagttttattaggagcaggactggtgactatgtcaaatgggctggggattggtaaaattggtgctcgatagagattggttggaagggttctcttggaatacatggatgatgctgtggtgggaggtggtgtaagaatctcagtttgcttttgtagggggtcaagcaaattttacatgtgactcttcttgttaatgaatgcttaaaactcaaggcaaagaaatagctttttgtgtaatatgcaaattatttatatatgtttttggtggataatgtgtgagctagatatgaagaaagttgtgatattgtgaattttggactttctcatctatgtggtgcaaagattggggtttgctttatcaaggagttagattatggtgcatatctgaaaaatctcatttacagttataataatgggatggtaaggagtttctttaataaatattggagtcctaggcagtggaccatatctcttcttttctcccaattttgggatgctaaggtcagtatcaagggtattttttggttgggtttcaagtttataatgggacttcttgcctaggagtaccacacatttgttgcattgagtataacaatatggtcttgtgctgtacagatggggatcaattcagatatcttgagctaagtgctcttatgttttgaggtagtttctggtcttgaattaatgtgaaaaagagtgattgttactataattactcctgttaatgtcaccatctaatgattgcttataagtatatagttcaactagcctctaaaatcaggcatttattaattgaaatataattgtcttttctgtatccaaacatttaagccttgtgttagaaatgtttaattcatcagcctgtagctattgcatgatgtgttaattttattaaattctcattcaattagctggctttttttccattctatattctttgactggatgaatcattaatgtggattactggatcatgctgagtttaatttaataatctttgtctaataaaccaacatttgaactcttgagaacatgaagatttcatatgcatgcctaaagtaatggcagtcactagactcactactgctggtaattatgcatttgatttgattttgattgttgctggagcactgcccattttttttcccaccttcttcttcttcttcttccttcttttcccccctaatttccatttgtattatgtggttggatatcctattttttcaccttttggcagctgaag

SEQ ID NO: 12021 - DNA, 10713 bp, Vitis vinifera
  Intron number 2 from transcript GSVIVT01012500001 (locus G SVIVG01012500001) derived from phytozome v7.0 (chr-ID chr3 _random; pos 47207 to 57919)
ttgttgagatctttgggggagactgacaccttaatgttgggtaatcccatcatcacaacatgtgcattatcccatttttgaagtccaaaatgaaacctaccatggtcgcaatctccaatattttcagcttaagaattccatgacagtgaaggagcctcagtattccaaattggtaagcatcatcaggttcaagtgccttaccatgaaaagtaaaatagtctggcagagtttggtgcgccagacagaattgacagctcagttgcgtttaataacaagaaataaagaaccatagtggaattggggaagctagacagggaatagtagcttagattggcaaaagatcctctgattttcgcttagcaatgtatggagatgactccatctaagttcctcaccaatagattcatccccattgacacccccataaccaccgcctccaccttctgggacgccatcttccaaccaaccacctgcgaaaccaactgaagggcctatatgcgatctcttatggtctgacccaaatgatcgatatggttagggtacctctcctcaggcgctgaatcaggcagattagaagattttatcgtggtgaactccgcagttgagttctctcagtttgtaatctggttgcatggggatctgaaacttgaaaatatcacatggatgcatattatttgaggaggaatatcccttggacctgctccagaaacaggttctgcagctagagaaaccttagagcaatcaagattggtgaagaccttgaacacaggattgggatgttggaaacttcactaaccaggtttggcatgatcttggattctactcagagtgatgtcatgcaagtgaataaagggatgaaggaactttttaatggagatggaaggccttttcatgcaaccaccaacacctacaactgcaatcaatcgagctcatttccaccctaagccttatgttgctccgcccttgcttgcatggtgaccctcatttgatcttttgtaaggcccaagtgattcatcccttattattcatccttgcttccaaaaattgattttcaaaattctggttttcaaataaatttaattccttaactttgccttttaaaattcttagaatttctcttaggttaataaaatcccgattttaataaatcgcttgctgcaattattttccttttggcttgcaccttccattacttttctcaattttaaatgattttccaattttttttattttaataacatgaataaattctataatttcaaaataatgaaattttctccaaattcctgtgatctttcctccatgatcattaggaaaatagagtttatggaattaattcatgcacaaatatgactaattatatatgaatggtctttttggattggtctaattaattaattaaagcataatatgagtcatgactaattaattaattaaaccacaataaggttaattaattaattagaatccgataggttagattaagtggtccaagcccaggatggactcaattcacttaaacccacatagggtttaagacttgtaaccttcgaccattttgtcttccagagagaaagagccttagcttgcatccctatagaggggattccaccatcgtcacatgtacaagagggagccattaggtgaaagatgagatttcgatatcacttttgcagaaggatttgggtttgggaacaatcaagccctaattatgatttctaactcatcctatatgcccaaagttgtgttcttttatcatttccattatgcctaagatcttagatacatgtaccttaaagccttaaacacaagttgaattgcctaaactaactcaaacacattagataactgtcaagcaagtgctttggtacctcaaatgcaccatatatcatgtttttttcctcaaatgtggctctccactacttttgcatgcattctttgatgcaaattggacaggaaatccaaatgataaaaccttaacaaatgcatatgttctctactttggctgcaacccaatttcttagagttccaaaaggcaatggtatgttgctcgatcttccattgaagcaaaatatagagttgttgcttataatactacaaagttgggatgggtccaattacttgttcttcaacttgatatgtctctcaaacattctccaactatctatcataataatatcgataccatctacattcggtttttcactctcatatgaagcatattgctattgattttcactttgttcaagataaagtttttcctagataacttcatacctctcatatttccactcagtaccaactagttgatgttctcaccaaaccattatcttttcaacgtcttcttttactttgatccaagataggtgtttccaattgaaccactatcttgaaagggcatataaagaatggatctgcaacttctccaacctcgttagtgcgaactcatgattcactcattcaagtgaaatcaaatcctttaatcccaactactttggataactctctctctctctctctctctctctctctctatatatatatatatatatatatatatatatatatataagtaaactttcttagccttgctagaaacaactaagggacttattattagtctaaaagcaatgttgaagacaaatgaaaaaaagaatggataagataatgacaatataaaagatatattgaagttttaaaaagagctaaaaagtgtttaacattataaaaaggcatgaaaaacaaagaaagatgcttgggcactaaatcaatataaagagattattgggagcccttggatgcttaagagctatcttaggagcccttggatgaaaatcaagcattggatggatttttaggaaaaacaaaaaaaattaaatacaagtttctttattttaatttattgaaaacttccctattgtgcatttatatttaaaactttcccaatactataaaaaacttttcaaaattatttttgaaacccttttggatggaaagaaaagttggtgatttgctaatctaaatatagttttgatgtaatctactaaaaagctcaaggtattacattgacataaaagacaaatatagatgataactaatataagtctttcgaattaaagtagcttctctatcaagtaaatctttgtagtctcttttatgtttagtatattttatttatggttgactaaggtcaatggttgtaagcctattaatgttctatagatagttttacacgttaatcacacattgcattcttttatgggttgtccatttattattcatatttttccttattcaacgtattcttgtgaatgaactaatataaatatttaaacaaaagaaaattttgaatttaacttctaatctttaaacttcctattaatctttactctaattagttttagtcattaagaacatattcacacatgtatatggtggattgcctatgcatgtaagtttggcctaggcaagattgaacccatcttgtatatatgttggattagctaattaagcctacaaatttgacatattcattgaagctaagttgaggtttgacaaaaaaaatttagccaaagtccactcaacatgaatttgaacttttctcaaaacaattaattataattcccaacccaaagttgggttgatttaaaagtccaactcaaagagtaagctaagttaggctaaggattaaactcaagctaaaaattaaatttctaactagctatataacttgttaggccttgttatggccaacctgagcccaagccagacaaccttagcttggtctggtgcaacccattcacctacgtattatcagctcattccacatcacaccacatcacaacccataatcaagtacaaggttggttaaaaaaattggggtttgagatggggtgttgcattcccattgtttgttgcaacattttggacataggcagattctccatcaagaaatcattgctcaccatacttgggttatacaagtttatggttttggaaattctacctttattcctccattctttacaatataaattatcataaccaccatatatgtatctaagcctctaaacaaattaaataacaattatatttgagttcgaataagaatttactaatgttagtaaatatacatgtcagtttgataggttggtgggtcattgaatcaagttaggtcaaattggattgagctagctagtaagttatgattaacttttacatcaatttaataaggaatttcctattatattaaaatcacattaaatgaacttattaccttttgcggttgatatacatgtaacaaggaattaattgtcaaatttataaaaaaataaaataaaaataaagcaatatatgactgaaattcattgaaaagttatatcaaaataaaatttcaaataaaaaactcattattaaaaaaaaataattaaattcataataaatctaacattcatttcaatatcaatttatatttaatatataacaaactatcaatatgtaaattcataacgtccactagctcaataaatttagtagttacaatattatacaataatccataaaatgagtaaagaagtttatggaggaagaactagagctagtaactaacataaaatatacatggaagcaaaatgaaggataatgacataatttgttatggaaatgcattaaaagattaaataatataatataaaaataaaaataatatttaaaaattagtcatcatcttgttttaataaatagagttttccaaacccgatttggggtaactgttttacttttagcattaattagaagtggaagataagttatattttagtggcttagtatttggaattataataatttccttcggtacatgacaatattagagaaaacagggaagtttcgttattcttacttacttccggatactttttctttgttagaattttattaataacactactctcttactaagattaaaaaggaatttttagtttcaaaaaagaaatcaaatccaaaataacattcgactctccttagtcttattgaaaattttattttcttggagaacaagaacttactatattttatctacataagtgggacaaaattaaaatttggaagaaaaaaaatgaaaaaaagaaagttgaggtacaatttataagttagtagagtattttaaaattttaactttcctagtagattggctaagtagttctcaatacttttattttcaaattatttcttatcactcaaacataaagtccacaaaatttatttcctacaaatgaaacgaacatgaaaattaggggaaaaaaaaggctagcatattggttttttaaaataatgtgcggatacaatcttaatgtatttttgataaaatcataacttcatttgattttattgtcttgatgtagatccaagaagtgaagcatatgcccttgaaatggaggaatcaaaggttaaaggtaatcattatgatatctcacataagatgaagagaaagttcttaatgctatataaatatgaactcattttaaccatatagatacattttaaagtcatgagagttcctttggatccaaaatgcataatatctacatggttaggagtggatcatcaaaggtgaaaaagtagcacttataattatgtttaactttgtgatgttgctcaatacaagtttaacttatgtcatatccttccaaaaactcattgaagaacattttaagttatcctagattttggagttttttaggtctctttttttattttcctgaagagaacaatatttataggtggagtttggatactttgtttgacatccttatatttgattttattgatttgaaaaatttaattccttgattccattaatttggttttttttttttcaaatgaaattttactaatgccaacaagagaattcatccttttttttttctctcttgtaatttgatttgattttcttttgcaaggcatttttatgtatagtcacttatcattcataattctaaaattttatggaattgaatgttatgtaacactccctctttcttgaacttaattataactattaagttgaaatatctaagttgttaaaaaaaatattaattcaacggtatgatttaagtccatcaagttgatgcatagcaacatcccgaagatataggtcgtccaacaagtggtggagccaaagaagtagataaaaggggcaagatatatatgaaagttagttgggtgggggtacaatgatacaaaagagcttttgtagcctagtggtagttattgattttatggtttaaccaaattatggataaaattataaaattggttaatttaagaacgacaatcttgatattattctctaattcttctttaaaaagatgaaatcaccttcaaaatttgttatgtttaactttggataaataagggtctaaacaaacacttgatttatttatttatttattgaagtcataaaaaaatcatcaattcttcaagaaattttcaagtcttgaagaaatctctccaagagtgtttttttagtcttcacatgagtgtgtaaaaacacgtttttcccatgggaaaatttattttgatattattttttattttttagaggcaaatatttttattttaattatcataaataaattaattacgataattatattatttattgtttttaattatcaaaattaattaagacatgtgtcataatttatttgaagtcattaatatcacataacttctttttatttatcataattcttatttaaaaatttaagacgtgtttttatcaaattttgacatatgatattttatgtttaaagttaataatgtgacatgacttatttttatttagctgataaaaagtgagtctcgccatttcgagtgaggacaaacataaaaaatacaggtctataatataataagtcattatttgactattttaagatatgtgttaattagtaattggacaaaaattttcactatttcaaaatatattttcgtagaaggatacaaaattgattcttaataattaacgtaatttcatattaatacaattagcgtagtttcatattaattatacttatatccagaattttttattttttattttccaaataatacattgttttggttattgaaaaaaaactttatactatcaatctcttaattattgtatgaataattttactttaggatattatttcataaatttaaagagcttttgacataatattgaagaaaaattgaacttacatggtacacaatcatataacatcaattaagagggcctagaagtaaccgttattgaagacaagagctcaagaaaaggaaaaatacctatatatgtattcttttatttatttttgtgaacgtatataatttagaagaataaaaaaagaggaaattcttatatatggttgtaatcgtaaccgatgcatgatagactaaatgattgcaaacgtatgtaatttaatcaggaacgataaagaattaattaagaagattgagtgcagcatacctgaaactacaataaatctagttggtagcttttgaaagctagggtttctaattgtctcatcgcactgagaaatagggccacaaggtggaagacacgcttgttttcccaagtggttgttatgattcagccagtagctatggaagtggagggatgtggctatctacggtagcacttttacctcgtgaaactaagagagttagttacttcaatgggtttattatactttgggtaatatttgagttggatatagttttgaataattgggctttgatattttttgggtttgggtgttaaattaaggatattcataagattatttaaatcaataaagggtatttgtggaaaaaaattatagacaaacaacttgtacttttaatagtagtatggataagtacacatcaagtaacttaaattcaattattttagggtgtagctatagtatgcataaaaaattgcagctaatcacatcgcttgatatgtatatttaagtctcattgctttgcacaaagcttgatccagtgttttgtatcttaatttcatttttttgtatcttgatctcattattggtatctgggctaattttttttacctttgatcctattgtttaataatgtagattttaccatgtactttcaataaccaatatataaaatttgatgaatacctctttggaatcttaaaatttttccattttcttatttcaactatcaatagtattctttcctaaaccataagtagcattgcttaaataaaaacatggagtttctaaaaaccaaagccaacaaaaaaaaaaaaaaaactatatatatatagaaaaattctatttaagattgaatcttcaccattcaattaagaaaaaaagataaccacaaaggaactatacatacatgataaaagagttttattgatatacatgtaaaaggaagaacccatcaactaaataaaaatattaagatgaagagtttaataataataataatgacgatgatgatgatgataacaaaaaaaaaaaacctaaaaatacctatgtaactagttcataatttataatttatcaaaatattctccatattttatgattttttagaataatttaccaaaaaaaaaaaccctaaaaataccttgaatttgttttaaaaaatataatgattttcgatcaaattattatcattatttttaactaaaaatttgtcaaacatattttttttttttaagttaggaaactacattttttagtttcaagaataaaaaaataatttttaaaaaaaatagctttaatgcatatagatttttttcttctttatctttgccaattctactaacatgactagttaatgataatacatgatcacagtggaagcacttccaagtatgagtacattacttaaacatgcatactagttaaaatttattatatttcaaatagtaacctcactacaagtgatgcgatgaaggtaaggaaaatatagctaatgtattaaggtgccaatatgatctagtatgaataatttaactaagttaaaaaagaaaaaaaaaaaccctaaagtataaaatatatggttaaggtagtaaggtatagaaaatgttatcaagatattcatgtatcttagatattaaggtactacaaagtgattaaaatagtatggaaaaaggtgaccaacgaacgggcaaaatgacctaaatattaaggtataaaaaagtagcttaagtactaaagttttaagaaagtgactaaggtaaataaatgtgactacatagtaattaaggtatagaataattgatcaaggtataaaaaaagtgacatagtacgaaaaatgtgatctagttatggttatcaaggtataaaaaataggaaaaggtgacttttaatttgctaatttgaaaatatatatatatatatatatataaaaagaacttcaacttttatgaataagttttatcttcatttatttaaaaatattttaagatatatgtatttttcgtaactcaaataattattttatgaaataaccttttacttgataatattaaataaaattatccaaaatgaatttatcatataaaagtgttttacaaataaatatattagggaaaaatgaatttttatgcactaatatgataaaatatagaaaaaagaacttcaacttttataaatcagttttatattcatttatttaaaaatattttaaaatacaggcaatttctaaatttcctgaaatatcattttacttgataatattaaataaaataaaaaaagttaatttgttattttaatttaataaaacatcttacaaataaatatattataattttttattatttaatattatatacaaatcattttgaaaaaattattcagatcttcaagtgataaataaaattttctaattctctaattaataatgattttaaatatttgtagccccctcttagaccaaggttttttttttcattattcttttttttttcttcttctcaaacatgggaggagttggcagcattttagaggagtggggaacgacttcctaaggttaagggctgcatgggacgcatggccaaggacaccaccaccttggcaaggtggtggttgagatggtgacatttttgctgaacgaagagcaagggaacgggtataaacttggagaagaagaaaagaagagagctgaaaacagagagctgggagaccagggagaggaagacaaagagcttgagaagaagaaagacagagcaaaaggaaaaggaggaacataaggtaagtattaaccttgatttcatgtctctattttttctactgatttttgcaatattttatgcatagttcggatgtgcatattgagccatacatttggtctattagtcggtcccaaagatgactttggatttgttatcattgctttatctgccattgttattctcgcgttgcctgctatcatttttcttgctaaaaagtaacctcattttgttttaactttgttgtgaaaagtttgagaatcatttttcgttcatgtttgatttaatctctcccacccgatcagcaagctcattgataatatatgcaatggcgcttctactgatgtcatgtgtcgtttattatgttatgctctgtttctggagactctctttgctatagttttcctctattttcggttcttatccaaatgcattgagctataaggaagaagagagagcggtggtctctc

SEQ ID NO: 12022 - DNA, 3723 bp, Vitis vinifera
  Intron number 17 from transcript GSVIVT01033801001 (locus GSVIVG01033801001) derived from phytozome v7.0 (chr-ID chr 8; pos 17717802 to 17721524)
gacaaggttatacaagttcttactaataatataaggaaagatctcatctatattgtgcatatcaccgaccatagaatatgcataaacatgtctcaaaaatatcaaaatcagatatgtttcattttatagtttagaagtaagatcttttgcatacatttgtttgacatatttttgctcctgtggtcgttactgacttgtgttcatccatattagcaggttactcttaatgtcgttttcattaacaaattaacaccatttgtgcaacattttactctgtagagttcgcaactcagtgggaaaattttaatgcatgcatattaatttatgtttttcttgaattggtataactttttttcatgagcgtgttgctgtaatttggaggtacataattttagtttcaataaaaaaccttgagatggatattttgttagttaccaaacagcttgatcctttactactaatgtgtgttggatcaagtgtgcaactcaagaaacatatatgcatggtagaattttttattttttattatttatttatttatttatgaggctaatgctagaatttggagggatatgtctactttcaaccaggatgcttaagatgagtatttacttaacggctcaatccagttccactcgtgcactcaatcaagtgtgcaactcttgaaacatgtatgaacgataatgtagccttttcagtcaagatatttaaggcaaatatttactcaccacagcttgatccagtaccacttatgtgccctggatcaattgtgcaactcttgggacatatatgcagaataatgtagcctattttggaaatgcatatggttaaattaatattaatacttccatctgacataagtacaaagttgggattagaagaatctgagttttgtcatttaaactttaaaaaatacaaggattcagacactaccatcatatactttaattgcatgtctcatgttgacagccatgtcttttacacggttcattcctacatggaatgtaatggggggtagggggattgaataggtagattagaagaaaatttgttacactgcatttagtttgtgacacaaataaaggttttttttggtcttaatggggttgtttatgtcagcaccatggtgcacatgctgccctttgttgacctgtcaatgcagtgttagaggaatccgaaaacttgttttattctgaaatctagaaactatagtagaggtagattgcaagcaaaaaaaataaatttacactctatatggtttgtgattcaaatagagaaggaaaaggaaaagaaaagagaggaggggaagaaaaaagaaaagaacgctatggtagtttccttactttaaaatgttatacaaagaaagaaatggaagaaaagtgaggaaaagccttaggcatctttgttactttgctaggcagtgtcaatgtctttcatgatatactagttagttatttgctccatttagtgaagtgatgtacccaaaatcacccttatgttttcactctaaatatctagactttgaggtattttgatggtggaaaaaaaattcttcttatatcattttttttttttgttctcattaaaaaaaattccgtggacactttcaaaatctttcttttcttccttgcaaaaaagagtggtaatctttataaacacaacttctgaaaatttgtgctcttatgcatttactttttctaaattaaaaacaaattgaggaacagtgtggaaaacacccaatgaagaccaaaagaaaaaggaagaatgttcaacaaaagtagttttgtaattttagcatttcatagttttagttggaacccttttttttttttctttactttattagaattggtttggaaatagagtcttagtcttattagggaaaggagttccatgagtctatatatacctatgtagttgtttttttgttgataatatttattgagaattgagtagctattattaaggcttggttgcctttcccttggtgagattgtttagaaagccctaggtgtgattttctagggttttttttttttatgattaccaaggatatatcttttcttttctttatcttctttgatttcttatcttattattcaataaagaaaaacttctatagtgctggaactttttacaatcttgcatcacaaatacgttcatctcattgaattttgtgagtacaaagaagttaaaaaggaaaccaaaacaaaaacaaagtatattccaaaactgcagtacacaacctagatgggtaaagagacccttacaaaggatatcaattgcttggccttttggaataatagagtcaacctcaatatcaaaaggtgaaaggcttaaagcttaatcctacaagactcgctgaaaagcttgcatctttgcctcaataactatgcattctcttgccaatttagaaaaagctcttagcattataccacagtgatctttaaatactcttttaaacctaagctatctcaagttacatgaatacttgtctttagctaaaaggaatctattggaggcaaaatccattcaggttgagtttccttgcttaacctcttgaaaatctacaaataagagtccaatctgcttcaacaagctcaaaaggatacctacaaaggaattagttgatgagaacttagatctataaatgagatttttgtcttgcattgacaagtcaaaagggtattcacaaacacatgggtgaccgagttccacaaagaactataaaaataagttgagtcctaattataaaaataaaaataaaaaaaggttgagtcccgtatacccgttaaacttccacttgtcttaagcatcatggcattcatctcccacaaaatagttcaaccaaagtgaggccagccacacaccagagaatttggcattctcaaaggccaccaataccctttaatgaaatattatcactattgtcacacttcttgattttagagaaggggaggaggagccagagtcccaaacatatcattggtattaattttcttattttattcaaatcactagaaggccttcatcctaagacttgagttctggtaggaaaaacatccaattagtagaagaagctgaaaaagaattggcttagaatatcatggttgttaaaaacttataatacacgatgaaatataacaatatgataacctttttatggacatcaatacgtatggtaattcgtatcttatcttaaagtgtatcttatgatatatatacgatacatgatataacaatacaacgatacatacatatttaactattttccataatttttaagaaaaatcaaattgaggtttttctttttttttttttggttaaaaaagtttattatattaattgtttaaaatgtattaaaagattagaaattgatcattaaaaggagaaatgggtaaaataatttttcaaggtaagtacttgggtgttttgtttctaaggtagacatgctcaatgcataactattctggaacatccacatattgactatggttccttagaaagtaaattgacttcatcttgaacaggacattcattcttgtatttgtactatatatttttctggtttgctgcttttcttttcttatttttattttttctgtacctgctgtctgtaatggtcaagatagttacagtgtgtttatgctaccaaaagtgcatatgacaggcctatatattttgacattttaatcttatattatggaatttatttttcaggat

SEQ ID NO: 12023 - DNA, 10613 bp, Vitis vinifera
  Intron number 2 from transcript GSVIVT01022341001 (locus G SVIVG01022341001) derived from phytozome v7.0 (chr-ID chr7 ; pos 18689700 to 18700312)
cctggcaaaaaaggtacttttcttcttctgatggattttctatgcgggttttcattttccttttttatttgaatttagttgtttcggagcagaaattagaaccgttttgcagaaacatgacaatacaattatcatgattattatttttatttttatgtcggttttcattttttttaggtttagattgttttatattatttttatttttaaaagtgggtttccaatttttggtttcattcagttgcgtctgtggtgattatcgaatttgcgctttggttgcctttgggctttaattttggctgatcttttctaatgagacttttttttcttcttccccttccttttttttttttttttgctttgtggttttcattcttagcatgtattggggtttattactttgctggttttcatagtctttcttttttattgttctaatggaagctttaatacaaacaaaataatccatgcaaagatagacaaggttttaatgtgttttgatcaattatgcttacatgcacggatgagagagaatcatctcattataccacggataatattgcaaaggacaaaaacatatacaactattggattattgaagtatcttgtctctctatccaccacgtatagtttttataagttcgtcatgtattggattatttaaatatctcatctctctatccaccacgtatagtttttataagtttgtcttcatcttataaccttttccttttatgacctttaatatttatagagatattcataataacattccttattctataagaaaatctaatattacaataaaatatgaacttaagaaatattttatacaatattcttaacaaaaaggaatgtatattttgatagaatttggggcattttccaacaatctttactttggatcaaattccattaagtcaatcttccatctttccatgatgcacactttttgtgtcacatccctaagagagaacaattgactactcctttaattaaaattccttttgtcatcctcttgtgtgctctgttctctttgattcttctagaaatctttaacttgggttctgatactagtttgttgtgttagcgaaaactttaatgcaaacaaaacaattcacacaaagatacatgaggttttaatgtggtttagccaaccatgcttacatcaacggatgaaagataatcatttcactatcctataaaaactattatagatgacaaaaataaatacaactatttggttcctgaaacattctatgtttccccactccttgtatctataccctaaaccacgagcctcttactccactaggtgtttcccatttttcctcacatttctatccatcttataaagtttttacaaatctatctctaactcatgaccttttcccttcatgacctgtaatatttatagatatattcctaataattttccttattctatgaagatatataatattacaataacatgtcaacttaggaaatattctatacgatattctttgcaaaaaggaatctatgctaattaagaatttgagacactttcatgtgtattgatttgttagcattttacaaagagcaacaaaaattatacaagtttgactttctaaaacaagaaaagaacttccatgctaacaaaatggttccttggttgactgagtcagtgtgtgagcagatatggtgttttgatttttaaaatcagatgtaaaatcccatttgttaaccaaattatatatatttaaaaaaaacatgtatgtgtgtgccattatgaccaattctcataaattttacatggtttgtggtgcaatatatatagtgaaaatgcttataatattttaggcataataatgaactggtataggataacaagtgacacatttatattttggtgatatgcttgatcaaaatgaagctttatgtgtggagacttggaagctatatagtgaaacttaaaaatctaccctttgcaaatattagtactgctgatttaataacaaaagagaatatttagagacttaagggctgtagcatgtagacaatgttccagcatgaccacttaacttaagaatgagccatgatgtgtggttttaaggagagctcatgatagatactggaaggggttctattactgtggtttaatctgattgggcatttaataagatttcatgatggagcatcaagattaaggttgtgaagggcataggattggaattcacaagaagtgcttgtaaaattcctgcagtactggcatatctattttccaataatttttattttcttgagtttcatactcttatagtttctgcttgtaatccactggagttctgaaggtccttttggctgaaagtttattatacttctctcttcttattttctaagactttttagtatgagttagtggcatcttattgggttgcaaagtagtgcttagtgttttagaagttttctccttatgaaatttgaattctgaaatagtttttatgttttgtccgtgctgcttttagaatttttcttgactagtaagttttctaatctgtagctaaatccaatcttcccaaattaattgagatgtgtaatttgattatttagctttgacgatttggggcctgtttatgaaggtattctcacttccacataatgtcaaagttctcaaagtattctttgtattttcaattgttgctcaaactactgtaaaagaaagaaacaactaaaaacacttcaaatttgtctaaaatccaatctgttgttagaacaatttctaaaaaaactatttttttatcaaaagtttgttaaacatgttttctgttctaaagaacttgaaattattttcatgaatagtttccaaacagggcctagttttctcatttcatcttgctcttaaaaacccagctcttcttcttattcttatctttatttcatctttttaattcatagtactgttaaaatcacaatttaagtccacaacttgtgatcatttgttttgttttgtttttctaatagcctgcttttgctacccttaaccactttccacgtttaagcttttgacctaaacaccctgaatcctgaactggttgctttttagaaatttcagtagcacattgttttgcctttatgaatttcagctacatatgtcattgttcctatgttatgctactcatgttatgtctgtagaccctaaacagtttttatgatttcacaaaccaaaaaccaatcaactatttcaacaatggttttgtttaaaattctggatcttatattttggcccattatccacagtagtagggaaatctttaccctcatctggcatcaactttgtaccaaacaagccttgaagaatgagtgcttacaattgcagtagtgtctaacatagttttgaaatagtatgacaagtctgagaagaatgattcccactaggagaagaagcatttctgaggaaaattattagttgtgtatattcatgcgagagcaaggcagaactacagcaggcctccatggacaggctgtcaaattttatcttaagcctgataatgaaaaggaatttgttcaggatggggggacctagttttggtattgacaagatttttcctttgacttttagtcttgctactttttggtgagttataaagagcttatttttgtcagtcccaagattattatatggtatcaaggtttaggtataacatgcaagaattttctggtgaagaacaacctgaagtactacttgattagttcatccaagatttcacttaggtgaaatattattttctggatgagctatgcacaaagttgtggttgaactagctagtacatagtttcatttggttgacatggctgcttctcatgctaaaatggcttaagcaaaatttgaagtatttgaaactccattggaatcctgttgttgatactatggatctacttaataggggagagtggggatccccttgtatgctgacaataaaaattaagtagttttggattatggcaaggctcactatgttttttttccctgtatgggttcttttattagtcagtgtgtttctacagacttagataaggaaatcctcatctgatcttttttagttgttgggccaaattcttcatttgatcctcgcttcatagcagcactagggctttttattctttttttaactagttctggattatggactggataattcatcttcctatatggattctctaattagaaaatatcattttaagtttacacgttttagatattgggaagtgaggtaagtaagtcgtggaactgatggattgcttttcctatgatctcctttcattgcaaagagggaagccatggctatagttcctttacaagtatatgcatgttctcttagtttgatattagaataaagggcttatactgtttgtttgggatgctgttctaattagttctgttaatggcactctaggcattgcataggtgatttgcattacatggagaggagaaggatgagagaatcctttaaaaaaatcccaagcctactattgaaattttgaaatcactataattatgtttattaatggtttggtgattttagagggttttcttcccttggctcctagttaatatttcatttctttggtagctttcatatctcacatgcatagaaaggtttgccatttttaattttaatgtgatacattgtttatttgtaactgacaatgaagtagagttttaagaaagctctcatattagaataaagggcttatactgtttgtttgggatgctgttctaattagttctgttaatgacactataggcatggcataggtgatttgcattacatggggcatttggaaggagaaggatgagagaatcctttaaaaaaatcccaagcttactattgaaaattttaaatcactataattatgtttattaatggttggtgattttagagggttttcttcccttggcctctagttaatatttcatttctttggtagccttcatatctcacatgcatagaaaggtttgccatttttaattttaatgtaatacattgtttgttcgtaacagacaatgtgtgtagttccaacgggatggtctagccaagagagcttgtttgtagttgtcgtagtgtagtttctggtttttttttttattgttgttgtttagttttatctttggtgggaggattcctcatccttctcttgtacttcttttttctatcaatatatctatttgttgtttcctataaaaaaaaaaagaagtagagttttaagaaagctctcatatcaatctactttgtcatgtctggagtagctactttatgcttgactaagccttgtttaagagtgcttctaggagggccaaaagcgtttcctaatttttttttctaataggcaaacatagagtatgtattgaaaaatgtcgataatgaaggtcacacccttaatacattgggagtagacaaagggtgctgaaagactataaggaaacaaaaaaattaatggttccttatataatcaatgaaaagaaacaaggaaacatcaacatccaaataacctctagatgagggaaacaaggagtaagggttgaaccaatcaccctaacccattgaacattcattttacacttgccaaatagttcaaaacaaatttggagggatcaatctccaaaccttaccttcttttcttccccccaaaactctccttccgcctcaataaagtctctctaaccaacttaggaagcacaaaagagactccaaaaagctccaccaccaattgccataaactccttgccatgccacaatggagaaaaatatggttaactggcttcttgttgcttctacacaaacaataccagttagctagaggcctgccttcctcatcttcttaattggttcatcattaagatcttctctcaaacaatctcccaaccaaagacacgtttttagaggccctcgaacatcaaacttcttttattgggaaagaaattgcaaaagaagcttccaaagaactaataaaagatggtacaatatcaactagatgtactttgatcttggcaatcagtctcaagcttatgagttgcaactacaacttggtgagatatgacaaggaggagacaacatcaccaagtatttcaattgtttgaaaaggctatggcagtactaggagaaagcctctgagaaacaaggaaaggtgattcaaaggtctcatgggtgagaagagtttcaaagtggagaaaaaggtttttaaggtcaagtttgaaggcatctatgggggtctttgtatctcgattatagagaggctgcaaggaaaagctttttcggtggcttttgaagaggagaaagtcatttggataatggaatagttgaagaaagctgtggagttggtaggatatcgaggtttcatttgaaagtttaggggtaaatcgagggcacatttattggaggtttgtttcaatagcagaggaagattcattagaattatggagttcgttacaaacaaaaaaactacttctctgattgtgcctgaaggtgtcaaaggttgaggatgggaaaccttaaggaaatcgttgtccttaatgtcggagtgctattttctttttgtcaatggaatagagaaggtagaagtagtgatgatgaacaagggtgggtatgggatggtgtagtgggaaccattcttatgctaaagttgtggaaaaggagggtccaaggaaaggagctctcttgccagttggaaagtgggctaaggttgtgatctttgagtgccaaggaaaagttcaagattggggtattgctggtaaggctcttgcgagaatgatgggggcgaggggaatgatctccattaatccttttacaaattacaaaggcgttttcttcgtggactccgttgaaagagcagagtggtttcaagagcgaggaagattggtattgagaggaggaacagttttttgtttgaggaaatgatctccaatagaaaatacagtggttcttggaaaatttaggaagggttggatagaattacggggtcttccattccatctatgggatgaaaaccagttaaagttcattatgaagaattgggggaaggtgacagaggtggattgagacaccttaaagctcgtagatttgtcaaaggtcaaattgaaggtggagatgaacctaaatgtgatgttgccaacactattggaagtgatagatggtgcttgggtttttacagtagcaacatcagttatcagaggggaaggagaagggttgcagcggaggactaagttaactcattgcagaagctagttgctttcagtgggagttgatgtgctgaaaggttcttcacaggaactgaggacacatggcggggcagaagagaatttggggaacaactgccacccactttctcttgtctcacatatcatttcaaattcaaatgggaatattaagcgggttgatgacttaagggagaaggaagcctgtgtagaaggaaacttaggctcatctcggaggaaaaacccaagcctgtccaaagcctttttcaatgatggacttaggttatttaagggcgagcccagttcaagtagggcccattccgaggaagacccacttcacggtttagaccttgggccatctttttctgaaaagcaagcccttttggctagccttaaagacaaaagcttgtgctacaacataggtaactcgctgaaggtttctctcccaaggaatcttagctcctctctccatgtgtcgaagcctcatgttagtccagacaggaagttgggcagtagttgtgtgagaagtttgccccctacgcccttccttgagaagccgccaagctctttggatgggagcgtcgttgcgagtgcagaaaattgttttcaagagagagagctttcttcgaaggcaaagattttcttagggagagagagccagagcttatcccttatggagagatcaaggcagtcaaaagctcgagggtcgatggaggaggcatagggagtttcgagcccttgtttgggggatggcccaagaggggttaaggttagagggggtgctcttcactgtaggtgataagcccaagtatagacttctactccattctctatggttaaaggccagactttagaaagggcttttgagctttcttcttctcctttatccccagttgcttttctttggtccctgggtctttctgtgctttcttcgatccttcctttgagctcttcggattgtcttttgccttcatcggccaatcctttagggtctgagaagtttccttcaagttcatttgggggttgttcctgtcccaaaggtgtggtgtctccagtaagcaagtgtagccaagagttagagggcgtttcttttctcaggttacctcaaaacaaccctagtggagtttcttccctagtgaggagtctgtctgtggagtttggtcctgctcagttggaagatttccatattgaaggcatctctttttcaaaattagcttccattaaatcggttttgtaaacgttgcaaatcaaaattgtcaaatataatgagagtggagctcagatggccaaaagcaaaggcaactccatgcaacaggtttattccagaaggaagaatagaatttcttctattgcccctaggcttctttaggtttttgggttctttggtattttctgggttttttcaataatgatgaaaatcattagttggaatattagaggtcttggttccagaaagaaaagaagggtcatgaaggattattgtatttgtcatgaaaacttagatgtggttctgttgcaggaaacaaagagggagtcttgtgataggaggtttgtgggtagcatgtggaaggtaaaaaataaagagtgcgaattctcccaactcgcagggcgttgggaggagtggcaatcctttgggatgctctgaggtttaagtgcttagaggttgttctaaggtctttctctataacagtcaagttggagtcaaaggatgatagagctttctggtaaacttcggtctatggtcctagttcgtcttacttgagaaaggatttttggttggagtttcatgatctttcaggcttaacttttccaaattggtgtgttggtggggattttaatgttataagaagaatttccgaaaagttaggggattctaggccaactacaagcatgagggattttgatgactttataagagattgtgagttaattgatcctcctcttaggaatgcatccttcaccttgtcaaacttgcaagaaatccctatttgcaaaaggttggatggattcctatttctaatgagtgggagcaaggtttccctcaaagcatccagtttgacttcggatcattgcctaattgtgttagacaccaacccttttaagtgagggccaactccttttagatttgaaaacatgtggttgatgcattctgtattgaaaaagcaccttcaatccccaaataattccagcgcattattattccaaactccacattccaaaacctaccgaacccaaatgtatctaatcaactcttgacatagatttgagcttggtctcttgtaaacaaaacatgccttgccctttgagacctaataaaatatttgatgacctttctcttgctctttgacattccaggaacaaaattctcttggcctagattgccatcataattcgcagagcattccaatttccgcatttccctttcattgtgagagaatcctcccatagtgtgcttcctcgaggcattcagtgttgtctttctcttagcctcaaactttctcaataaggccatattttcctgttaaatacctttcgttgacctttcctaaaggttaaaagcattcctaataaagattaagcattaggcaaaaattgtaaaaactgctttaaacacattaagagtggtgctcccaagagaagcacctcttctcttgaaataaaaaacatgcagggtactaagattcaaataaaatgtacacacatctagcatattctctctctcaaaaaactcttctgtttttttttctctctaccatttggattctctctacacaattgtaaatgagagatcaatgagagaacatggttgaattacaaatcttcttatatctcattaagtttttaattattaaatcaatgattgtcttttatttattaagttaatatgtaaagaagaaaggtttttttttcctctttggctgtaatgaaattattctcatcatgcttgtttttttgtcaatattgattctttttaagtctcttgaaaattttgttggcttaataaaacaatttttatttagttttttggatgatatagatactttttttgacaattacaatatgctcacgctcacatacgcatcaccaaaatacttttaagtgaatattaaagggacttgtctagtttatatatccagctaactgcttctccatacaagcactataaactaaaaatacactcaaacaagccctaaagagtttccatttaagttttgtatgtgtataaacatactacagttgtgaaagggcttgggttgattacatctgcatagtgcaactgagaaatttctttaaaattggatttgcattttgattgataaatgaaacctgcaaattgatgatggctatgttgctcactgtttcaggtatctcactaacc

SEQ ID NO: 12024 - DNA, 12267 bp, Vitis vinifera
  Intron number 7 from transcript GSVIVT01010856001 (locus G SVIVG01010856001) derived from phytozome v7.0 (chr-ID chr1 1; pos 16800654 to 16812920 reverse strand)
aacaagggaaccccagtatgtaacttcataatcttaagcttcttttagtagtattttgaagtgtgaattcttttttgagaaagcagaaaaaatcagtgaacttctgttagaaatgcatcttattcatatctgttcagtgggaagtgacctaaaaaatgaaaatacaaatacttaatttctttttttttctggtcaaaacaaaatgtcattacttttgaagccagaaattcaacctcttcccaaatgtttagtcgcactaccataaccacaaacaatagagccacacagccaccactatacaccttcagaattaccacttgtgtgtcgcctctgttgctgtgtcactcttccaagtctgctaactctgcaaattctagcaccacattaacacgataacaccaccacagctgccaccagatatgtcttttcacaatcataaacaataataaacataagaaaacatcataaccaccatcaccacctccacttctgccaaaactaaagtcaccactgacaaaaatcaccactccaataaactaataacactaccacaattttacaacccaagacaaccgtggcatcctccaccactacaaccaccacctccagatttctgccataactacgtaagtcctgcctcattagactaaagcagggactgggttggggggtgtggtgtttgttgtttgttattagagtagatataaatttcattatatgagaaataacattgaatgctccttcttttgggttcctcgctcaactaataaagccgcaaactagttagacaagtaaggagcaaaacatttgatatgttttgttggagaaattttttatggaggttttgtagtgtgtataagttgaagaatagggtttcacgggaataattttctttcattgagactattcttttatagagtttacagcatatacaaatccttcaaattaggaaactaaatcactgattaaaaggaaagaataactcctaacaattacttttctaaaaatacaaagattgacaactaataaataactcataataattactttcctaaaaatacaaagattgacaactaataaataatttacagctttacaaagttatttatttccaaatcagtttcggttttccaacactctccctcaagctggcttaaagatatcttccatagccagcttgccaactaaaaaatcgaattgcctcttgtgtagtcctttggtgaagacatcagccacttgttcctcagtagggatataggtcatacagaccaatccgttgtctatcttctctttaatgaaatgcttgtccacttccacatgtttggtgcggtcatgaagaaccggattgtgagctaatgaaattgctgccttgttgtcacaatacaacttcataggagatgaacctgtcatctttaactcttccagtaatcttcttatccatataatctcacaaataccatgagctacaactctaaactcagcctcagcactacttctagcaaccacgttctgtttttcacttcgccacgtaaccaagttggcacctacaaatgaacagtacccaaaggtggaccttcgatccactatgcttccagcccagtctgcatcggtgtaggtttcaatttgtaggtgtcctcgtgacttgaacagaagacctctacctggtgtcccctttagataccttagaatcctgtaaacagcttcaaaatgctctggtccaagcgcatgcataaactgactaaccatactcactgagaatgctatgtcagggcgtgtatgggataggtaaatcaatctcccaacaagtctttgataacgatctcggtccttcacattcttggcttttgtaggctgcagttttacatttggctctataggtgtttcagcaggcttacatcctaacatacctgtctcatcaagaagatcaagaacatacttccgttgatttacaaagataccttctttggacctagcaaactccatcccaagaaagtattttaatgccctcaggtccttaatctcaaattcctcagccagtttccccttcagcttctttagttcattgcaatcatccccagttaacacaatatcgtcaacatacacaattaagatgactactttaccttcatttgaatgtttgtagaacatcgtgtgatcagcttgactttgagtatatccataatgctttattactttgccaaagcgctcaaaccaagctctaggcgactgcttaagtccgtataaggacttcttcaatttgcacactttcccaactccaaaactttcttcaaaacctggtggaggactcatgaacacttcttcctctaggtctccattaagaaagacatttttaacatccaattggtgtaagggccaattggaatttactgcaagggacaacaaaactctaatcgagtttattttagctacggaggcgaaagtctcttggtagtctatcccataggtttgagtaaaaccctttgccacaagtctggctttgtatctctcaacacttccatctgctttactctttattgtaaacactcatttgcaccctacaacttttttttcccttggtaaatctacaacctcccaagtgccattcttttttaaggcattcatttcctcaaacactgccaatttccaactcggttcatctagtgcttcttgaatatttctaagtaccacaagttttgaaatatttgtagtgaatgctctatagttgtcagaaaggttactataggagatatatttggcaatgggatgtttagtgcaggctcgggttccctttttaagagcaatagggagatcaaggtcaaggtcttgtgcaggaacaattggggctaatcctaaactgggttcgggtgcagatatttctggacttggactaaagtgtgatggtaaacttagatcagtaatagaagaagaagaagcatgtatatgagtaggaatagaaggagggttacctgagacatttagagagccattgcccagggctttcggttgaccatgtgttgggatgatcggctggtctttacttcttccagggacttttttccttgaataaaccacatgctcaagattgtttctattttttttcattcgtagtatttcttcttctaacagaccaatttcagattcggattcagtaggcttagtttccttattttctttttcaagagagatatcaagaattacattaggcaaaggttcaacaatttccaaaaaatttggttccactaatttctccccctgaagtaaatttttggtaaaatatgggacattttccataaaggaaacatccatagttgtgtaaaaacgttttgtaaggggattaaaacatttgtaaccctttttattaggagtacatcctacaaaaacacatttttctgctcttgggtctaacttagatcttgacctttttagaatgtgtacatatgcagtgcaaccaaataatttcaaaggtaattcagaattaattcgagattctggaaatacctttttcaagcactccaaaggagtggtatactgcaaaatttttgtaggcatcctgttgattagatatgaagcagttagtatggcatccccctataagtattttggaatattcatgtaaaacatcatagcccgtgctacttctaacaagtgttttgtgaaaagagagaaaaaagggagaatccctaattattgttattgaaaagctgtaaagaatacacattggacttgggtatatatatacatgttagtgggacccacaatacaataaggaaagaaaaggaaaagaaaaagtaaataacctaaataactgtacactatctaacactccccctcaagctggagcatatatgttatatgcaccaagcttgttacaaatgtatttaattctaggacctctgagagatttagtaaaaatatctactagttgatcatttgaattgacaaaactagtcgccacacatcctgatgcgatcttctctttaatgaagtgacagtcaacttcaatgtgtttggtcctttcatggaagactggattgaatgcaatatgcaaagcggcttggttgtcacagatgagcttcatctattcatcctttccaaatctcaactcccgaagaagatgtttcagccatatgagttcacatgttgccagagtcatagctcgatactcggcttcagcactagatctagccactacatcttgtttcttactcttccaggatgttaggttacctccaataaaaacataatacccggaagtggaacgtctatctgtgggtgagccaacccaatctgcatctgtgtagccaacaacctgggcatgacctctgttctcgtacaacacaccttggcctggtgtgcttttgatatatcgaagaatgcggattacaacatcccaatggctatcacatggtgactataggaattgactaacaacacttataggaaaagaaatgtctggacgagtaatggtgaggtagttcagtttacctacaagtcgccgatatctcccaggatctcctaaaggctccccctgtcctggtataagtttgacatttggatccataggagtgtctaccggtttacagtctaacataccggtttcttccaagatgtctaaagcatacttcctttgggaaagaaccacaccggatctggattgagctatctcaatccctaagaaatacttgagtttccccaagtctttagtctgaaagtgggtgaaaaggtgttgctttagtttctgaataccattctgatcactgcctgtaatgacgatgtcgtccacataaactaccagataaatacactgccccgaagagttatgatgatagaaaacggaatggtctgctgtactgcagaacatgtcaaactcctgaacaacagaactaaaacggctaaaccatgctcgaggagattgtttcaagccatatagagaacggcgtaacctgcacactaaaccagactccccctgagcaacaaaactaggtggttgctccatataagcttcctcagcaagatccccatgaaggaaagcatttttaatatctaactgataaagaggccaagaacgcatagcagccatggagagcaatagacaaacagaagctatcttggcaacaggagagaaagtgtcaccataatcagaaccataaacctgagtatagcctttaacaactaagcgggccttaagacgatcaactggaccatcagggccaaccttaactgtgtagacccaacgacaaccaactgtagatttacctgagggtaaaacaacaagatcccaagtgccattggagtgtaaagcagccatttcatctactattgcctgtcgctagcctagatgggaaagagcctcaggggtgctcttgggaagagaaacagaagatatagcagaaacaaatgcagaatagggtgaagataatcgatggtaactcaaaaaattgtaaatgggatgaggattacgagtagatcgattacctttctgaagagcaatgggtaagtcagcagaaggaggcagagccggggcaggagaagccgaagggataggaagtgattcagcaggtacctcggccaaagaaggaggaacagcgacacgatgacagcgatgataaacctgaagtgggcgagaaggcactgcatcaagtggggagataatgggaaggggtaagacttcagaaataggaagagacttagagatggagaagaacggtgagtcctcaaagaaagtgacatcagcggagagaaagtagcgatgagtctcagaggaataacaacgataacccttttgaagtctggaatatcccaagaaaatgcattttgtggctctggtagaaagtttgccctgtccaggagtgagaatatatgaacaaagcaagtacaacaaaaaacacgaggaggaaggaaataaagtggttggtcagggaaaagaagggaatgaggaatctgatcgtgtaatacagatgagggcatacgattaatcaaataacatgctgtaagaacaatgtccccccaaaaacgaaaaggaacatgactatggagaaggagagtacgagctgtctcaacaagatgtcgattcttacattcagctaccccattttgttgaggagtatgagcacaagaagactgatgaatgatcccatgttgggacataaatgaagtaaatggtgcagaaaaatattctctgacattgtcactgcgcaacacacgaatagaaatattgaactgggtttggatttcagcataaaatttctggaaaatagagaataactcagctcgattttttattaaaaataaccaagtacatcgagaatagtcatcaatgaaagtgacaaaatactgaaatcctaaagtagacgcggtccgacaaggaccctaaacatcagtgtggacaagttcaaaaggagactttgcccgattattcaaacgctttgggaacgagacacgagtatgtttcttaagctgacaggactcacacgcaaacgacgacaaagatgaaaaactagggaccattttctggaacttggatagattagggtggcccaggcgactgtggatgaggaggggagcatcagtggaaatgcaaactgcaggagttgaaggtgaggtgaggtgatagaggccttgagactcacgtcctatgccaatcgtcttccccgtactccggtcctgcaaggtcataaatttatcagagaaagtgatagaacagttaagagtgcaagttattttgctgatggaaataagattaaaaggacactcaggggcataaaggacagaatggagaggtaggaaagggagaggatgagtgaaaccaaaacctttagccatagtttgacaaccattagttaaagtaacagtaggtaaggcagaggtagtagtaatagaagagaaaagatccttattaccagatatgtgatcagaagcgccagaatctagaatccaaggtccaagagaagatgtgtgggtaaaacaagcagaagcattaccagtctgggcaacagaagcaacagaagttgacttggtgtcccctgatagcggagatagtcatcatactcattgtcagtgagggaaataccctgagatgtggaggaattgggaggctgaggcgactgaggatcagatgactgggccacttgggcagtgcggggaggccgcccatgtaactgataacaccgatcacgtgtgtggccaaacttattgcaataggtgcaatgaggacattggcctctacctcggttaccactgcgtcctcctcgagagttagtttgagaaactaacacagaagaatctgaagtattatcagatggcaaagtctgagtggaggagatacggaggaggcaagcaaacacatcatccaaggatggaacggaggaactgccaagaatctgatcgcggacggtctcgaaatctggacggaggccaataagcgtaagaactatgaagaacttgtcaatctgtgttcgttgatccccaacatcagtagtaagaggcatcacggtcaagaattcctccttaagagaggcaatctggccaatataagtagataaatccatgtcttgttgtctgacattgacaatagaagaagccaccttataaagacgttggatatcattcgtgtataaccctttcgccttattccaaaatttaaagcatgttttgtaggcccgaaaatgaagcagaatcttaggatcaactgattgccataacacactacataactgtacatctatcttcctccattgtactatgtcaacctcagggatatccgcctcctgcgtaacaaggtgatcctcataaccttgacctataaaccaaagctccacaaaggcagaccaggacaaataattttcgctgccaaccaatttctccgaagtaatcataggagatccaaatatgacagaggaaaaagtggaacttttagtagccatatctacttatctggagaacgaaatatgtttggatcgaagagagccctaatacggctttagatcgcggctgaaagaagaaaaactgaggatccacggctgtgagagaccaaataataaagaaaaacaaatgtggcactactggaagggtagaagaacacttcctaagacacgtgcagggctcggggtggagaggaagtcaccggaggtcgccggaaaggctgtttagagggtcgacggagacaaaaaaccccaaaaaatgtacttttagggctcggatgacacaagcacagatggagggtggctagacggcgtcaagcaaggctggaggtggaagcgcgtggccggaaagtgctccatgcgccctcacgcgccggcgcgtgagattcaggccgccgaagaagaaactcgcatggccggcacgtggctgagattttccctccggtgctttgagaaaacttgaagatctcctccttgcgcacttgatggtatggtcaatgtcggaaaaggacttcgccggaaaaaggttgtcggaaaagtcgccggcagtgagggtttgctgacggcggtgagggttttctgacggcgatacgattgatcaaaaagctttaggagatgggaagggtgaccggaatgaaacacggccactgaaagatttcccaaaatggattgacggataaaccggaaataattagagttttttttctccctaggctctgataccatgtgaaaagagagaaaaaagggggaatccctaattattgttattgaaaagctgtgaagaatacacattggacttaggtatatatatacatgttagtgggacccacaatacaataaggaaagaaaaagaaaaggaaaagtaaataacctaaataactgtacactatctaacatgtttatttttatgttcagctattccattctgttcaggggtatcagaacacgaggattgatgtaaaattcctttctcatttgaaaaggttttccaaacattattaaagtactcagtcccattatcagatctcaaaatactgatttttgtctaaaattggttttcaatcattttgtaaaattctttaaaaatcctttcgacttcagatttttccctcattaaatatacccaacaaagacgtgtatggtcgtctataaaggtcacaaaccatttttttcctgaaattgtggttacttttgaaggtccccaaacatcactgtgaaaaagataaaatggttttgatgcatagtagggttttggaatgtaagtttttcgttggctctttgccaataaacaactttcacattgaaatgataaaggatcaaccttttgaaataacactggaaataaatgttttaaataagagaaactaggatggcctaatctgcaatgccaaaccattatttgatcacgaacagaaagagaactaatactacttagtccttgagcaattttattactaggtaaattatcctcgaaataatagagaccattgatcatcctagcactgccaatcgtcttcccagagctctggtcctgaaaaatacaatgggattcatagaagataacacaacaattagaatctctagataatttgctaacagacaagagattacaagtaagtttaggaacatggagaacaaatttaagatctattccctcagagatttttattagaccttttcctacaataggtgagaaattaccatcagctatccgaacctttttatttccaggacacggtgaataggattcaaacatgtttgaggaattggtcatgtggtcggatgctccagaatcgattatccatggaatagatttaaaacgacaagatagagcatataattcattacctgtgtgtgccaaataaacattataagtaccgggtgtcaagttggatttcagcagtgcaagaagatgctccatttgctcagtggtgaaggggctggtctcaacctcattagcagtaggaataatggctcggcctggtttgtcacctgtttttcctttccaatttgcaggtttcccatggattttccaacagttctcacgagtatggcgaggtttgttgcaaaaatcacaccaaacccgtggtctttcatctgatttacgctgaaacgcagcagctttattatagcctccacccgtggtaaccaaggctgaaccttcaatagcaactccaggtcccttcttgcccaacatcacattcctccgactctcttctcttctaacttctaaaaaaacttcaccaattgaaggcaggggttgtcttccaatgattctccctcttacctcatcaaactcaacattaaggccagccaagaacttgaagatccaattgtcttccatggtcttcttatgatgaagtccattctcggtagatttccactcataggtgttgaagaggtcaaggtcttgccagatccgcttcaaggagttgaagtactttgtgacattgtcctccccttgtcgtatctcaccaagtttgagggttaattcaaagatctgtgattgattccctaaatcagaatacgtctgatttacattctcccaaagcttttgtgttgttggatagcacatgtaattagagctaatgtcttcttccatagaattcacaagccatgtcatcaccatggaattctcagcatcccatatagcatagttcggatcatccactgcaggagccttcttttcacccgtcaggtagcccatctttccacgtcctctgatgtacatccgaattgatagagaccatctcagaaagttgtcaccattcaagcgaatcgtggtgatttggacagagtgagattccgaggtggtaggactgatttttgaagaatcagtgatgatgggattgttcagagaaggttgaggaacagtagtggactcgtttgaaatatctgacatggtttcagagaacagggattgaaaaaagaggaagaaggaggatttcggcaagcaaattgctagctctgataccaagttgaagaatagggtttcacgggaataattttctttcattgagactattcttttatagagtttacagcatatacaaatccttcaaattaggaaactaaatcagtgattaaaaggaaataataactcctaacaattacttttctaaaaatacaaagattgacaactaataaataactcctaataattactttcctaaaaatacaaagattgtcaactaataaataatttacagctttacaaagttatttcttttcatatcagtttcggttttccaacagtatacaatattttttctacctatagtacatgcagatatttcattttgtagagcaatacaagtttctacttttggaacaagaattgtacattttggaagggttgtttttctgttgtatttatcattcaatgaaatgaatatgtttgtttctgatcaaaagaaataaggcagggatgaaccctaaaaacaaaagatatatccaaagaattgtatccaaacagggtcacctaaagcctatactgcaccaaagatttttggagcacatgaggaggaaggtcctctaacttttcatcctaccaaggatgaccatgagtgcagaattcttctcaacactcacatcttgactttttccacttgcaaattcatcaaggttatgtttggttgttagaacgtattaaggaaataaaatgctaagaaaaatgattttctcatgtttggttgtactatagaaaatatcaaagaaaatcaaatataattaaaattacttaaaaacttatgcatttaaaattatttaatctctatgtcaaaagagttaaaataagtgaaatgagtttgaagtagcatatactttgcattttccctcaaattttatgagaaccaaatatagcataaattttcaagaactgggaacaaaaatgagggagagggagcgataagtcctcaaactttgtggacattgatcatttgacattaagagagagatttgaagtgtggaatttgagttcatcagcttcttgcatactcaatgcttccagcaaatttgtttgcaatgctcaagcatgaagattacttgtccctgtaaagtgtttgttggttggctggctattacatgctgataccttatatttattcatatgctaaagaaattggtggcaaatgatcaaagggcttgctgtgtctcctcagagcaattttacatatagtccataccttaggatcattttattagtttggcttttctttgtgcagaatttgatcccatctcttgcctgtgtttaattgcattcaacaatgaaaattttcttcctgtgtgtaatccttttttgttgtttgtttcagccccaaaacctcacaggcaaccaggtcagcaggta

SEQ ID NO: 12025 - DNA, 5538 bp, Vitis vinifera
  Intron number 6 from transcript GSVIVT01038352001 (locus G SVIVG01038352001) derived from phytozome v7.0 (chr-ID chr7 ; pos 13410768 to 13416305)
attgaaaaggtctccattcctgctctacattcaaggtatgtgcttgtgtgtgtatatttgattggtttgttcttctgatgatgggtgtaaactatagtttgttagttgaagcagtttggtatatgggtgacagaggtagtatcctcaaaaaaggaggatagattcaagcactcctgaatgaaattggagtcttttgtgcacaaaattcgccacagcccatttaacagcattgagcaagtacctcctaccaacaaacttctagaattgaaagaaggcttttttatttttggaaaggcaacaagagcttgcattaattaagcaccaagagaagggggcatgccttatgtatatgggccttatacacaaaacatcacaacacaaccactagaagacaaatacaagaacaagctacaaaaaacctaagctaaccacaaggaagactgtctaagaagaggctctccatttccaatgaagcatgggatcacttcaatagggatttgatgaactcctccttcaacctttgatttgaaaactgttctttcattgaaaatccttctgttatgctctttccacatacacccaaacaagcaaaggggagccatatgccaagaggttcttctccttttctttttttttttttccaaccccttaaatctgcaatagaggaggagatttctcattgaagttggaaacactcattcagtccaaagattgctaagagaaacattgataatactcgtcttttcacaatgagtcaaggtattatcaacttcttctttatcttttcaaaggttgcatctattgaccattgtccatcccctctttgttaaaatatctttagttgagatttcaccctaaacaacttcccatgcaaaaagaatgtgttctcaagagagctcaaaatccttaaatctctttggttgggaataatatattactacaatacattaggagttgtaatacaatttgacatggaaattacccctcctatcctctttttaaagtaaagtgttctccccttcttgcactctcatagggtaaataagatttagaaattgggtcaccttctccatctcctaatcttggaaggaccttctaaattgaaccaaccaatgacctcaaccttctccttcctcccataaatatgcgacttgacctagaagagttggcacttgtaataggctgtaaagggggaatgcttcctaccacttatttgggactccctttaggtgccccctacaattcgttggtggcttgggatgggggggaagaaagattccacaaaagattgccattatggaaaaggcaatatatctccaaagggggtagactaacgttgattagaagcacattatccagtttgccaatctactttttgtctccttttttattgccgagggttgtgcggttaaggttggaaaaaattcaaagggacttcctttagggaggtgggaccttagaaagtaagcctcatttggtaaagtgagatactgtttgctctcatagaaggaaggggggcctaggtgttaggcgccttcactcgctaagcaaggccctcctttgcaagtggaattggtgctttgcttcagcaagggaggtcttctgaagacaaatcatttgtggaaaatatggggaaatggaagggggttggtgctctaaggaagtgagagttggctatggtgttgggttatggaagaccattaggaagttgtgggatctagttagttgtaaactgtcctttttggcaggcaattggaaaagaataaagttttggaatgataagtggtgtggggatgaacctttaaatgtttctttcccctctttatttgccctttctaactctaaagaagcttgggtggtggagttgtggcagcattctagtgaggggggaggttggagtcctaatttcctgaggcctttaaatgattgggagattgttattgtggagcgcttcttggcaagactataagataaaggggtagaagagggcaaagaggataaagtgtgttgggttgagacgaagagagggactttctttgttaagtcactttatgctagcctagagacaggaagtgtagtgcaattccctcctagtattgtgtgtaatgcttgggttcctccccaggtgaggttttttgcttgggaggcgacttggggaaaagttctgactcttgaccagcttcaacggaggggatgatctttggccaattgttgtttcctttgtctgtctcatgaggagtcaattgaccacattcttttgcattgtggcaaaacaagggtgttgtgggagcttttattctctctctttagagtttattaggtgatgcattccactattagagagactctgctaggttgacatgggtcctttgttagaagaaaatggaaaaaagtttggagggtgacatctttatgccttttttggacaatttggaaagagagaaatagaaaagcttttaagaatgtggatctctcagtccaaagactaaaatttttgtttttgtgtaacttgttaacttggaccaaactatttataggtgaaagattgatgttcatagtagatttcactgattggttagggttagtttgagggaaggagtagttttttgtttctttatttcttttttggtgctttttgactgacgttgtatacatcgtgtgtactttgttgcgtcctttttggcgctttttaatacatttttcatttattgattaaaaaaaaaaaaaaaacaaacaaatgcgactatagcattctaggaagaagctattctaaaaagcatatgaaacacatcttttaacttgatctcctttacccatctatcacctcaacattttgtttgtcgaccatttttgatttagatagctagcttgaaactaaagtctttccatcattttctaatatcttttcattggcttattgtaccaagggactcccttgtccttcaactcctcgaacttttcatgggtgatcttcctccacaagctttcccactccaaagcaaacctccactaccattctcgtagcgaggccggattaaggacctctactattcttacccccaactctttgtgcttcctagccttgcacacctttgactagctcactagacgaatctttcttctttccttaatatatcctctacaaaaagtctctatgcatttgacaagctatgctgccatgtcaagtctcctcactgggggattttcaaacacaaacataaaagtaagagaaaataccatccttgagctcctccacttttccaattggacaacaatgattttaagaccgatgatgaagttgccattccaccttgcattagccatatgacgaaaagattgtgttgttatccctttcctttagccaaaaaaacccttgatttctccctccatgaggtttcttctaagaaggcttggagactaaactcatctttggcaagctttggtttctcttgtcctcttttgagaagagaaaggtcttaccctttctatacttatctcaaatgcttattatcttaaaagtggtttccttcttaactcatacattaccaaacacctctctaatccatctccatagcttatcacttctcttttagttggcaacctcgcgccttgtgggaggagaaattaaagaaaaatggatgatgtgatgcttatggtattgagatcctgcagagttttgttttctataaaagctgccatcaaggttggatttcttttcttaagggaggtggaattctagacggaaggactaattcccatcccttaaaaatgtgaggaatttaaactttctagaattcttagttaatgaagctactagaatttctccctagccaatccacttgtcaaactttcttacacgagtccttctccttccaaatacggttaacaattagattataagggtatcctcagattatattatttgaaggggcaaggctcactttggtgcaagaatctcatggatccaaggcatgcgccaaagcaataacagggaatccaccccgacagtggggcatttaccctactgcaaaactctaggtgatatgagctttatcctttatcttaaactactcaaatacataacaagctcaaacttggtgcctttggttcattgtcaaagggcactactgttaagctacactttgagggatgacacagtatcctgacatattgaaagtaaaccacatatcaatacaaaatgataaatcattacaattccaggcatgaaaaagttttaaagcataaaagaatttaaatgagtctaacatgaaagttgcaccaatagcatctagtgttaaaatttatcatgagtcattagcaaagattaaaaatcttcttctttgttgcctctatcaaatttataacccttatcattttcctcttccatctcctaattggtccctttgtcatctagattaatgctgaaagagtggaactagtcctagaggttgtggcattccccctgttgttatccttgtctttaagcttgttctgattctagttgtaaatttgcctgttgcctccccatccccaatagacaaattcattttttatgcatcatttagactcttcattttccatcctttcacccaaccgttcattgcttctatccatgtatttccaagagatggtttaatggtgtggcacattatattgtctctgcaaggtgcagatgtacataatgaatgtcaaataatttagtggctatttacaaaagaaccttctactatacgttggtgatttaataatcttcatgcatttgtgttcattttcattaaaagtctttgtagttggttctttttattttcatttttttaatgaatcccctgatattcaaaattgtggtgtgatggagatgtggggaattggagcaagacacaataattggttttggatttggaaaaaggtatattttttaaaatttttatttagtctcccttgctagttgtgtgttggacaaaactgtggtacttttttatatttgctatgataacatggttgccagtgatgagagaaattcatgtatttggctacaaattgagcctggtatcagacatgagctgacatattttattgttgtacttccaactttccttttcttaaattgacaatttacatgccatgcctgttagtgagttaaattggcactaggcaatatgtcaagtaatggttgcttgacacagttttttatgtttgtgctctcatttggtgactgtaagttaaactggatgcgctggtgaactctttttcccttttaaagtgtacaattgtgtcctggaaaaagtttccttccacaccaagcattttcattcttatttctgtattgtggcgctaactaattttgtgtgcatggtagttgaagctcatgtgtgaatattttaagtttttggtgcatgctaaagacgtgtagtgtgcttctttatgtgtatcttctagctattgaaacttgtgtataagattaaagatgtaatgcatgctggagatgtctaacacatttttgaatgggttcacagtgttgcattattgaagcttgcagag

SEQ ID NO: 12026 - DNA, 9036 bp, Vitis vinifera
  Intron number 2 from transcript GSVIVT01016922001 (locus G SVIVG01016922001) derived from phytozome v7.0 (chr-ID chr9 ; pos 2583780 to 2592815)
gttcttgggcaggatcaatcaggtgcgcatatctctttcacatctcatgatttcttgccacctccctcccttagatctttcatatacactctgtatctccaggactagttcctttcgatgaaattggaacagttgatcttttttttttttttttttcatttctttgaactctgcaagaatttgtcgatatttccaattaaatcttcttattttctttctttgtttctctttaatagattttcctttttcatttttacttgtaccatctagtattaatagatgctgagttttaatgctaagatcctctcccatgacagtactcttttaaaacaattgaaatatttatcaattttttttttttcaaggtttacttttaaaattttttgatggtttgatcaccatgggtcattttataacattttaatttgtccaaatcttaaaccttaagcgttcctttaatccatatttcattcttcacatcttgttctttctcaagcttcttttattgtagtttatagtcagtttgtttcattgggcatgtctaattataagtaattatattatattacagatgtataaactaaataagaaatatgaatctccatttggaaaacttcaaaataacatgagaaataaataaattaatttaatcttagttattgtttttaaggatgacattgggattaatttttttggatacctgtccggtttcatcccaaccttaataggatgggtttgagatgaagataaataagttagcgatgggtttgagatttttgttttttatttttaaaccagggtggttcagagtaggttcagatattgccttgtctcgccccttcttgtcctcgattatttgtaattaaatttaacaatagtggtaaacggttggggtgggtttatgggaggttctaagtttaagtccagagcaaactagaaaaaggtaaaaaaaatagaggagtattctaggagggaagttaaggagaattacaagaagtgggttatgttagaagaaacgtcttggatgcaaaaatcaagggaaatttggttgaagaaggggcatagaaactagagtttttttcaccgaatggcaaatccgcataaaagaaggaaccagatggctagaatcaaaattaatggaatgtggatcactgaggacaatgaaattaaggaagaactgagtagagctttctagaagctactctcagccactgatgagtggagacccaacttaagtgatatgtcctttgagaggttgggctctatggaggcggaagggctggagaaaccttttacaaggaaggagatttttggtgctctatcagattttaaaggaaacaaagctccaggctcgaacggtttctccatggctttttggcaattttcttggagttcgttaaggatgaggtgatgaatttttttagggattttcatgaaaatgagcgttttgtttggagtgtggactcaaccttcttagtgttgattccaaagaaaagggatgcggaggacttgagggatttcaggcctattagcttggtggggaggttgtataagtggttggctaaggtgttggctaataggttaaagttggtgctagccaaggtgattttcaatgcccaaaatgtgtttgtggaaggtaggcaaattatggatacagtgcttattgccaatgaaaccattgactcgattttgaagagtaagggtggaacaattctctgcaagctggacattgagaaggtgtatgatcatgtggagtggcacttcttgttttcggttttagaaaaaatgggttttagggagaagtggataagatggataaagtggtgtgtgtctactgctagtttttcggttctagttaatggcactcctacgggcttctttcaaagttctaggggtcttaggcagataaatcctctttcactttacctgtttgtggtagtgatggaagctcttagttgcctcataaaaagagctgttaggggaggctttttgtcaccttactaggtcagggatagagggggtgaaggggtaaaaatctcccattttctatttgctgatgataccctgattttttgcaaggctaacgaggactaagtgacctttttgagctggttacttatgtgttttgaggcaatatcagggctgcaagtaaatttggataaaagtgagctgatcccagtgtgcaatgttgagaatgtggaggagttggcttctgagcttggttgtaaggtgggtaatttacctttcacttacttggggatgccattgggtgctcctttcaagttgtggcagcttgggatggagtggaggagagattccgtaagagattgcctatgtggaaacaccaatatatctccaagggagggagaattactttgattagaagcacactgtccaacttgcctatttacttcatatttattctacaaatgctaaagggggtcagattaatgttggagaagattcagagagattttttgtggggaggtggggccctagattggagacctcacttagtaagatgggtaatagtgtcttgataagagaaaagggggtttgggggttaagagtctttctacgcttaataaggccctcctttgaaaatggagttggtgttttgcgaatgagagaggggttttatggaaccaagtaattagagggaaatatggggaggaatgaggagggtggtattcttgggatgtaagagaggggtatggtgtagggttgtgaaaagcaattaggaagcttgggcacattttgagcaatagaatattttttgtggtggggaatggccaaagggtgagcttttggaaggataattggtgtggggatacacctttatgtgcttccttcccttctctttttgccctagctgacaaagtcactttacaaagctttagagccgggctcttcagttttatttccaatgaagaacatttggaaatcatgtgtgcagccaaaagtaagcttcttcgcttgggaggcatcttagggcaaagttctaactttggaccaagttaaaaagagaggttgggccttagcaaatagatgttatttttgtcaagcagaagaggaatccattgaccatctccttcttcattgtgagaagacaagggcagtgtgggagatgcttttcactctttttggagtgttttgggtgtttccatcttcagttagagaaacctttttgggttggaatggattctttgtgggaaaaagacacaagatggtttggagagcgggtcccctttgcatttttttttggacagtttggaagacaagaaatagaattgcctttgaagatgaggtgttgtccatccaaaggctaaaaacttcttttcttaactcactttggttggaaactaaattgtttataagagatggtccatcgacctttttggagttttttgattgggtgggtttcgattaagggaggggctgtttttttgtacatcattgtggacggttttttgtttctcttgttagggggtgggtatttccttttcttttttgtacattttgagttgttattttagcgcctcctcgtaatacaatacttctcttattaaaaaaaaaaaaaaaaaaggtaaaaaaaagtgtaccaataaaaaaaatagtttaatttttttttttttcattttcttattttttaacacataaaataattaaaaaagttacttctcaaataaaataagttataaaaattgattttatttatttatttataaaataattttttttaatataattattttttaaaaaatgaatcggggtgaggtaggaataggaaattctcatgctcaactatccctgccccaagatttatataaatggaacagggtcgagatgggggttacccatcttgaatccaccctattgtcatccctaattgttttaatatgatattttaaaagatattatgaattctttgatatggattgtttagatttatttttaaaattaaaagctctataaatagagaaataaataagtcaatcgagaggctagatatatagtgcaagatattatttgcttaccaaatgcatatattgcttatgtattattcttgattataactattacatttttcaagaaaccaaggtgcaagaggtcttaatgagtttggtcaagagcttagtagtgggtagattttagaataaggagatgtgaaggcaaaggaggcaactggaggtatacattgtggttttttgggataataaaggcatagggaggctcacaataaaagtagatgtttactcaatctcttgtcatttcaaaagctttgaaactaatcttatatggatgtttgtggctgtttaagtgctagttcaaggagggagtaggaagacttttgggctgaattagggaatattagagggttttaaggaggctctaagtgtgtcgatgggtgttttaacatggatagattcttgagggaaaggaggattgtgttaagctctctttagatatgagaggttttacttagacaatggagttgaatttgcaagatatcacactgattagggtggcctttttgaaaaaaaatttgatctcaagagtggactaattccttatgttgagaaattgtaagactcattttagtagcctattgcaaaatcaagagaattatggctcaagaaggatgataaaaatatcataatttttcactaaataactaacacatgtaggagaaaagaattaaattcataaaatagaggtgaatagtgcttggaaggattttgatgttaaggagggagtgtttggttcttctcaaagtcttctatctaaatcaagggattagagacctagcattcatgggaagtctattttaattctttgagaagaggggatttagggggtttagatttacaaaagagaaactttttgtctttatctatgttgagtatggataaaacttttaagccacatggtttcaccatggtctggacaatattgttaagatttgtgaaggatgaagaaatggcttcttcatgaagtttctaatcttgtatagactatattgtgatgaagcttttatggtcttttggaaatattgttaagatttgtgaagggtgaagtaacggtttcaccatggtcttttggcaatattgatatgaagcctatatagactcctagtaacgatattggcttagagactcaacagaattattgaaagtagggtttctaatcctcattatgttgttatggaagacagacaaaatttgaatacattgtttcttgcaactgaggtcatggattttaggttgaagagttccaatggaggagtaatatttggtgaactagaaatcaagaaagcttacagccatatcaactattgagatatccttctattagtgcttgagaaaataggttttgttcagaagtgcattgattagatcaacttatgcatctcaagaacaaggttcttagtgttagtgaattgcacttgtactaacttatttcaaagcccaagaggattaaggtgtcgggatcaactctttccttatttgttttgtccatagaagctctaaattgttttattaaaaaaggctaggaaagctggtttcatctcaagtttcaagataggagggagaggtggtgagaagatggagatgccccatatcttgtttgcaaatgacatgcacttccacttttgtgacatttgcaaagaacaattaaggtattatagttggactcttgtgtggtttagtggagtttttggttgaaaattaattcggcagatcttattaattctagtagatggtgcataatatggagttggctactttgttggttggtggggtaggtgagctcctcattacctacttaggtcttcctttaggagccttgtttaagtcattgatgatttgggacatggtagaagagagattattgctttgtggaagtcgcaatatctgttaaaaggctgaaggctcaagtggattaagagtactctatcttgcctaccaatatattttatgttatggtttgttgttctaagaaaggtgagcttaagacttgagaagatttaaagagatttcctatatgggagtggagcccttgagaaccaacctcatttggtgagatagtcaattgcttgtatggagaagaagaaagaaggacttggtatcaaagatctatctatccttaagaaggctttgcttggaaaatggagctagaggttcactacaaaatgggagcctttatggaagcatgtcatagttctgaagttgggggaaaaaattagtagttgcttttctatagttgtgagggaaggtttctttggcattgaataggtataagaagattggattgctccaacccaatgccatcaagaattccttacatattgtgtggaaacatgttcatcttccaaattttttccattccaatatttttctattagaccttcctttttttcttttatcaagcataatgatgtgaatcaagatttaatgagtattaataatgcaatcctaagcaatttctctttatcaatctgagaagtgcactgttggagctaggtatccaaaataaattaagtacatgtattaagataaaaaggctacttatttcacaataatatttttcactctttcataaactagggatacctatctaaatttctaattctagtttcaataaatagggccttccaatgagtctattagacttgtctctatatcaacagaatctatgatccatgcataacaaattagcatggtatatccatatcatatcatgtgaatagtaaagggctttacttttacattttttttttttaatataaaaatcattattttattcacattcaagcagagaatttgaaaccttgtaaaaagtagggatatgggaaggaccgaacttgtcacacaggttgctgacgtacccaatatgaaatcaggtccaaacatagtttggaaccatacgaaaacaaagaaatgatactcttcctcttccccctcccatccttttccccccctttttttccttagacctccaaagcacatcactgaatcaaggaaataaagcatggttttttcaggagaggttcctcttatacattcttttgtgatctatctttttgtataaatctccttgaataatagaggtttttagcggtttagatcaggtttgtatatttatgggaaggattcctcatccctctcatgaaatctttttacgatattaatacaattcttgtttctaataaaaaataggaaataaagcattgaagcattagaatagaatacttctaatgtcatgaagaaggaattaatgttaatagaccatctatgaaaaccaagaaatagtcaatcagaccatgagactataaagaccataggtaaagacgtctcatacaaccatgatgaataaatatcaaagatgactgaatcatggattctacaaccaatgaggtcctaactatatacaagagcacaccaagaggctccttcccaaggtataaagaaaatcataaacaaggatttgaaggaaaagctaaatgtaagtggctcaactagctagctagtgataactctaagtgcaagggaataggatgagcaaggcttatgaaataatgaccaccaatcctttgactacaacctcaaacatagtactcctaagttgatccacattggttggctctaaggactggttcccatccaaatccatcaacctaccactctttgctagctgaacctctcacagcaatcttgatctcctcaaatcctcttcactcactgtctctccaagtcaacttagaattgaatctacaagctcagctctccttcatttgaaggtcattccatgcaaaatagaagacaaaagcgctgtaaacttaaagctctccaatatcttctactcaaactcgcttccctaatagaaacttcaccccaaagagcagagaaaatgtttaagccattcaaaaccaaaaataagagtcctcttcaaaacaggctggagaaaatcctccagagtttccctcaaatcaccaaaagtctcctaaaatctattcattctcacaccttttatatacctaattccacatcagattgtgcaagttgttccacttcagatctcaccatgttatcaatccacctcttatacactcttcacttcaccaacacatgtaagagaataacttgagcttaacccatgtgtccctttctaatcctggggcacaattgaagaagattctggaaaaacttgaagttgagtggaggagctgcatgaaaaatgtgaaattcttggagaaatcggaatttcaatttctagttcctggtatcaattctggtattggtttcaaatgaaaaatgactgatattggaattttgatgagtgacttgagatgttgcttgtggtattggattgggtgccaaccagcaattgatatcaaaatttagatatgggatttgcgatattgattctagtattatttttgctaccttgaggtttgtgccaaattttgcccattttcaacttatccaagtttttgcacgttgcttgggaatgctcaagtcaatctttacagactaaatacacattttggatgtgtagaaacccttgaaaaacatgaccaatacttctcatcaaaaaaatgtatgagatatgaacacatatacgagtatgcacgtaatgtgctaccaaggacaaaattaggggcatgcaatgttcttttttgtgtgtattcttctctttttatcatcaattggtgccccctttcatatatttggttgtccctgttgataatggttttgtttgcctataccctataaaaaaaattcaaaattagaatatcaataaaatcttattattgtattttgttactagaaaatttaagtgaattagttatattaacattgagagtaatatctttgtaaaccttaaatacaagctagattttaagcctcatttacattgatctacatctctcatgtactcatgcctcacatacacatgctacttattaacaaaacaaggagagtttaaaattttgtaggcttcataagcatcgattgcgggataaatccgggt

SEQ ID NO: 12027 - DNA, 3468 bp, Vitis vinifera
  Intron number 9 from transcript GSVIVT01036876001 (locus G SVIVG01036876001) derived from phytozome v7.0 (chr-ID chr2 ; pos 18347418 to 18350885 reverse strand)
ccttggaaaggtaaactgatgctttggttttaccttgccccctgaaatatacctttattgtttatgcttagtgactttatattgtttatgcttactgggaactgctttcaaagcagaagagagtgactcatgcccctatgaaagtagctagaaagaaagggcagaaggaagggaaagtcactcatgggaagactaggaaattgattgctttaactcataatttctcctctgtgttcctccttgtttatttgtcatcttcactgtgctgggactgcaatttgtgcattttttacctatgaagttgtcaggctatgattcactcatcattggatcttgtttatgcttaattcaaaagaatggatactaattgtttaggtagtacaacatttagcaagcaaattccttttttctattttgatccaactaatcaagagttacagcatgatttttctctatttcattctgcattatttatggaatctttgaaatggttcaagatttaaaccctttttttttgggataggtttcaagatttaaccctgttgattatagtaacagttaagaacttccaatttattttttcttttctttttgttccctaggaggtgtgactcatgaggggcaagcattattagaagcatatgtgggtggcgtttcaatggatggaatggcaatgtttttgtttgatgatcatgtttgtttgtcatttgaaagccacatgctaaattttccattgattgtaggtgatccatctctctggttattatagaaatccatttttcttcttatgatacctccctcttgttactatccctcccaaaacatcccattttgaaaccttcttcttcttcttcttattattattattgtgtaacttgtcaaactaagaaattgaaggcccatgtcatttcatactctctttatgttatccttatctctctacatctttcctggataaaaggtgttgaaccttcattgccttgggccttttcactctatttctcattcatgcccttaaaaattgaacactcaattaagttttccctaggctattgttatttgaagttcaaagtttcatcatcatcatcatcatcatcatcatcattattattatttgaaaacccatgtcatttcatactctctttgcgtgatctttatctctcttcatctttcctggataaaaggtgttgaaccttcattgccttgggcctttacactctatttctcattcatgcccttgaaaaatgaacactcaattaagtttttcctaggctaatgttatttgaaagttcaaagtttcattgggagttgaagccttcacatgattagtgattaataaaatggttaaaaccaatctcttactgcaaattaggagctcttgtgaagcttttagctctgaaccctttgttttatgctagagctaggaggtggccaatcatcactccactgtttggttgccttgtggttgggaagagtttgtttattttggtggatctatctcttggattcctcctagagatgttgcaatcatcataaacatgatggttatagcttttcaggagttgagaagaaactttggggtgtggtagggttatgaccaggagctataagaattatgaactataggaagtaacattttgtctgaccaaccaatgttgcagtttcttccaaggagaaaccaaacccacatagattctcctgttgttctggaggattgcttttatttcctgcaccctttatttcttttatagttcaatggaattgttgtttcttataagtgaaaaaaatagtattgttttgctactgcccactctttttttctgaactcacgcatggtaaggatttttatgtttgcttttattcatgttgctgagtttgctgatgtttcttcattgtcataggacttttaatgttcaccatttgctggactgtaggtaggttttaagaaacactgattagaagttctctaataattacaaatggaaggaaaaaagaaggaaaaaaatatgattattaaaattgcatgattggttgaaaaattgattggtatatttattaaataaattcttttgtatgtaatttgtggtcttggtctagggtggctatagatatgacccccatgtctcttgttagcttcattgattggtaagactcaaagtaagggtaggtgatgttttttgtttgtctcccttgccctctgaggtgagcctttgggattatgctgtatacttccttgtatacttggggacgctatgtttggcatatcctctttctatttatactattgctatttacctattaaaaaaaaagaaaggggaaattatttttatttttatttttgtctttatattgcaatattataaatcgactagggattcattttaattaaagtggtgttaggagttagtagttttagaaaatttttgttaagtggttagtctagaggtattgtagtatttactattcacattactatagttattatcatgttactatagttagccctatttatgctcctttaatggtaaattatgaaagttttcttgggcttcaactttaatcacaattaagaatctttcttcttgggttgtgaaacaacacattaggtacattggaaatgtcctataatgagaagctttcttatttggttatgttcactaagcttattttagaagtctgttactggcctaacaagtttttagtttttataaataaggttcattttatgtaagcaagaccacaatgtttgaaatgaatgagtttcttttggagttattggaaggtttagagttgcctaattacacactagctcagtactgatacactctctcttgcctaattgcacacaactctctctctttcagtatacacacacacacacacaccctctctctctctttctcaaacttttccttcatactttcatgcatgtcaccacctccttctgcaggacatctctttgtcttttccagcataatttggctacctgaattttacttctgaagtaattttctacaatattgctacaggacatgtacaataattattatttaacacaaactgctaagaacagttaaagatggcttctaattaattgcctcgtaaactaagtaatgacagagattttaatatttgcctcttataactacttctttcttaagattttcatatttgcctcttacaactactttctttcttggtttttgaattaacatggtttgggttttagatgtcataaaattgaagttcttttgatctgcttgcaatggaaattttgaataattgtctctttgagcacaactatactataggagtggcttcattgcaaagtagtctatggaattattgtgttttggagaatgttgggactgctcgaattatgtggtctggatttttttgtattccttgttgtcttgttgactcgttttctgttggatctcatgcagcctgcagatatttatttgatag

SEQ ID NO: 12028 - DNA, 8175 bp, Vitis vinifera
  Intron number 3 from transcript GSVIVT01024388001 (locus G SVIVG01024388001) derived from phytozome v7.0 (chr-ID chr1 6; pos 1961258 to 1969432 reverse strand)
ggtacaatgtggctcctatctgccacactctcaccatagctaaatattttatttagcaaagttagtaattccggacaaaattcttaagtgtctcctaactcagttttctaatcctccttcagaccacttgtctaataaagttctgagttgttgaatttgtcaagaaaccaaggtatatagttgaggttggagttggattaaattgaatcaaccgtattatttaaatgttgtttttcttgaaatgttttttaagaagttaggaaggcttgggaaacattgttttactaagtgttcaaaatgccctatttcaggatcgatccaacttcgggttagatcgatctaggttgcactttcttgataaaatcccatccttaaattaatggattctttcatttaaaagcctaaaattgcttcctggtgctgtagagagaataccagagacacaacaaccatccccttttagttctcttttcttttcctagtttggggtgtttggttgctaagaaatcaaattttcctattgttttctaaattgttttcaatggattttcttgagaaaaaaatgggtgattcctttcttcattcatctctcaatattgaaactattaggtttgggtaaaaacccattttcttcttgtgtggatttaaaaagaagttgagattgagttgatgtggacttcaagtgtgctcctgaaaaagaagatgtgaagctggaagtggaaaggtgctagtcaagtggtccgggaagaatcggtggacttgagttaggtaaaaccttgtatttagtcttttgttcttcatagtggatgttttttatcagttgtaggcccgtggttttttatctattcggaggttttccatattaaaatttggtgccattgtctctttctctcattctactcattaatttattttcattttttgatatcattagttacttgagtatatatgttgaataaaagaaatgtgagctaaaataaatgtgattatctattggatattctgaataagtttttttgttcattttggttgatgatatcaaatagtaaattgaaatgagttaaggagataattgttcttatgaattaattttgaggagtgttgaagtatttgcatgtgactaacatttataaattgttgggagagtgttgttgcattcatactttcttgtgaattgtatgctttgttgaaaagttgttggaaaataagtttatagacattgagaaattctaaggttacgtaatttttgttgtgcgatctttttaattgttcaacaacacctattcaccccccccccccttgtccgtcattgagattcactttttcttgctataattcaagtctcaactactcatgcattagtatctggtcacaccaagtgtaacgaagcattaagtgacagccatgcaactccattgccttccattgcgggaggcaaacatacaaccacctacttgccttggaacgttagttcaaatgtgactctcattgatgattattataatgcttagattactgattttaggttggtggtttctgctaattctaatgatagttcgtttgcaaatgggaaccttgaagaattcagttatgtggttccagaatattcaagcaccaaggttgcttctccaaagggcgatacttttggttctagggttatgcttcttgaataggcaattgtacagaagcttgaagaggttaataatggagatgaaactaggatgattgtatttatagctaggaattatcaagtggacttgatgaaacctaatgctagaataatcttgctgttcgaatagttaaaacatgttgagaaaggaggagtgcaccaccttcccacgtgcatgtaaatttggcacgcatggtcaccctcctgttctttattttaatacccttgtgatgcatcccttaatgctccatgcatgcatgtaaatttgttttcaaaaccgatttttcaaataattttaatcctttcactttttattcttccttaaaaattttgggacactaaagtctaattttaacaaacatactgccgcatttcactctagcatgcattttggttattttctctgattttaataaatgtcttgatttttgtcatttttttttaaaagaatgactaaattctatgtttccaaaaatcatgaaattcatccaaattcctgtgatccttctctatgatcactaagaaaatgaagattatagaatcagttcatataaaaaataaactaggcactagtagggcccaacatatgtgtcattctcttttgaatattaactccgatatgctgattgaataatttatttttgcttgctctatgatatgcatgtgattatcctatacttgttatatattgtatatacttacctttgtttccaagaagtgtttaattatgcttcctatccaagtatgcctctcccctttaatccctttagttctatgattgtgtttcaaattgctttgactagtgcttcatcccttgaatagaataaaatgcatgttgtatgttatatttgttaaactaactatgatgttttcataaaagcgctttacgttgcagctcagctacgcctatctttctttctagtatgattgattgctttgatatatttgtttggaaacaaatagcatgttgtttgctcttaagcttgatcacctatgcttattgcttggtatccatagatttcctgattaattgtcatatctaccttaacttgattagtagagacttgatttagggtttagagaggtgctatggcttatcatcgtacattttcggtaggtaacctgatcattggactcagatttgggtttttcaaagacatatttttctaaaagtttaatgagtcagttttcttaaggttttagtttcttattttgttttctctataaaaaaataataaaaataagtggctactccaattttccataaaacagtttttcacctttaaaagtgagttttgccattaagtgggaatgcacatgaaaaatgcaagtccacagaagtatgctataatctctattgtattgcctaaatccatgaattgactgtggacaacttatcaacttacaaagaacctatgacttgtatcctttgtgcaattcctaatacacccaaatcatgtacaatgtaagagatattgatgtatatgttcaaatgaccaattaatacaaatgagacaaagggaaaccaagaaacaagaataaataaatttataaatgtttctcaatcacttacatcatgtcatactttctagggctcaattccaacaatctccctgtgagatgtatatagtctaataaggtgaaaattatcagtcttttaagactacctctactattcttgagttataaattcttctattatgtcttcaactgacacattttaactctctaagagcttatgtgaagtttcatttaaaaaactactatgaccatattttacatgaacacaacttcttaggatcaccttaatcccatgagatatcatggtgcctctattgagaatacctattactactaacttctatcaatagtgacccaatctataggaaatatatgatcaacttacgatcacttatgagtcaaagccactgctaaatttaacacaagttggatattatctcatagttgataactttatgtcatgactcaccatgagtcctattaaatgtgtaaccatatacactagtacactaaccatgagaaacccatcttgatagccaagactaaccatccctctaattaggaggcagtatactacaacctctaatgagttacctaagcctacaaattggttgtgaataagtcatctatttataaggaactcgtgacttggatatttcatacaactcctaatgcacccaagtcatatacaatacaagaaatgcaagctaaaatgttgacaaggtataatgcatggaatgaagataaataaaagtgaattgaaaatttattaataaataataaaatccaaaagtttattgcatcatgctttgaagagttctatcctaatagcaagagaatatactatctcaaacctatgagatatcatggtgtttatcttgagaatacttgttcttacttgccttaattaatgataacccggtccatagggaatgtatgaccactttagggtttcacccataggtcaaagtcaatgtagacctcaacactagctcaatattctctcaaagttgaaagcttatgtaacaaagttgattggtaaaatcatgacttcttaatagttaatgtcatgactcactgtacgtcttgtcaaatgtataaccattcatactagtgcatatcatgggaactccatcttaatgatcaagacaaattatccttcttattaggaggtcttacactactactttaaattaatttcctaagtacatgaaccagttgtgaactacttatatacttataaggaacccataacttagatttttcgtgcaactcctgatgcacctaagtcatgtatatacaagtgatgtgagcttaaatgttcaacacaaataatatagaagtaggataatgaaaaaaaactaaaatcatactataaataataacaaaatctatttattattacataatgtcttactttcaagggctctattctaataagtactatatccaaattccttttttagtccatataattagatctagttgattgtttgaagtaagaatgagagtgattaagttgtaagatatgattcctataacaataaataaccatgctttaattattgagcattcaaggcggtaggtatacaaaatctagataatgaaagcattaaaaacaataagactcttgatctaggtgcttaaaaaacattatttatgatatagatcttcccaaatcagttatagtcaatgaagaggatgatacagatatccaaaaccttgcaatcttctatctgatggttctctcctagatcttagcacttgagaatgatggaattgtctttgtgggaatgaagacaagagttgttttatttttttcgaaaataaaatgactaaatgtcgaagactaaacctctaagggtgtttatatagacttacatgtgagcttaagtgacttaatttcatcttagacttgagttacttaatttaacccattaaaccaaaattaattaatagctcaattgaactccaatcaattaattagcctaatccaaaaataattcataagctcttatgcaacattgcatattcactaaaatgttcttatatcccaaatatccctcaaataatgtgtcacaaaggaatatgagtttgatcaaggatcattggaacccataagaaattctaaaatttactcaacatcccattataaagaataaattgcactctagcatcctataatactacaatgagacgtggattcatcactgtggagaagatgatggttaatttagctgcatacatatatatgacacttaaaggcttgtagtttggactcttgttatccctagcttcaaagacatgtacttaggactctcattacccttaacttggcgatttcttcagctgttgggtccagcaatcaaacgaattgcatttggatcaaggttgggaatcaaataagcaaggtcatctatagttgcattcttcttcttcaagtgattgttccagcggttcttgatagcgttagcagatcgcctaggaacatatttcggcatagatgcccatctgcaaattaccacaggaactcctacctcagattcaagctgatcaccacacaaatatcatatcatatcattattaattacctcacatcagcgccctttagaaagatgatgagctcatcttcctcttgggagaattcccctttgttgatatcagggtgcaggtagttcctccacctatgtgaacaacttttttcatccctgtccagcttccctagctgtacgatctttctccaagatagattggggtattctgtcttcaagtgtttgagttttttgtcttcttcttgggtccatacccttctcttcggccgtggtcttgccattacgggtttccctgcaaagatggaagaaatgaaataaagctacttccatgaaatatacaaccaggaaacaaaaaaacaaataaacaaataaatattacaatgacagcttgaagaagcaaaccctaagccctgtgattgttcagcagtcgatcttcatagcttcataaatgagttgcctttagatgcggtgcgtcatccttccatttgtgtttgcagggtgcccgccttcagtgcagtttgaattatctagaatgagttgtctttggaggcgagtgcatccttcggtttgtgtttgtagggttcagttctttgcctttgatttttttattgttattattattattgtatgtttattagtaatcctttttatatattttttgaatcatcaaacttgaaaataaaataaaatgtgaaatcattttttttcttaacccccatgtgtgttccgcagtctcatagttttataaatgcccgccttcagttagaatgagttgtgtttggaggctgtgagtgcacccttcggtttgtcgtagggttcagttctttgcctttgatttttttattgtcattattattattgtacgtttatttgtattacataccaatttgattttattagtaatcttttttgtatattttttcaatcatcaaacttgaaaataaaataaaacttgaaatcatttttttcttaactaaactgaaacatttttttaaagaatattgagataatttgtttaataataaaactaaaaataatttttcttattaacaaaactgcattcatttttgttaatgatgagctgggtaagctgggtaaggattctggagaagaaaccatggtgagctgagcatagacagagagagctgagaaaaagctgtgaaacaaagaggtggggagtgagcaggctgtgagagagtgagcaggagatttagaggaagctgggtgagatacgtttgagcagagaaatactgagtgagagggagttacagcagcggaaagaatctgagggagatcttgctgattcgtgggaaggaaagtagagcttgaagccaagcaactctttgcttgagggaagctttccacgtatgactactgtgagcttcttgtctctcattttcacactgttttactctcattttcaactgcttttctgagcattgatttgttgattggtgtggacatcaagggccactcgtttcctttgttggatttaactctttacatgcatgctcagttttggctttattttggtatctttgatttctcttgtaaaatacctgatgcattgaggagcactcccaggtgcgagcactgtggatttcctattcatctttttcattacattgcatttcaacatgaaatggggtttccatttaatgaatcttttgtctgtcattctggaccatactttgttttgggacatttcattcctctgcatctagtattttaaacctcatctctatctatcatttactgtgctggcttcaaactgctctattttgctccctggggattttctggtgtctgtgttcgtggacggcagttgaagttcattttaaacctcagacccatactcgatttttcatagacctgtttttccttcaagagtgacacttaaggtttttctttcttattttgttttttttcttttataaataaaacaaaaataagtgacaactccaaaaacttttcaaaaatcaaattttcaaataaaaaagtgagtctctctatcaagtaagaatgcatgcgagaaatatggggtccacactagtatatcaaaaaaaaaaaaaagttcaataatcacagggaacctacttcatgcccaagactgcaatttgagcggattgatagctaactcgagctcaactcaaattaacaaacaaccaacccaagccttacccaacataactcgccctctaactcgaggtacttgatccaagttcaacctaacctcattcttctaagcttgagttgagtttgggttggtcgagttagactcgggttgattaggtttatcaggttgcataattcaaaacctacctataattttttaaaagacttttttatatatatatttatatgaaaatttaaatagtaaatgagacaaaattttaagaaaacaacaaaaaagtaaaaataaatttatatatc

SEQ ID NO: 12029 - DNA, 4714 bp, Vitis vinifera
  Intron number 2 from transcript GSVIVT01008031001 (locus G SVIVG01008031001) derived from phytozome v7.0 (chr-ID chr1 7; pos 6472370 to 6477083)
tacgcaggtgagtttgtagagcatgagcatgtgaaacattgatgaaagatgcgaaattttgctctggagtttgtggttcttgacttggtgtttatggttgttattatagtttttggtaaatgtaatgtggaaatgctttgtgattctacatgctctaaactgaaagttcaataattaaaaaaaatgaggttccaatgagacgcaaggctcaggcatttggttgttcttattgtcattgctaagtttcagagattattgtgtatatcaccatttagtcaaaggaaatatgctaatgttataatgtttataggcctttctttttgctgcccctcatatatataatagttttgcattgaatatgctttagtggtaatcaatcagaaagatggaccaacgagtcacctttgggtgatattggccctcaagaatggtattgagaaataagtagagcctatgcagcacgcaacaataaaaaaaattacaaggccaagatttcacatggaaagtcctttggtgcaaaactgaaaacagtggaatccactatttcaagcaagagtccatgcatcttcaggtttttgtttagtttgaagcatttcaagaaactaacatatatgttaattatctgatagctgaaactttagcccttaaggcaggctacagagtagtgaagtttctgttttgaccttagatgcagagaaaagagaccccattcttctatctggcaacattttagtgaagtttcttgttagtgaactaccaagagaaaaagttattaaaatggaggaaatctatccttacagaccttggtagtctattttctttaaagcaagaaaatgagactccttttgtaatgattccattgagccagggacagatactggaataccttatattctgttgaggtttctatcaacataatttgtgctgccaaaggcaggactactatagatgaaagaggttgtaacaaagctgttgccttgactattctcagtatctaatcttgtttgccaaaaggtgtcagttgaatttaactcgtctatgccctcaagtccttgctcatgtagcaagggattggggagattccagattcaattccttgttataggaaaaaggacctacaaatttttttgtactctatttcatgtagcaaaagattagggatattctgggttcaattccatgtaatggaaaaaatacctacaaatttttttaactcatttaagaaacatttttcttagcacttgtaacttagccatcatgttcttgtagcctagacattattgaccaacacatactttgttcaacaaattttggccgcatgtttttaattactacatgtttaagacaatgcatccttttggttggcacatcttttatctaatgtataatgtctctgttagacttcatcttcaccaatacatgccctgagttgcccatttctctatgagggattctgctctcatgcccaaagcaaaatgttaagctgagagtggattcgcccctaatctgctgagaatctattatcacatatttatatgtcagacctccaatccctattattctggcaagtgttggactcttaattgctaacaagcacacttttctttttctttcatttttctttgtactgtttttatttttttctcttttgttttagaaaatttccttagtatgggagtcttttgggatatttattacaaggaagaagacaacaaataagaagaaagagcttttagatatctgatagccgtagcagtagtgatggcaacttagtacatgccctcttctcaccatctgttagcaagtttttctaatacttaaactcaaactggcatcaaatgcgaaatgctgattttaattgtttttcagtaggagatatataagagaagctccctgttatttatgttgattagaggaaaaagttcagatgaataatgttgctttcagcattgacgcagctaacttgtaatcagcaagttaagctgaacaatttgaaaagaaggattctctaccataatatcatctgatgaaattgccctgcctggtgaaggattctatagtataacattatctaatgaaattgccttatttggaaatgaatcagaggtcgtgagtttgagcctacttggcatttaagtagtgtagggtaaacccatatcacccaaagtttgctttgccgacagttgggataaatgccttgctctctgggtggattcttccctcccaatattaaaataaataaataaaagactgatgaaatcacaccataatcagatggcataattacttcttcctagattctcctctttcatagtattttttccagttatacattgggcatgtttacatttgtacatgggtaggagatgttttatatatctatttgacggaattggaatgaatttgattctggatagtcaataaatagtccatgtttgtgtgggaggtggatctgatgttgatctgtaaatatgtctttaccctaagctaagtctttccttttggttgttcttcaatcttttgtgacttggatacttggaaatgtgtgaaattcccatgttggacacaacataccattggtataagaaacacagtttgtgcctatatccaacatccgtgttctagaaagcaaggaaaaccttatggcttgtagttgacattctcaaaaacagttatcaaagaacagtttttaagaataattcttaattgttttcaaaaacaaaattctgtttaggaacttagatataaaaaacaattttctcagattattctctatgaagtatgaaggcactatatacttatgtacaatacaagatttgctaaagtattctccatatttgaattaattttcaggatattgtataaaaacacctgaaataactcaaatttgttaaaaaatttgtttttggaacaaatgctcaaaaaattgtctttcagtaaaaatttgtcagatggttttttaagttataaaactatttacaaaaaaccatttttaagaatagttttcaaacaaaccctcattttctagatttcttagatatttattatatacttttatatacatgtgtacattttaagatgaagtacagctccatagcagacatgctatgttacatcaacagtcactattctctggggagtggaagaataaagttggacattttgataatccagataagtccacctctcctagattttggcagctggacagatctgatttccagacagaccctcacctgacaagccttacctgaatctgtgctgtgcctagacatgtatcattttggggatatgaactttattgtttgatcttatttggatggatggatggttttactaatatgattaatctggtgaataccaaattccttttacgtttatgatgtgatatcactccattattgcataggcaaatatacagtgtccactaggaaccatgaggcttaatcctgtcctatatagcaagattcacagttgagtctcttcatacaaggtgtgaggctgtcctatttcagtaattcccatttaaagagattttgagttacataataacaggaccaacttatccaggttatcatctgcttccttgctgtaagaaatttgacgtccattggaatttaatttttgacagatgtgtgggcctccttttgtcacaattctgttttccttttttctttcgttcttccttattattgttgttgttgttgtagtagtggttatcattattattattactgggttgtgggttggggggtgtcatgtggatgaggggaaaggtaattttgtgtatcttactagtaaatgtggtcccttatgcagtattgacacagaaaattatataactaggtagtatatggcaaatatatgttctgactaattccttcaaactttttaatctatttgtttttccttgtttgcctgtcaaaaaaattaattctggaggaggggaaggtgattttgtgtatcatactagtaaatgtggtcccttctgtagcattgacacagaaaatttatacagctaggtggtatatgcaaaatatatgtcctagtcaattccttcaaacttttcaatgtcttcttttttgttgtttggctgtcaaaaaaattaattccttgaaattttatgtttaactaacaattggataattggaagatgaggctcggagaatacaatacatatataccactgctactgcctcttcatttggaaaatatgtcttgtgattaatttctttaatttctgtcaaattaacaattagaatgtggtattatattttttttgtatgcagctatgttctcgataaacaaacaatagtgtcctagtgcgcttactaggtgtttgaacttttttggccatgtgcacagtattcagaagttttattttaaaattctaggtatcaaaggagaatattcatcacatatctacgtgtataagatttcacgtctgacctgggcatattctcctttaaaagtgtctgtgctacattggtggttctgttttccttgatttttgctgggctgtccattcatcctgtgatcctttttgcaactttttatctgttatttttctttattagaagttacaagttattgcaatgcctattactgttaattctgatagtgactaaactttccacttctttttttttctctccctatcgtttttgcgattctttcagagacagcattaaaacttgacagtttggttggtgac

SEQ ID NO: 12030 - DNA, 5287 bp, Vitis vinifera
  Intron number 14 from transcript GSVIVT01020836001 (locus GSVIVG01020836001) derived from phytozome v7.0 (chr-ID chr 12; pos 1285966 to 1291252 reverse strand)
tatccaacatttagcagtatttaaaggacacagaggttagattaaattcttgaatgcttcttaattagcttttcatctcttctaagtgttggattgttccaagaacttctttattacttggagttttaggggcccatttggcacattcataacttctactgaaatcctgtcagaatggtctaatcatagaaaacattttgtaaagagattgctagtgtgtggtcactaaattttgagaacttatgtctctggtgattatagctgctaaagtacttaatctttgacttgacaatagcacttctggaattttatttcttaatttcttttttctgtttgtatggcgatactcctatttgctcattaaatgttgtaaaatacaacgaaacgagtactttgtaaaattatgaataacagatacaaggaattcaaattgatcagcatcatagggtgtcctaacttaccaacatgatatgaataagtagggttcaaaatcacacattctaaacataatgcattcagatttgctaaaattacaaacttttagagagatactgaaattcatctaatacttgagcacaaatcaatatctaccctaatttgactagcaatgcaatcatgcaaagctcccttcttagtgtggtcttcagttacatctacccactagtgttatatgacattcaattcttgatcaggtacatgcttcatcatcattgtacatttgaaactcgtcatcagaaattgcatgttgcctaataaagttgtccatgaccatgcatgcgattattatgtccacttgtttttagtatggataattaagcaattgacataaaaccaaacatcttgcgttttgagcacttggagcatgttcgataacatgggccagattaaacagctcggggttccctcacttgattaacaaagtgaaaatctggaaggcagtacctttcttcctatatggtgctaaatctcctttattttaggagaaagttgcctgcatgttttggctgcaatgttctttccatccaatataagatatttgcttatctattggaagaatggccggaatgtgtgtcccatcacacctttacaatcctaacgatccaattagttcttttggcataaaacaatcaaatattattgagaaaaccatgtgtataaataaattcacctctgtcccatcaattgcaccattacaatcctaatcatcaaattagttcttttggcataaagcaatcaaacatgattagaaaaccatatttattaacaaattcaactgactttaaagtatgactggtacttaggatttccagaatataatgacaaattcttcatatgaagagggcctgaagatggttttgcttgagtgctggaattgttcttgaatcaatattttattttatttttttgcctacattatgtccaggtactgtaaaagtagctgcttgttcgctgctacttattgactaccattctaattgttgttatttttcaatattctgttaaggctcctcagtatgtgtttcttcatttggcattgtgaagtgtatccctgatgggctttctcccattgtatgtcaacttcctacatggctccttgaatgtgaagttatttaagtttcagcagactgaaaactgtggaaaagaatgatttattctcaaaaattaaatctaggtacaggtctactctcatatgtatacagctgctgctacaaaacgaaaaaagaaactaccatataaatccctacaaatcagggatatcaatcaatacagttgactatacatgggattctaaatttacatagttaccttaacaaaaaaatcctataattgtgtgacgttctaacccttgccctcaagctagtgaatagatattttccattcccagcttgcttgcaattggttggaatacggtacttgctagccccttcgttaaaatatctactagttgacgccctgtaggcatgtaaggtgtgcagaccaaaccactatccagtttttatttgataaagtgtctatcgacctcaatatgctttgtttgatcatgttgcgctagattatgaatgatgcaaatagctgatttgttgtcacaataaagcctcattggtcagtcccatctaaccttgaaataatcaagaataatcttcagccataacaactcacatacaccatgtgccattgctctgaattcagactcagtactagaccttgcaaccacagtttgcttcttgcttctccaagtgaccaggttcccaccaatgaaagtgcaatatcccaatgttgacctcgtatttaccattgagcctgcatagtctgcatctgtgtagtcttcaagggttaattcggttccctttttgaagagaataccctttctcggagaagattttagataatgaaggatcctatgaacaagttgtagatgagtctccttcgggttatgcatgaattgacttatgactcccactgcgtaagcaatatttggccttgtatgggagagataaatgagccttccaatgagcctttggtacatccccttgtccacaaccacatcttcacttgcttctacagtttgatgattctattcaataggcgtttcaacaagtttacaagcgagtgtccttgtctctttcaacaaatccaactcatatttgtgttgggagataaatattccttgtctctttcaacaaatccaacacatatttgtgttgggagataaatattccttgcttggagtaagccacttcaattccgagctagtatttaagcttgccagggtctttgatctcaaattcctttgctaattgacatcttagagcttctctttcctttaaatcattcccagtcacaattatgtcatccatatagactagcaaagccgtgactccccctgacttcaagtgtttaataaagagagtgtgatcaccctgactttgcttgtaccccattgccgtataatccgtcctctaacctcatcaaactctacattgagtccaataagaaacttataaatcctatgagcctccacggtctgtttgtaattattagcatcttcagtggacttccatttgtagtcgttgtacaaattcaaatcctaccaaagaagcttcaacgaactgaagtacttggtgatagattcttctccttgccgaatctcaccaagtttaagggtcagttcatacacttgggattgattacccaaatcagagtacatctgattcacattgtcccacaattctttggctgtggagtagcacatataatcggagccaatctcctcattcatggagttcacgagccatgtcatcaccattgaattttctgcatcccagattgtgtacagaggatcctctgatgccggtgccaccttgtctccagtcaggtacccgatcttctctctccccttaagatacatgtgaactgattgagaccatcttaaaaaattgtcaccattgaggccaatggtggtaatctgaacaggatgggatttagtattatgggtttgggttgcaggtttagttgctgggttggaagaggaaataagtgggtttgacttagaagaaacgtcagacatggctactggttaggaaaagatatacatagaaagaaaaaaaattgcaaaggtttttttgggtgaattagggcagctctgataccatgtagacagaataggaaaggaatatatttttttgtatttttattctatattcaaaactgtatacacgacttcctctttataaaggattttctcaacactataataggaaacaacttaacaacccaacaatatacagttgtctaacagattacaaaagaataaatctcctaatatcttgtacatttaaatttcctaatattttgctaattatctcaaccaatcctatctttttcaacaccaccaacaagccctttgaaagctcatggatggtgagtcatactggccccaatagaactctccatattcattgtagttacttgttttaaacctccttctatctggtgtatctagctatcacattttgacatttattttttgttatcttggaaatcatcgtcccactggtccctattgcttggtagacagctactacttagtctaagcttataggtggtttaaaaggtttcattagatattgtgtcacttctttttacaactctatagttgatacaccaaaaaacataaatgtttatactttgattgcattaagttattaaaagtgattattgggctttgttgttttgatgaacttttatttccatctgaagactagtttactataatgaggacgagaaccttttttctttgtaaaatgctacttttgatgaagactagtttactaaaactacttttgattattggattgccttatttagtgtagtttctgcgagttccttctttagtgaaagatactttgttaagttggcataactcctttgtaggaaagaaaaggatgaaggtgtggagggttgcttctttttgcattactttgataattttgcgggtacgaaatccaaaagcttttgaaaacaaggaatagactgatcagaagataaaatgttcattcctttgtaatctttagcttgggttaacatgtacataagagaaggcacaatgcctttgtttgattttgtagattgggtggggtcttgttgagagtaagggtgttttttgcggcttctcttttgtgacctttcttttatgtgccccttgtatatgccttgtgtactttggtttacttgtttcttttattaatttatacagccgtaaacaagattttgacaatgctgtattcttctcatagcccagcattattgaaggttgtttagactaaatcactaacctgtttgtatgttcctgaaggtaggtgttccaacatgatgttggcctgatttcatttttaggttttattcaaatatgaattcctaccattgatgtctgttaaatggtgttcagtttcaagtcctttgcactcaatattgttatcttccatgcactcatttacctttatatgcaaatagtcctctggctaacttattttgcttgatttttctatttttatttttccactcaaatattcttgtgaagttacaaaatgtcattatttcttggaagttgactttatatatatatatatatatatatatatattatgatacatgtaagaactctctctctctctctctctctctcatgcatgcatactcacaagtgctcatctttcctatgcctcataacaaccccacccatttctgcacagaggcctttgctgctcttaagctagtggaggagaag

SEQ ID NO: 12031 - DNA, 9431 bp, Vitis vinifera
  Intron number 4 from transcript GSVIVT01011337001 (locus G SVIVG01011337001) derived from phytozome v7.0 (chr-ID chr1 5; pos 8788635 to 8798065)
ggagtacagaggttagaaattaaaattctagtttctatatctgttactagtttctatttctgttgtcatgtacaactataagtctttattttgttttaagaatgttactaaaaagtgtgcataatttgtataccttgcttgactcttttgtcttattgttttatgaccccttttacattataaacaccatcaatctaggatgattattgttgctttttcttgtttacattacatatgctattttggggcactttgttattatatatgtgatatagtatagattgatcagctattttattcaaacttagatttattttcctaatatctaattcttatttcctattctcttttgttataaactgaaaaagctaatttataacaaaactgcttggtcctctctcaccctctccactccctccccctctctccccttcctctccctcccctttctcatttttcttttctatattctgattttattgtagcactaacaaacactggtgctgcatggactagtttgctaaatggtagtgcctttgttattttggttgtggcaattggtttaattggttgcaatccctgtagttctgtgtttgcataaatcctttggttagagagagccttaacttcaacataattggagtggagtttcttctggaggttcatggaaatgtgtggaattctgggtttatggatgattgtaggatgaaattagaagatattacaggttgtaattagagatttgctagctgtatatagttgtagattattttctatagatagaagatagtttcctctcttgtgggatatgacagagttttttaaggaattaccaagctgttggtaatatcctatttccctataaatgtatatttctgcagagtaaataatatgaaagaaaattctcacaattatcttcatggtaacagagcaattccgcctggacctatcacttctttctcggttttaatccagaaccaattttctgggtgcaaaccaatcttcttcttcatcccaacttgttacttctttaagtttttgtttttgagtctagtctctcataggtatcacttttccttatggccttggaaaccagcagcagcgttacgggaaccatgtttggccaggaactcgtgagcaatggtggtgcagaaggttcatcattcctcatcactcgacacaagttaactggccacaattaccatcaatgggcgaaggtagttctgatgtttatcacaggtagaggtaaggatgaataccttttcagcactactgaaccgcctaagaaggatgataaaagattcaaggtttggaacaccgaaaacaatttggttatgtcttggctgatcaatgcaatggacacagaaataggtcaaaattttctgttttatgatactacacatgaaatctggatggcagcaaaggaaacatactctgatagtgacaatactgctgatctatttgacatcaagggagccctacatgatctaaggcaaggtgagatgactgtgactcactactataacactcttagtcgtttttggtaacaattggatgtgtttgagaccatggattgggagtgcccaggagatgctagtcgatacaaaaggattattgaaaaagaaagggtctttaagttcctattgggattagacaaatccctagatgaagtaagagggagaatccttggaaccaagcctctccctaccattcgagaagctttctcagaggttagaagagaagaaagcaggaagaagctgatgatgggaacaaggccattctccaatgttcaggaaggatcaacactcatctcccaaggctccacaaacattcaagaaggaactgcccttgtttcctaaggatctacctatgatgcaaggcagaagaaaggaagaccatggtgtgatcattgccacagaccaggtcacaccaaagaaacatgttggaaaatacacgggtagcccactgactggaagtcaaacaaggagaaggaggcacgagcatttgtggcagatcctaaagggaaagaaagaagtaccaatgattctgctctctttagcaaagaacaagtggagtggctgcaaaagatgtttagccaaggatcatccactaaccctgttatctcaaccggatccgctgctcagagaggtaacttcctaactgctttacacacaaaaactgaagattcatcaggttggatcatcgattcgggtgtctccgaccaatgacaggtgatatatcagtactccatgattgtagcccctgccatgagaattacaaagtaagaattgctgatggctctctttccaccgtgactggtattggaagagtgattatttccgagaccctaactcttaatcaagttcttttggttcccaagctctcatgcaatttactatcaatcagcaagcttactcgagacctaaattgtgtggctaaattctcttcctctcattgcttgtttcaggatttggcttcagggatgatgattggcaatgctaaggaaagcaaaggactctactggtttagggcagctagaaaacaagactctcaagcacatcatgtatctttctctactcctgatcctaggttaaacctgtgtttagattcaaataaagaaagtaccatcatgttactgcattatcgcctaggacacccaaattttatgtacttatcaaagatgtttccagcactatttaaaaacaaaaatcccaaacttttccaatgtgagatttgccaattttctaagcattgtcgtaactcttatccatcccaaaattacaaaccatcaaaacctttttccattatttatagcgacatttgggaaccctctcgtgttcacaatatctctggggctagatggtttgttagctttgttgatgaccatactcgagttacgtgggtatttctcatgaaggaaaaatcagaggcaggttctatcttcaaattctttcattccatgattcaaacacaatttcaagctaagatccaagtgtttagaacagacaatgccagggagtacttaatgttatactcggaaattatcttctagaaaatgggattattcaccaaagttcctgcattgatatcccacaacagaatgggatagctgagagaaaaaatcgacaccttctagaggtagcccgatctattaggtttaccactcatgtcccaaaacaattctggggagaggctgttttaaatgctacatacctaataaataggatgccttctagagtcttgaaatttgatactccatgccaaaccctttccaaaaactttcctctaaatcggattataactgatatacctctcaaggtctttagatgttctgcatatgttcatctccctccacatcaacgaagtaaacatgatcccaagtttgtcaagtgtatctttatcagttattcctcttatcaaaaggggtataagtgctattgtccttccactcggaaaacctataacactatggacgtgacctttcttgagaatgtacctttttacaccaaaactcatattcagggggagaatctagtcaatcagcaagcagaatatcagttttgggatgtgcccgtgcctgactttggggtgccagaacctaatttttccagtgaaccatctatggcaccggatggaccaccatcagagtcacgtcagattcaaggagacaaggagtccattggcaaagaacttcaagtttactcaaggcgtcagaagaaccctaaaccggtggacctacatcctgagcttcctcctgtgccttgtcaaactgataacccgaaatcaaatcccaccggagtcattcaaggtaatattgattctcctgttattactgatgacattgactctatggatgatctcaataggcccgtggcccatagaaagggagtaagatcttgtactcagcatcccatctcaaaatttgtgtcctatgagaagctatctcctaatctttgagctctcatcacaaatctggagagtattgctctcccaaactgcatacaagaggccttacagcatcctgagtggagaaaggcagtgaatgaagaaatacaagcactgcagaagaatgacacttggaagattacgaaattaccacaaggaaaacgccccgtgggttgtaagtgggtcttcaatgtcaaatacaaggcagatgggaggatagaccggtacaaggcaaggttggtggccaaaggatttacacaaacctatgggattgattttcaagaaacttttgcaccagttgcaaagttaaatacaatccgagtcttactatccttggcagccaaccttgattggaatttgcatcaactagacgtcaaaaacgcatttctcaatggcgatcttgaagaagaagtctacatggagattcctctaggcctaaaactctccagtagcaatgacctagtctgcaaactttagaaatcactctatgggcttaagcaatccctaagagcttggttcgagaggtttactaaggtgattaaaggagaggaattttcacaagggcgatctgatcacactcttttcattaagagatcgcctggtggtaagattacagttcttatagtctatgttgatgatataattgttaccgggaatgacgaagaggaaatttcccgacttaaaacagttctaagtaaagaatttgagattaaagatctaggaactttgaggtattttcttggcatggaggtagcaaggtcaagcaagggtatctttgtatcacaacgaaagtatactcttgacttgttgaaggaaacaggaatgcttggatgcaaaccctctaatactcctatggatccattcaacaagataggctcaaaagaagatatggttgttgttgacaagggaagatatcaaagactagttggaaggttaatctacttatcacacacaagacctgacatcagctttgcagtgagtatggttagtcaatttatgaacaatcccaccgaagaacatcaagaagccgtatataggatactacgctacttaaagatgactccaggtaaaggattattcttcaaaagagtggcaagccgtgacgtggagatcttctcagatgctgaatgggctggttccttaacagatagaaggtctacttcaggttattgtacctatgtctggggcaatctagttacttggaggagtaagaagcaatcggttgtggcacgtagcagtgcagaagcggaagctcgtgccatggcccatggaatttgtgaagggatatggttaaaaaggctgcttgaagaactccagctcgctcctcacggacctatgaagttgatgtgtgacaatgaagcagcaatcagcatcgcaaaaaatccagtccatcacgattgaaccaaacatgttgagattgatcgtcacttcatcaaagagaagatagagcaaaagatcatagaagtggactacatccttacacggcaacagattgcagatataatgacaaaggctgttcctagaacccaatttgacatacttctctccaagctgggaatgattaacattcattgcccagcttgagggggagtgtggaattccgggtttatggatgattgtaggatgaaattagaagatattacaggctgtaattagagatttgctagctgtaaatagttgtagattattttctatagatagaagatagtttcctctcttgtgggatctgacagagttttttaaggaattaccaggctgttggtaatctcctatttccctataaatgtatatttctgcagagtaaataatatgaaagaaaattctcacaattatcttcaaaatgcaaggaattatcatacaatattcgaattgcatagaattgtcatacaatattttaatattgaaggttctcaaagaaaaattttaaacttaaaaaaaaatgtaaaatataacatttgtgattcattactggtgcatccctagggtcaataaaaactttatccaaataactttgaacctgttattaattgagtgagcaatcatctccatgtagtaacaaaagaaatagtacatatagctaaccatttaggaaggtcaagaatgttagagaggaaaactctctttttcttatttgtcaccatgagcaataatggtacataaataagaaagatggcaacaacctgccatagataattccttaattctaggaccataaagttatccctaaaactaagggataaacacataaaattgaaatacgaaaatgagatttggaactgatccttatctctttatttaaaaagagataaacatggagatgattgcacacttgattaatcaataaagcatagctttctgccttttttcttcccttcttgcctcaaaacacgcctctcggatgtaaggaagaggttttgttatgaggattcatcctcaaacttcattcggttttttattgagttcgaacaggaacttgaagacgctctccttctcaacaattttctaatatttttggcaacattctggacaaccaagtttattctcatcaaacaggtctaggtgttgccaacacctattaagtgcattgaaatgctgtgtgactctgaattcttcccgtttcagatcattaaggattccttttacctcaaataactcagatgtattctctttgttcaagtaggtcgtttttgtagcatcccaaatttccttagccgtctcataaaacgtgaagtcttcaccaatttcattggttatgaagtttataagccaagacatgaccatgctattttctgatttccatgtcttgaacttcggatcttcaggtggaggtgtggtgacagctccagtgaggtaatcatcttttctgtttccacacaaacatcattactgactttgaccattggagacaattctggtcattgagtttgtgtccagtgatgggaagaacagaattctccacaccaccatgattattggactgtatgatttcttgaccgaaggttacctcggaagaggattcttgcctatctgtcgccatgcctatttcaccatttgaatttttcagagaaaaacaacaatggaggctgaggaaaggttataaggcaattgtaacttcacaatgaagttggacattatcttgagatgcttttcttccttgtatactagggcatatgctgaatttaaagatggcaaaggaattgtatgaaatatttgagactggacgccttcaaacttatctcgtagatctcccagaaacccatggattttatctgttttgagaatgcttcttgcttggctgcattaccaggacaatcataagtaacatttctcaaatatttaatctgttgccaatggaagtgctgactgggtacagtaatctgaaactaattgctccctctgaatctatacagtggtttccttcttaagttcataaatcctgacatgattatttttatctgcatatgactcataatgtatatcctgtatctccttacatgtatccatatcatagaagcccttataatgtttggttccattgaattagtaaccaggaagaagtcaaatcattagtcatgacccaatccttatttttaggatctttgttcaatggtgttgcaagttttccttgaatgtagtgccactttcctttgcccaatatgaacttttgagctgctctagatcattgcatataatttttagaattgagtaacatagtggtaattctgagatttggaatgtcattttgctaaacaagaattgtattctcagaattaccgagagatactttcatttcagatatggcaaccattactgctcaaaataataactactaaaaaggaaaaaaaattgcagccacacttatctgtgtttttgacacccataatattgggatcacggcataaaagcttcaattaagaaaaaccattaatgaagactaggcagccacaacatcaacataccaagcgagccacatttacttcaatgatcaacaaccactggcattggctgattgatgtaaaattatatcagcaatgtatggtggaccagctatggggggattcagctgaacaatgtaaatttacatcagcaatgcaaggaggagaaaaactcttgactatgaagaaaaaaatctatgataccatgttgtttatcatggctatgaagaaatgaaaaaaaaaaaaaaaactagaaaaaaaatccagtcaaacatttatatatttagttggctggaaaatccttatataagagaattatggagttctagattacatagaaaaatttccttttctatttgatgatgtatagggttctagattacatcaaacttccaacaacaactagaagaatgatggatatgaaagaagtaacaaaccagagttagacctggattactgctgataccatgttaatcataaagaaaagaatccagtcaactatttgtatgttcagttggctggaaactcctcacatttataagagaaatatggagttctagattatataaaaaaccttcctaactgataactttatcaacacaataacattatctacaaataaaataaaaaatggataaacatataaccatatgataatagcagccaatatcttcagaagatgaaacagaatatactgtagtaactatccagttgcctgtatttgccctccaagtaattagacaaaatatggaactccaggaaaataatccaagtacccctcaaaaaagttgtactatattaacaaagtgtctaatatattaggctccacatggtgtgacatctaatatttaatggcactagggttatgtgattggctgctgtcatgcagtgtctttaaatcttatagcatgtgtgaattctagttaggtctttttccagatatgcattcagttctagaaggtgttggatatgctgttgctgaagatgcttgatgcctatttgacagtaatagtgtcatagttgctattatcttgggttaactcatttttgttctgtgacatttgttacatcagtcaattgctcctataaagtactgcatgtgtcatactctgcattctggtgagtgtaatgtattcggttcattctttttccttttttttttcttttaaattgtaaaggttgcattgtatatatatatatatatatatatatatatatatatatatatatatatatatatatctatattctttttcattctgaaaatctgatattattatagcattgagaaggatgtggcagttacatattttatatataatacacctaatagtagtggctacttctatatcttcttttttatttaatcatatatatgtatatatggctacttctatatcttcttttttatttaatcatatgtatatatatatatatatatatatatatatatatatttgtattcagatttccactttttttttaatttctaattacatcaactacctgaatgaaggtatctggcgattgcacgtactttgattgcagaag

SEQ ID NO: 12032 - DNA, 23061 bp, Vitis vinifera
  Intron number 9 from transcript GSVIVT01000818001 (locus G SVIVG01000818001) derived from phytozome v7.0 (chr-ID chr1 2; pos 562807 to 585867 reverse strand)
gacatcaccagtgtgtgatatgtggcagagacaaccatgagtgcttgctcggttagaagtctcttcaacttgtctgagattggctgtaaatttattttgcccgaaacagatgaggtgttgttcttgagtttattgtgtaagccactaagtaatgttcgatattgcagaaggatttggtttcttatccaatcgtttaattcttaaatgtgggagacctgatgattctgttccagaagccctcttgctagagaaacctactttgcaatctgggttggttgcaatcatatagcccaatggattcttctttatttccttctctcgactctgaatcgagaagacagcgtggggtcaacatttttcttttgggttgaatatctatttttggttgattggttggctgatttaaatcgggagtatgttgattccaagggccaattaatgtgagaaaggctcagctgatggtagcttggaaccatctcgaaaatttaaataaaataataatagtaataaaaatccttgtattgagaatcaaatgttctgtcacatgtaaaactttggaattgaatttaatcattgtgtctccttacagacatggtttatgacggactcatatatagagattcaccaaggtccgcgtcctgctgcaaaacatagaattactcgcactgggaaaagaaatcaaacaggtagtgagggggccatctctctgcaaattaaagtgttgttgcagagaaaaagataagggctctttgtacaacttcgtaattggctgggtgacggggtcccatcattcatctacatatatatttaaaaaaaattacattaactttataactgacttttaattttgaaaagatatgtgatttggggaatcaatctagaaaacatgtgctcaaataattaaaataatcaacatttcaaacttatctttaaactcttccttcacgtccactattttttctttcgggggaaatcatacaaccgtacatcgttaaaaaaaacttaacctttttagaactttacttttgttgtaaaataataaagtgaaagtaaaagaaaacgaaaatgagaaattagaacgtaggaagagaaaaaaaattaattttcattaaaggtatcttccttttatatggagtataaagagatatacattaatatgaaggatcatttacaagttctcataattcgataaattctcatattttataatatcttctcttaaatgatcataataatatgtttcattaaaaccttactagaaaaaaccctagtgaaggaaaaagaatataatattcttttggattacaactgtcccattaaaaaccttgtcagtaaaacccaaaaggacaaaacatgtacgaagggaaaaagagtatatcatagtgatattcttatcaattaacttccccctcattttgacatgattatattttctctagtagaacaacatgaagatctttgaatcgacgtatttcaatgagcttcttgagtattgcagtaaacaatgcttttgcgatatatgtttaattctatcacccttaatgtatcattctataataagacaattcatattattcatatttcattcgaagagaataaggcgactacatacctataaaaaattttgcagatgaatttttctctttttctatcttgagcattttttttttcttttctacctcgagtattcttctttttttctatatattcagaatgtcatgttgataacgtgttgtaaaataataaaataataaggtgataggagaagaaaacaaaaaagagaaattagaatataggaaaataacagaattaattttcattagaggtatctcccttttatagatatacatcaatatgaatgatcatcgacaagttcccataatccaataaattctcatattttataacaacttttacctttttaattttaatgtaaaatgtgaaaaaaatattactcatttatgtactctaatagtactttcacatttattccaaaattaccctcaaaagttagaagacaagtacaactaccactttaaaaaagttgttaaacaagtcatctattattttttttttctcacatcaactcacttgccatgtttctctttttttttttcccctcaactaccatgtccattcttacctattattattttttctatttttccttttgacttttttataatatgctcatgcattctctcataaaatttctttaattttttttttcactctctaatctatctatatttattgattttaattattttttggacatattaaacttaaaatgataatatataataaatagttaatataaaaaataaaataaaaacaaaaatatgtaatggataaaaatgaaaatattatcccacaaataatatacttcatgattttaaatattaattataataatacatttgataaattaaagtttaaatttaaattttcttttttattatttagagatttatgatataagatttttttacgttaatgttaaacaaaatatttatttattttgcaaatactatcacgtataaaagtaaaaatatatttttaatactattctattatttttattttaaatttatcatatcaaaatcacaatcattgatggtgtttttatctttccttttttcttatggttttaacttgatcgtggatctaacttttggttaaaatctttaattttttttaactaaaataaaatataaaataaaatatatttttttcaaaaaaaaaaaaaattgtatttaaccttttatattaatttcataaaaaaatagatacattcattactagggaaattgagaccctttggggactctcgataagtgattggaagtcatccctctccttggaaagaactttggaatcctaagtacatccatttctaggggaaccgagacccctatatccattatcatgctccatatattcctttggggaccctcaagaaggaattggaggttattctccacctaaaaacggactttggaaccttaggtacattttaaagaaaatgtggtacattcaatcctcaggctattgggacccttgtttctcttcccatggttcatttgttccattagggaccctcaaaaagtgattggaggtcgttccctacctataaacagactttagaatcctaggtacatctttaagaaaatttggtacattcaatcatcaagctaccaggaccctatatccctttctatggtccatttgatcctttgaggaccctcggaaggtgattggaggtcgttccctacactgcaatgaattttgaaaccctaggtacatcctcaagaaaatttagtacatccttaagaaaatttggtacatccttaacaaattttattacttctcaaaggtccctaaaggaacaaatggactatgagaagggagataaaggtcccaatagccttaggattggatgtactaaattttcttaagaatgtacctagggttccaattttcatttcgggatggggaatgacttccaatcacttcccaaaggttcccaaatgaaaaaatagactatgggaagggagataagggtccctgctgcccaaggattggatccaccaaattttcttaaggatgtacctagggttccaaagtatactctagggtagggaacgacttccaataacttctcaagggttcccaaatgatcaaatagactatgagaagcgatataggggtctcggtaactcaatgatttgatgtatcaaaatttcttaaggatgtacctagggttccaatgtccattccggggtggggaatgacctataatcacttcctgagagttcccaaagaaaaaaatggaccataggataagagataagggttcttgtagcatgaggattggatgtaccaaatttttttaagaatgcgccaaaatttcttaaggatgtacttaggattccaaagtctatttcaaggtggggaatgaccttcgatcatttctcaagggtccccaaatgatcaaatggatcactgtaaggaatatagaggtcctagtagtgagatgattggatataccaaattttcttaagaatgtacctagaattccaatgtccatttcgtggtaggaaacaacttctaatcacttcccaaatgaacaaatggactatgggaaagtagataggggttctagtaacccgatgattggatataccaaattttcttaaggatgtacctagagttccaatgtctattatggggtaaggaatgacctccattcacttctcaagggtccttaaaggatcaaatggaccattggaaggggtatagaggtcctggtagcccaatgattggatgtaccaaattttcttaaggatgcaattaaatattagttccggggtgggaaatgacctccaatcacttcccaagggtttccaaaggaacaaatggaccatggaaagggatataggggtcccagtagcccaatgattggaggtacaaaattttcttaaggatgtaactagggttccaatgttagtttcgaggtggggaacgacctctaatgacttcctgagggttcccaaaggaacaaatggaccatgggaagggatataggggttctagtagcccaaagattggatgtacaaaaaatttttaaggatgtaccaaaatttcttaaagatgtacctagggttccaatgttcgtttcggggtggggaacaacctccaatcacttcccaagggtccccggatgatcaaatggaccacgagaagggatataagggtccggtagctcaatgattgaatgtaccaaattttcctaagtatgtacctaggattccaaagtctgttctggggtgtggagcaacctctaatcacttaccgagggtcccaaatggaacaaatggaccatgggaatggaattaaaggtcctgatagcccaatgatcggatgtaccaaattttcttaaggatgtaactaatgctctaaagtttgttctaaggtgaggaacaatctccaattccttcccgggggttcacaaaggaatatatgaaccataataatggatataggggtttcggtttccctaggaatggatgtacttaaggttccaaagttcgttatagggtgaggaggacctcgaatcactttttgagagtccccaaagaaatatatagactataataagagagataaagggtcttgctttccctaggaattaatgtgcatatttttttttatgaaattaataaaaaatgttaaatacaattttttttttatgaaaaaatatattttcttttatattttattctaattaaaaaattaaagattttaaccaaacaaaaagttagatccacaattaagttaaaaccaagaaaaaaaataaaaacatcatcattgattatgattttgatatgataaatttaaaataaaaataaaaataatataaataatagaatagcattacaaagatatttttacttttacatgttatagtatttacgaaataaataaatattttgtttaaaattaatataaataatcttatattataaacctctaaataataaaatagaaatttaaaatttaaaccttaattaatcaaatgtatttgttagaaatttgaggctaatccaacctatggtaatcatcctagagggggggtgaatagggtgatggtctcttttcgtaaatttaaacaagtgaatgcaagagacaattatatgcaagtatataataatcaatatatagacaattgcatataaattaaagagtagggaagaaagaatgcaaacacaagagtttatagtggttcgggtgcaacccggcctacatccactctcctctagcttcaatcccgagcttgaggttccactaatccaaggcttccaaaccaagccttcaagcaatacaattggattatggttccaattcaccatcttggacttttggctctaagcaccctttacacttctcaagagatatcccattcttgaacaacccctcaagtgatacctcacacttgagaaacttcctctcaaagatttacaaatgaatgatcgctcaaaaatcctagcacaagaactttaagctcaaatgatacaagaaaaactaggattgaatggtgcactaaagatatgcaagttttgaaacaatggtgcacttaaaaatattcttccaaggctcaaatataatcaagaaagatttgggaaggttaagcttttgaaacaatgaagatttgagcctttttatagaagaaaaaagtcaaactagccattgggggttcgaccagtcgagctaggggtcgaccggttgactagccgttagtatttaatgtttggcaagtgaccgttgggcctcaaccggacctcaaccgaacctcaaccgaacctcaatcggttgaggttcaaccttgatcgggaagaaaaggccactgggagagagagaactttttggcctccctcaaccgatcctcggccggacgagcacaaccggtcgaccggttgaaccggttgagccatttttttggctcaacacccaacctttttcaacttaaaaccttttaacacaagtttgaaaatcatttaacacaaggttttagttgaaaacatgaaatcattcgattcttaagatatttaaaacaatattactcttggatgattttgatgtataaataaagaatgaaatgcatgaaagtcctagtgcaccaacaaccttacaaagagatcttatgaagctttggtcttgaaaaactcttctctttgaggtagtcttcttcttcatgatttcttcttggcttgatttgtctttgtgattgccactttggaaatcgtcttgcctaatcacacttgaaatatgatcattagttctaaaccttgtttttgttatcataaaaatcaagattaaccaaaccttggtttcacattattataattaatatttaaattaatcaagtatattatttctaggataatattttcattttttatctattatatatctatgtttttattttattttttatattaactatttattatatatattatcttttttaagtttagtatgtccaaaaattaattaaaatcaataaatatggagggattagagagtgaaaaaaaaataatattaaagaagttttatgagagaatacatgagcatattataaaaaagtcaaaggaaagatagaaaaataataataaaatatataataggtgagaatggatagggtggtaaaaaagggaaaaaaaaaatagaaatgtggcaagtgagttgtgtgaaagggttgatgtgagagaattaaaaaaaaaaaaaaaataatagatgcacttgtcaataacttttataaagtggtaggtgtacctatctttttaacttttgagggcaatttccttttttatattaaaatttaaaaggtaaaagcaaaattctaaaaagtttgattttttttttttttttttgtgatatatggttgcatgattttttttttctttttctttttctttttatagaatttttcattttttattattttgacaagacaaatgagatcatcattattgttctttttttataaaaaaaaaactttgacatgtggcaatcaccatatcacaagacttttcttttcttttctttttttccctcttctatgatatctccatcttttttttgtattttttttttaaataaaattaaaaaaatattggcttgatgaaatttttttaatatttcattttttatatatttattgattttaattatttatggacattttaaatataaaataataatatataattaataaataaataaataatgagaataaatttaatataaaaataaatacatgatgaacaattttggagatataggatataagattctctatatttctgctaacaaaaaaactaagggcatcccggctttagagaatcataaacttattaacattacttaataatactataaatacattaatttctttcatgttatagtacaatgcaagttagacatacttccatattgcctatcgtcttactccaagattgtctatttaaaaagtattaaaaaaaggtttcattgtggaaactcctaaattttttcttattttcactcttaaatgtgctcaaacttggagaactccagtgaactcatgaaacaaggtaacttctggaggttaagttggcaaatagatccccagtggttaagttagttgtcgctataaaagtgtgagccaaaagcctcttaattttggtatagagtgacacaaaatttggtgaccttggcaatatatgtgcaggtgtgtcaaagaagaaacaaaggatttggcaaccttgataatatacgtgcaagtgtgctaaagaaattttgttcttaaaattgtgggtctaatcttattaaatgaatcaatcaccattcttgcataataatatcctttctcacaatgagagtacttggaaaatgcaaatgcttctaacttcctcaaatcaagaatacacataaaatgaggcatttttgcaactgttcggtttttttcttgtcttgagaaagaacttcatatttactataccacaaaatatgactaaaatacaaacaaatatagttgaaatacaaattgcaatagataccaagaataatacaattataagactaaaaataacttaattttaccccaacttttccttggttttcctagaataactactactatactaacatagtatgctttaaaacactactctatagctctaagagaatttgttgtactagaacacttctgttatagaacaatgcttatttggaatattgatgcattcaaaataatgcaaccttgggatgatgctactactatattagaatattgttgctctaaaacactactgataaattatgttataaaccaaacttctcttgaatattgtagcttttagaatcacacaacctcataacaatgctactactatattgaaatattcttgtagtaggaaccttattggaagactagaacgtaagtcacttacttcatggattgatccacgacgatgctaagacactcaaaataataccttattgataacataaaagttattagaatgataacttaaactagcagtctcttaattagtgaaacactagaacaaaggttactagttcggccatgtatcataccatgacaattttgaaatagtgaaacaatgcttcattgatgatatgttgggtgatggaggccagttcccccattcatagttcacatgagttattattccaattcaacccctattgatcaactacagtgatgctatgaaggtttcacaattggttaggataatgcttcttctctttcattgatgcttctctggatcctagaggttgactgggataggaaaccaatgtactagaacaattcttcggattagattttatctaagaacattcagatcataagtatgaatttatttttctttagatatagttctctgaatagttttaatagttattttctttttcgttgcttagatctaaagagcctaggaccatatgcatgcaccctattgatccaaggctaaggaatgaagtaatttcgaattcctagcggatatctcatgggattgagataatgtgtctccttgtgtgatcctaaggatttgtgattatggaaactatgatcatagtaattcctttagtggaatttgacatatgctctttatgagttagaatatgttagttgatcatataataaaaggatatgagactcaataaatggaaaggtagtcttaagaggttggaaaaatcttcttcgttagattatgaacactagtccatgaggggtttgcatgtagtagatagtaagtcataaatctgagtttttcatcttcatataatttcataggataccagaatacaatcgagtctctttattggagtattgagtcaactttagaattagattatgagggagctattattttcaaatgggtcctagtagtctcctcactcgagctcatattctttgttgacacaatgatttaaaattttatggagaattaatcatttatgtgcataagggtgtacaaaaacaaggttgcataggattttatgataaattattttttacttatttagattagactattaattaattaggatccaatgggatagattaagttatataagcctaagatgaacttaagttacttaagcctataatgaggcctatataaatcctcttgggggtttagaattatacatagacttaaccattgcctttcatagagaaccttcatcatcttctccctcaagaaggttgtgtagtcacattacatatgtgttaagctttagagaaagattaatcaagtggaagattatcacagtaaacgagatcatcttcttcaattggaaacttgatctagaaaaatctagatcaaaagtaaattttttaagcgctatatctacagttttaatgttttattttctttcgttacatagatctagtgtccttaggcttagtgagagcatgtactaatgattttaaagatttcccaatagttgtttaggatgaagataattgatgtttttttttgccatgtcaagatattgcaataagatgtcaatatagtgttcttaaacgattatcttgatattagcatttacatgatgtaaccaaatattttcatagcaaaggaccttatgtgtacaagaaagtgtagagaagcatgatggtgctctaagatcttataagttgatggtcatctgctggttgagaatgatatagggattaatattgtcatcagtcaagatctggttacctactcagttctagatagaaatctataaggagcgcaatatattcttcggtttaaagtccttaaggattacaaaaataggaaaattgtgctatgtcgagcatatactcaagtatctttagagaacgagggattatgtgcttgtgttccaaagcattgagatagtatagaagggcaacatgatggttgacaagataccttctgtggataatctagtggatcccttcactaagacattgataggaagagcctttgttggtcatagagataacataggtttcatatgagtatctagtatgctttgatagcattatgctttgaggactaatgggagaatgttaaaatatagcccttaacagcataacatatttggaattcgttatttatttattgatattccagtttcacttttatttatcattattctatgcattatactatataagcattattgtttgacatctattgcattgtacataacttgcgtgcattaagagttgcatggaagatccaagcaatgggttatttacaaatatatgactttttcacaatcagtttgtgggtctaagcaacttattaaaggttgtagtgcaccacctcctaattggagtgatgactagtcttggctatcggaatgagtttcccatagtgagtgtactagtgtgtatggttacacattgaatagaacctatagtgagtcgtgacttaaggttatcacgtagtcataacctcaccaagttgtttcattatattatctctcaaccttgagagaatattaagtttgtgctaaagttacaagtggctttgacctacgagtgagattgtaacctaatcatacattccctatggattgggtcactgttgatggaagacgatagcaataggtattctcaacagatatactatgatatctcatgggattaagacaaagtgtccccttaggcgattttaaggagttatatttataaaaatcatagtcatagtagtttcttaagtggaacttgacaaaaaatctttgagagttatgacatgtcaattgaacacacaataagaggatttgtaattcaagaataataaaggtagtctttaaagacttatggttttcactttgttagacaacgaacactaattcatggggaaattgaatgtaatggataacatgtcacgaacccaagcacataatgtctcgttgttatttatatagggatactaaagttcaattgattctctatagtggaatgttgaatgaattggattctaagggagctagtactcttatcggtcccaatggtcctccttttgagctcatataccttgttggcaaagaggaaaatgtcgcgatatcgctgaaatatcgtgtatcgaagggtatcgacacgatatttcagggagaaatatcggtctggcgacatttcgggataaatctctagaaatcggctatatctcgcgatatatcggcgatttttcccgatatatcgcatggtcaacgccggtcaacggaatcaaacgcgctacagtgaagtcaatgtgctacagtgccactacaatacccttccccttttgctgtcgaggggatttgaacctcaaaccttttggtttggggtttaccccacttgccatctgggctaacttacccttgttatataatgtgcactaaacttatatatacttaaactcattatataaagaaaatattaaaagaatattttaaagatcaaattaattataattaaatgcaaaaatttcttttaattaattaccaaaaatataaaaattatataattttcttcataatgtttttaatatcattaataattaattaaatattaaaaaattatatatatatatcataatttattttatattgtttaatacaattgaattaaatggatcatattttaatattaatatatattttaaaattagacatattataatcaaatatcataatattagatgtaatttaataataaatatacacttataaaattcatatttttatcgatgcttacgatattattatcaaatatgataaatcatgttatacatatatcaaaattttcaataaaagaactttaaaatgtctattatacttctaattatattattatgatgttttccttacattttcatgagtttttgacaattttaagcttactgatatttttttccaaaatatctgccgatatatctccgatatatccgtaaaatcgaagtaccgatatattcgtgattaccgatattttcatccttgcttgttggcataagttataaggatcagattagctctaagttcacttttgtgcataagggtgttttggtaattatgtaaggttgcacaggggcaagtgaaaaaaatctttgaattagactaattgattaattagtaagctctgttgggttaattaatcaattagaacccaaattggactagattaagtgatctaagctcatatggattcaagtcacttaagcttagttaggaatcctataaatatcctttaggggttagagtttccatcactttctatcttccaccatccaaagagaaagaaagtcatagtctccacccttctttcctcctcagtggaagtgtgctaagaacaaggttaagttattgagcagaagatcgtgggtttctaacaactttaaggtcatcatcaacacttgaaatttaaggtttgggaacatccaaacctaaaggttagtactttaatcctaaagatcaattttttgaaaaattggtattgtttttgttgcttagatctaaaatgtctacaaattgtatcaaagttgatcctcgacctcggtgtgggggtttgtttagccacgttaggggtgtatgtctgtttggccccacaatcctgtgggacacaatgaggatgttgtgcgtgtataggggggtgtttgtgatgtcccacataagataggagagaaaattagtgtgactatatatgtatggactcctcttaaccttgtagtcatgttttaaagccataagggccccttttggcttagaatggacaatatctacatgttgtgcctgcataagggggtgtttgtgatgtcccacatcaaataggaaagaaagttagtgggactatatatgtatgaactcttcttaactttgtagccatgttttaaagccataaggaccctttttggcctagaatggacaatatctacatggctgggatacgggttgttatagacatgatgtaacaaaatatagtttcattaataaatttatttgttaattattcttgttccttggttatccttattaacattaattgttgtatgagcattcacatttctattacttacattgtacatgagttgggtgcattaggagtctcacagaatagctaagtcatgggttacttgcaagatgatacaaactcatagttaattcatgaatttagttaatccatcaaagactgtagtgcactacctcttgattggagagatgacttgtcttagttatcaagatagttttatcatggagagtaaactagtttgcatttacacactaaagaggacctataatgactcatgacattagttgttgagtagttatgattccctaattaattaactatattgcatgggctttcaatcttgagagaatattgagttggtattaaagttaattaattggtttgacctatgggtgagactctaagatggtcacatattccttacaaattatatcattgttgatcaatttaggtggcaataagtattttcaatagaggcatcataatatctcatgagtttgagacaaagtgtccatgatgggaaaatctcaaatctctccgtttcctcaacccatatcaaattagaagcatatataactatcctcaacttttctaaatcctatgcataatgaaaaaattgcatttttaaactttatacaaatttagaatatgctaataaaaaccatacatgagatttggatgttttcaaatcaattacatgcaatgaaaataaagaacgaagtcacaagaagtcttgtaaactcggagtcttttgcccaatggctcaaacctaatcttgacatacttttagtggggatggaaaatggggtgaaggctatactctctttctttgaaggtggaagacgactctctaaaaaagagttatggaaaccttaacccctaatggagtatttatagggttcccaactgtgcttaagtgacttgagcccttagtgggctcaagtcacttaatcgagcccaaaacgggtcctaattgattaattaacccaataggacctactaattaagcaattaacccaatccaaagactttgttcactcacccttgtgcaaccttgcataattatcaaaatgtctttatgcataaaagtgaacctagagccaatccgacccttataaccaatgtcaataaggtatatgagctcaaaacgaggatcactaggacccataggactattagctccctcaaaatccaactctaaagttgattcaacatcccactatagataatcaactgaactccagtatcatatgtaaataacaacaagacactatgtgctcgggtccatgacctgctatccattgtgtttagtcttcccatgaactggtgtttgaagtctaacaatgagaaagttatcagcctttcaagactacttttacttttcttggattatggatcctcttattgtgttcaactgacatgttttagctctccaagagcaaatttcaagttccacttaaaaaacttactatgaccatagttttcatgaacacacctccttaagaaattttatgacaacaaagcacaaacatggtgaagatttgtatttgtaagcctatggtttatatggctacaaatttactcttgtgtgggcgtgtttctttgagacactaaataagtgagtatatctagttatgaaggtttgaatttgtgaaagtgataacagtggctaatgtacaaaatacctagatttcctcattcccatccttaaaccgttaaggtgcatgtaagagggttatctaaatctaacaagtgaaatcatagtatacattaaaacttagatctagggaaatgggtgttttacctatgatctaaatgttccaagatcaaattttgttgatgaagggtttatgtgaatttcacagaccaacagatcttacacttgatggctatttcccaaatcttggcataagaggaggttgaatcctctttggaggggtggggactagggcttctctcactagaagtttatgtggaatgagtaatgaagccctaacccttaaaggggtttatataagcttccttgtgagtttaagtgacttaagcccatcttgagcttgggtaacttaatccaacccactttggtataattaattaattagctatattgagctccaattaatgaattagcatagtcaagaaagactattcatatgcttttatgtaaccttatatatttaccaaaataaacttatgcacatttatgatgtagaacccaaaaatccttaaaaaactatgccaccatggaacatgaggtcgagcaagggccaccaagacccataggaaaatattaactcccttaaaatccaattttgaaattaacttaatatttcactacaaagagtcaattgcacttcaatatcctatgaaattactacaagatactaactttaggtctgtgacatattattcactgtatataagctccccatgaactgatgtatgtaatctaagaaggtgaatactataaacctctcaagattacctccataatatttgagtcccagatccttctattatgtgatcaattgatatattcttgctctcaaatagcatatgtcaaatttcaattaaagaattactacaatgatagatttcttaatcacatgtccttaagatcacccaaagagatatgctatctcaaaccagtaagatatcataatgcttgtcgtgagtatacttgttgtcactagcctccattaatagtgacctaattcgtaggaaatatatgatcaccttaaggtctcactcgtatgtcaaagtcattaatgattttagcacaaactcactatccccttaaggttgagaacccgtataacatagcaacttggtgagattatgactacctaatagctaatgggttgactcactatagatatgtccaatgtgtaactatacacactaatgcattcaccctaggaaaaccatcctatgacccatacatgccatccctataattaaagaggcagtgtactattatacaaaatggattgcctaagttcataaaccaactgtgaataactcatctacttgcattgaaccaatgacttggatcttctgttcaactcttaatatgcctaaattatgtacaatgtaagaaatatcaaacttaaatgttttgaaagtataatacatgaatagggtatatatattgggaactagaatcatattataaataacaaatctgattattgttacatcgtatcatgtttttaagggatctatcttaatagttaatttgagcaagttgaagtttatcactagtgagagttggtaagtctatgctctagttctttaatgggggacaatagtccttgagtgaaagaccctaaatgaagtagagaattatgactttgaggatttcattgggatatagtaggaggcataaacacatgtccttacggacaagtccttaaatataaacttatgtgttcatggcttaatgtgatatgaaaagtatggaacacaataaggtagatttttattgcttaccttgctttattattttgtgtacttctagagatactttaatgctgcgatatgctgtgctcttagtcttgaattggattctatattactcatcctattcaacttcattttcagaacaaaataatacctactaagctttgttagctcaccctattaactattttttagattcaattgctataactccatgtaggtaagtgcaaggtgtcttattaagtgcttggaagagtttctttaaaggttattttggtacattttgggtgtgagaaattgagcatggtggtgtacaaaaacttaatgagttgtagacaatctctattgtaggtcactattttgttgtatgaaagcacttatgtgtatgcatatatatgtgaattttgacatcataagctggaaatgtaatctccattcattacaagagatctagtggcagtattaatcgtgcttcctcttgtgccaagatgattaagaacctatagcaaggcttttgatcattcaccctcttaagtcaagatgatcacattcttctcaggatgattgattgtggtcatgatcttttcttccttgagctcctagtttagccttcttcactgatcatttcataagttaaagtgggaactatcacaattcctagttcaatatgattaatcatttactcttggaacgattgatcattcctacacctacacgattgttcaacacaaccttctttacttagctctgtcctagtctttctctcatactccattctcctacttaataaaaaaagaaagctaaaaataataaaactcatcaaacaccgagatcaagggttgaagcatctgtcatgaggtagtttatgtacttcatgccttgtggaaaacatgaagcttttgatatttcctgttagctcaggaataaaacagattctgcatcaattgaatttatatgaattttaaagttacctggtacaggtatgggcagccttgctacaaacctttttgtggctgatgggcaaaatttgggggactctgagcacctggtcttgatatattggtactttttatttttattttcaaagccttatgactctagtctccattatgtgttgtataaaatttcatgttattcctgacatattggtattttttatttgtattttcgaacaggaactgttgagattttagctatagattttccaattataggtgatttatgtttcactttttatgtgacaaagcaagttattttggatcaagtatagttttgaattttttagcatagatgagctagttaatgagtcataaattacttttaaagctctttagactcattaaggtatatagtggttttaagtttcgcttgattcagattctatttgcataggaatatgatttagagtgtgtttagtagtgattctaattagtttttctaatctttttaatttttaaaaatttttattttttaagtattaaaaaagttataaatactttttaaaatcattactaaacacatttttaaagttcatttgataatgattttaggaagtgcttataaatcattctaatacttaaaaaatttaatcatccaagtgttataaagattaaaaatattttttaaaattattatcaaatatatccttaaaaaaaatgtagttttatacagagaaaatttgaatgatatctccaacttagattatatgtattcacaatacttccaacatgtgcttgcgccgaaaattttttcttaaccgttaaagacggttacttgggcactcttgagtagaatgttagattgactcacaaatggcacaaccttgagactgagtggttgtctcatttagcaccttcgaatcccaggtttctagttctcccaactctccttgcaagtaaagataatttcttctgcaacccatactcccgattcaaaagcatacatcccgcttccttttgaaatagcatgtataacattagaatttttcttcccctcttcctctctaggcataggatcatccccacttacggatatgttacgaatataatctaaacattgaattgcttcctcttgtcatatcacaaaatgggggtgtaaataaattcaatttaattggtttttaagtagaaaatgaactaaatcagtatagttgatttatatatgataaaaatcgaatagattagatttggagtaaaagaccgaaccaaatcaagtcttttaaggatggtttggttcaattttcgtggatcgatctttacctaattgaatggtcttttttaatccttacccaattgtatatttgtgtttgttttgaattcaaaactcattaatttgagtttattttagacatttaagtttaatttgtttttaaaattaattgaaatcaacttggattttatgttaaaatatatattgaacacatttagaattaatttgaccataaaataaattactttaataaaatttaatataaaaaaaacttatcaaatatcaagtaattatatataagttttagaatgtccattaaattcggtttttttatcaattaaaagacaacaaaattgaaaattgaatcgataaggttagttttaaaaattttcaaaccacttttttattattgaaaatcaatgtaatgattttttaaaacggattaaaaaataaagtattaaaattttttactacttaaaattttaaaattttttacaaatatgacccacctataatactaaaatatacttttttaaattttagtttttatataatagtttatattttaaaaaacaaataggtccacatatgatactaaagtattatttttctatttgtaacccaaaggtaagtgatatcatgcatacatattcaagcagcggccaagccaggaattttggtgagtggataaaataaaaaatgtgtgtattataataaatatagataaatattttagaaatgaaagcattgatatcatttaataaaataagtaattattgatattagctataaaagaaaataaaaatatataatatgataaattaaataaaaaaatattaaaaacattgacaaaagaatttaagattttattaaaagtttatcacaaatttcaaataatcttgggaagatttttttttttaaaaaaaaaaaagtaagaaatttaaccaaaatatttctagtaattttttaaaaatattttgctagagaacttttagaaaaaatttataatcacattaatatttttttaaaaatttaataattaaatataaatcacttggtagcaataaaatttttatttaaaagttatctagtaatataatgtcattattaaaacttaaatagtcaactctaaattaataaatgtttgatttaacctaaaaatttaaacatttataaaaatctttaaattaaactagagataacctactaacaaaaaaatatttgataaaatatcaaatatttaaataaaataaaattttaccaacaattaaataaacacatatttgaataattgtttacgcattcatgaattaacaattactttattaaacctaaaagcctaaacatttaaagaatttcaaaattaaacaaaacctaacccacaataaaaataataataataaaatatcaaatacaaaattataaaaaaatttaattggtatatattaggatttaaataaatttaattttattaacattaaattaaattaagaatacaaacaaacaaatatcttataaaatttatttaataaatgttatctaatttttaattctatctattttctttttcacacacaaaattagttgtttagaaggggcaaacttacatttttatttttttaactttctaaaattcctaaataaacaaaaaaaaatatttttaaaatttggggggggccatgtccccccttaagcctacggtggctccgcccttgtattcaagtctcattatttgcacctgattcatttgattgtgtctttatattataattccatggatgtgtagcattttaccttgccattttccaaacaaaagaagttttgtatttcaggaaccaggcattcttgtaaaatcctttttatctcaagagcagttgaatgtgaagaggagatggttttgtgttagatgagttagtgtgaagtttgtggcacctgaatttgaggtccataactgacaaagattactatcacttctcatgccacatgtttccaacactctggttgaattgaatgataaacgccataatcacattcaacattttccaaattgtacgactcttccgtccaaaagcaacccagattaatgatgtttccactatctactatccgcttcccaaagctcactgctcaagccacgcaacaggatttcactccacttttcccctcaaccccatcattttccctcaaattctaaatctccccaccctcgaaccctttcttcagaaaatagtttttctagattaaaaatcccatcccatcgtacagttttgattttttacttatattctaaccagatgcatatcgaatataataaaattacttctattgagacaagtgaaaaatcatttttcttcgggatgactattgtacatccatacgttatacttgtacatacatctctgtttctaatgtttttttaaactttattactttttgtttctgggatcggaaaaattaatcatgcacacttgctcaattctcacgtttatacatttttcttctgactttttcctccttttaacacaatgaatttttatgtgtctgggaaaacgaagcatgcctgtgatttgccaaacacccccctcttcaatccttgtggttgaccccaccttggtttcaaattcttactcaatgtcatgaccccacccatcacttctatcacatctctgtttctctctctctcttttcgtgtgtgagtctgtgagagaggatgaataataaaacccaattgtagattataagctgtaacatgaaacagctattacaagttcactgctaaaaccaaacacacctcccaaaccccaacacaatgtgctgctcgtcctggtcactctttcttccactgcttctactagtcgtcccaatttcttgttttccaccttgtgtctccagtagcattggtagttaccatgtaaacaagaacaagaacaaccaagcaccacccaacaacatggatccatctgaggctgaaactctcttcaacatcatggattccatgtcctctgaccatacctggagaatctcctttcccaatccttgtaattctgcttcatcttggccagggattgagtgcaaaccaggtcaaaatgacaagctactccatgtctctaggcttgattttgggtcacctccaaacccatcctgcaagaccactgccacattcccatcacaagtctttaccctcccttatcttcagtctctcttcttttttcattgcttcactcaaaccaaaaccaacatttctctccctctcctctcccacccctccaatgcctcttcactgcaacaactcagtctcagatcaaaccctgcacttgttggcccaatcccatctc

SEQ ID NO: 12033 - DNA, 11209 bp, Vitis vinifera
  Intron number 2 from transcript GSVIVT01013491001 (locus G SVIVG01013491001) derived from phytozome v7.0 (chr-ID chr1 3_random; pos 1719109 to 1730317 reverse strand)
tcagcggctagaagtggaaacggaggaaatttttggtaaattttctcatttttgtcttactttgtgcttttcatttattgaggtatgtttggctgcccagaaagtggaggaaaagcgaagaacagaaaattgctacgttatatatgtgtttttatttctcttgttgcggtttccttagaaatggaggaatgatttggggttttacttcttttagcgtccctggatatctcgtgtacttgagttttgccccctttttatttaattgttgtcttttaatttttctcctctatttgcctatctttttttttgcttttcttagcttgcaggacatctcatcccttgtatcttttaattatttcgtatacgatagaatttcgttcctgattttttttttttttaaaaaaaaaaaatttgtgctgtgctggctaaggtttttctccccaacttcctttcttagttcatgaattaatcaggggtttttatctatggatttttccccattgcatagtaaacccccattattggtttcttagcgagtttgaatttgagcaattttttttttttttttgtttgcataaagttatgctcttctttatggaggagagaattcagggaatgaaagaaaaaagggttttgaagcatcaccttttcatttgcgctcaaagaactccactcagctgagcctgaaaacataaagtcaaatttcacctttttatcgcctcaatcccttctgcaactaatcatagaattattgccggaaaaatgcagatatttgagtttacatgtttgtccccattgcaagcagtcaagtttgacatttgtacattttatattaatttatttttgtttattttttattttttattaacaataagtagcccctgatttattttattttattttattttattttcagttaggttgtttttgatataactgcatctttattattgtgatgagtgcttaccaccaaatttagggtttgttcaaattatgttggtatgaatattatgtttccctcatttgggtttatttgactagaaggttgcaacaccatatttcatgcatagttttgtttgttttgtttttgtttttgtttttgtggttcgtctttttttttttttggtttttgttttgaccgtaatctaattatactgctatttttgagtcttatagtgagcttatccctgagcagaaagtaataatgctttccatctatcatagttggagaaagttcaatttgtttttgtgatgtaggaaagcaactgaaattcagttttgaatattgatttttgtttttttggacttgcggaaacggaaaacgttaatccacggacctatatctagttggcttagttgaggtgaagttttcatacatagaaaaactgtgaacataattaaaatcttatttctgttttactcttcagttttcttggtcagcaaactgagagaacactccagtttgttttttccttgttgcttcacttgattgaatggtccaagtaggaattcttttggtgcttatgagtttcaatgttgtgtgatgtagatcattcttaggtcacaaaagagttactatagctttctattgttgtcattcttctttgcgagtggtaattgcttttggtcattatagaacatatggctgctctgcagatcctgtaaatgctatgcttggttgtcgacactactgaggaatagaaatctgaagtttaatattttccgtccttcagttcttaaggaaacaaaatgctcaactttaccatgatacaaggcataactgagctcatggtttcaattcctttgtaaaaaaaagaaaaatcatattttaaagcttaattttattttcctttccttttccactggtttctcttgaatgaaatgcagaatttggattgtgttttatagaaatccttttgggtgatagcaaagaagattttcacaaaagtgcgttaagtttaaattatgtaaacagtggtttttccttactattatactgttggaaatgtagactcaaaactcttactctctttatccctttctcttcctcacactcaaatgcacaaacagccacacatatttgttccccctttttgtgttattttatgtttctctgaaacactaggtttaagaaatgggattcaagtatctcatctattatttgcggatgatacgctggtcttttgcaaggactcccaagaccaaatggctgttctaagctggcttttaatgtggtttgaagccatttctggtctgaatattaacttggaaaagagcgaaattctgccggtgggaagagttgagaatgctgaggtcttggcttctgaattgggctgcaaagtgggttctcttccttccacttacttggggctgcctctaggtgctcctcacaaatcggtggttgtgtgggatggtgtgaaagaaaggatgaggaagagactcgctttgtggaagaggcagtttatttctaagggggggagaatcactctcattcggagcactttggctagcatgccgatttatcttatgtccttgatgcgtattccaagagttgtaagattgaggcttgagaaaatccaaagggatttcctttggggagggggtgcgttggagaagaggcctcaccttgtaaaatgggatgtggttcgctctcataaaatgaagggtggattggggatcagaaatttttctatcctcaatagggctctgttgtgtaaatggagctggcgctttgcggctgaaagcgagtctttttggaaacttgttatcagctcgaagtatgcggaagaagaaggagggtggatctcttgtgaggttggggaaggctatggggtggggttgtggaaggaaattagaaaggaaggcgttctgttgtttaaaaacgcttccttcactgtaggggatggtaaaagggtgaaattttggaaggacatttggtgtggaaacactcccctatgtgaggcttttccttctctatttgcctttgcggtatcccaagatgcgtgggtagaggattgttgggattatatgggggatgcggggggatggcatccttgtttttctaggtctttcaatgactgggagctggaggtggtggcgagtctcctttcggtccttcaaggaaagaggctcaatgttgggatggaggatagagtggtgtggaatgcttctaagaatgggattttctctgtaaaatccctttacaatactctggattctggtggtgcagtcccgtttccgtggagaatcatatggagcccttgcgtgcctactaaggtgggtttttttgcttgggaagcttcttgggggaaggtcctaacccaagatcatctcaaaaggaggggctggtctctagcaaacagatgcttcttatgttgtgatgatgaggagacaattaaccacatccttattcattgccccaaggcgaaggtgttgtggaatcttatgtttacgatgtttagggttacttgggtccttcagctcacggttaaagacactctccttggctggtccgattcctttgtagacaagaagcgtgggaagatttggcgggcagcccccctttgtttattttggacgatgtggaaagaaagaaataggatagcttttgataatgaggctttgtcgatccaaagattgaaaacctccttcgtttgtaatcttttgtcttggactaagtcttgtttagatggagagccccactccttaattaattttgtagattggttgggctctaattgagggttggtgagtgtatgcttccttgtgctttttgtttttggggcttctcgtgtatacttcctgtatgcttcgggttgccttcttgcttccctctttttaatacaattattctgtgtttacctatcaaaaaaaaaaagtgcttcaaaccatggtgatttaggagagggagtcctttcttgtgggctagatatcaaagggccagttgttgactctttctggcccaatcaatcctttcaaagatgagaaaacctgtagccaatgttggaaacaatgtttttggaggtctctcttgtgggttagggtctgttggcttttcttgccatctttccattaatcccataaatgtgggtcgggccaataacattacaatgaagctctctattggtgtaaagggcaaataagagatagcctaaagagatttccagattcttcgtcttgatagagcaagaagttatagccagtgacccttgccattggaccgaaagtgcctcagggaaaggggtggttgtctgacagcaatgaagctcttttggctgaagtggcttactacaaaggtatttcttcacttttgtttctctaataggggtgagctttctttttcttttctgcttcttcctccttaagaggttgggctcttggtcatttaattttttttttgataggttacaagtcttggcatgaggcttgagcttcaaatattcaaaggtttgtaatgggtagggtccttataggatttctatacatattttataagatatttaagtctcaatattcaacagttttactgaattgtacttttgtgagattttggtatagatttataagctttggtcttgggttcaagtctaaggttagagtgcacatagttgatcatgaacttagctatcaattgatcctttaaagggagagagaagaaagagattgagaagatgtaaatgagttgttggttattgtgatgattgactcatatataataattaatttcgtattattgataaataaaagagaaagaccactatgattgatggatgaagaaaaaggagtagacattaacactaatgtggggaattataaggtaattggatataattattattctttggatgattctactagtgatagcaatggtagtgttgaagattatttgatgaagccatgagagttggtgatgtcaagcgtcctggaccaatctcacatcaagaccaagagctaagcaaacacagaatctctctgcaacattggaatcactccaaagaaagaaaggattcgaattttagaaatggccaaaaaaactctctgcctttttttttttatcattccttaaataacaaaccaatattcaaatctccaactccaactaggaaagcattaaactcggaagaaataaactaggaaagcaatgaactcggaaagaataacagaaacagaattgcaacaaatacgtaagattcctaaaagtcctttacatcacataatagttccatggtttacggaattatgggatatccatccccctgatttgcatcaattgccggctctcctgaagaacttgactctggcaagttttcacgaatgtaagcatcaaagagatgtgggtgcaaacgcttgacttctgaagcttgcaaccatacagagtccgaatttggatgatttttccactgcactaagaacttgtaataccctcctctacgagttgtaacaaattgatggtcaagaatggcagcaatctcatctcgtggtgctgtattttctggaactcgcagaactggtgttgcctctggtaacggtattgcggaattttcatcgacatcacctttgaactccgtaagatcttctatgttaaaaacggggctaataccgaatctagagggtaattcaataacatatgcattggtgcccaacttcttggttactctaaaaggacctgctcggcgtgcatgcaacttggtaaaactccccgaggaaatcactccggccttaaacgcacaaggaccatatcgccttcattaaattgccgatccttgcgttttgcatttgctgaagctgcataagaatttgtatggatggtaaggcgtcgtttgcattcttcatggatatctcgcatatagctagaaaaatctaatgcaacctcacttggcctgggggggcaatggcaatgaatttacatcaagtggagtgctaggtcggaacccatacaccacttcgaatggagtgcaacctgttgtcctgttaacagaattattaaaggcaaattcagcatgcggaagcaccatatcccagctagtcacatgatctgccacaaggcagcgtaatagatttcccaaactcctgttggttacctcagtttggccatcagtttggggatggaatgcactagaaaacataagctttgtgcccatctttgtccacaatgttttccaaaaataactcacaaatttgacgtccctgtcagacacaattgaagtcggaataccatgcaaacggacaatttcttgtagaaatattgcagcaacttttgatgcatcataagttttgttacatggaataaaatgggacatcttggaaaaacgatcaaccaccaccataattgaatcatgttgtcgaagagttcttggtaacccaagaacaaagtctatactaatatgctgccatggtttgtcgggaataggaagtggtgaatagagccccgcttgctgcttggttcctttgtttaattggcaaattcgacatcgatcaaccactgtatgcacgtctctccgcatccgaggccaataaaaccgatcaacaacaatagcaaaggttttatcatgaccgaaatgcccagccaaacccccgccgtggagttccgtaattaaaaactcccgaaaagagccacgcggaacgcatagccgtgatttgtagaataagaaaccattgcgcaacatataaccattactagatgtgtgctgataagtggagagatcactccatatattgccgaagtcttcatcgttggcatactctatttttaaattatcaaatcctgcgacattagttgaaaacacatgtaacaagtgtggtctcctgcttaaggcgttagccaccttatttttcagcccttgacttatgtctgataacaaattcaaattgctgcagataatccatccaacgagcatgccgtgcattcagtttattttgggaacgtaaatgcttcaaagagtcatggtctgtataaagaataaactctctgtggatcaagtatggtcgccaatgcttgagagtttgaattaaagcgtagaattccatatcatatactgaatatcgtcggcgagtatcgttaagtttctcactgaaaaaagcaatagggtgcccttcctgactcaacacacctccgatgcccacatgtgaagcatcacaagctacttcaaaaattttaaagaagtctggtaacttaagtactggtgcttgtcccattcgttttttaatttcgagaatgccttcgcagctgcggtactccatagaaattttttttctttcaagcactcagtgattggggccattatagtgttgaaactgcgaataaatcgtcaataaaacgtggccaaaccatggaagcttctgacctcagaaaaattctgaggtgttggccagttctggataggcttgcacctttgcaggatcagcctcaacaccttcatcaaaaattataaaacctaaaaacgtgacacttttcttcatgaacgagcatttgtcccgattaatataaagttgttcggctcttagaaccttcaatacctgctcaacatggcttaaatgatcttgcaaactttggctaaaaatcaaaatatcatcaaaataaacaacgacaaattttcccaaaaatggtttgagaacttgtgtcatcacacgcatgaaagtgcttggtgcgttagttaatccgaagggcataactagccattcgaacaaaccatctttcgttttgaaggccgtcttcctctcgtcccctgaccggatacggatttggtggtaaccacttcgaaggtcgatcttagtgaaaatagatgagccacatagcaaatccaacatatcatcaagacgaggaatgggaaatcggtacttcacggttatcttattaattgctcggctatcgacgcacatcctccaactaccatccttctttggtgtgagtaaaaccggaacagcacatgggctgagactttcttgaataaaacctttgtctagtaattgttgaatttgtcggttgagttcttcattctccgctgggctcatgtggtagtgtggtaaattaggcaaagttgagccagggattagatcgatagcatgctgcaccttcctcattggaggtaattgattcggcatttcacccggcatgatatcctgaaattcttccaacatcgccgtgaattctgttggaatattactgtccacctgctttacttcacgttttatgaccataagcaacatatcaccctcatgcaagacttgagaaaattgtcgcatcatcaaaactgggactgcttcttttcttgcctcaaattctgaaatctgtaagggatccaaaacaaatttcttacctttgaaagtaaaagagtaagtgttagcatacccatcatagaggaccctccgatcatagagccacgggcgtcccaataacatgtgacagactgtcatagggattacatcgcaccaagcttcgtccatatatttttttcccaaagaaaatttaaccaagcaccgttgcttcactaagactgaattggcttcattaacctagctgatcctataaggagtaggatggttctcagtctttagccccaaacattcgacagctgtttcagagaccacattcatgccactgccattatcaataataacattcaaggcccgaccattatgctccatacgagtgtggaaaatattggtgcgcagccactcgggattcgcctggaactctctcttagttctcgtcaaaactcgttggatcacgcagataggtaggtttgacgcacccaagtgttcttcctcactgtgattatcctcttcagtttcctctccatctgtgtcttcaacatcgtccaccattaataattctttttcacatataaaggctagttttttatctcttgtaggacacacaacagcatagtgtccgaatcctttacatttataacattgcggcccttcactggtgacttttgcttttcccttctggtctccacttgcagcgcccttagattgatcttttagcaatggaggcttttggaatgaaggagtggtaactcgttcctgtcttgaatccattgacgacattttcctcccaaacgaaggccccatttgtttctcaatacgaagtgccatttgatacgcctcctccacgttgattaaacgtgcagttcacatttctttgcgtagttcactgcgtaatccggtacggtatcgagctaaagtttgttgttcaatctccacgatcttgctacggacagtcaatttgtggaagcgatccgtaaattgatcaacacttaatgacccttgcttgagttgcaacatctccttgaacatcatctgctcataattaataggcaaatatttttcctttaatcgctctttcatttcttcccagttagaaactgttggtcgtcgtgtacggcgtaattgttcttccacacttccccaccatgctcgtgcatgccccttcaatttcatccggacataaggaacctttctatcctccgatacatcaaaccaatcgaaataatcctcgatagccgttaaccagtcctcaaaagcattgggttccaattttccaaaaaagtctggtacatcaactctcattctcttggtcagttcatcaagaggttgataagctgcacgatgactagcatgacctcagtgaaaattttgtctatgacgtcgggttcgcggctcattattctcaaactcctgattttcttcttcttcttcattttcaccagcatctccatcactttcgtccaacctttccccatcacgaactgctctacgccctctccgattgaagggcccatattcctctcgagcgtgtcgctcatccatgacatctagtcgatgagtgatttgctccaacactgtggcgatttgatctatttggtgctgcaactggggatggtttgtgttttggttatttgggttttggtcgtttgtattttgggtgtttgccatggcatatgaattgccactgtgggttacaggcatggaacctgctctgataccaaattgatgtcaagcgtcctggaccaatctcacatcaagaccaagagctaagcaaacacagaatctctctgcaacattggaatcactccaaagaaagaaaggattcgaattttcgaatggccaaaaaaactctctgccttttttttttatttatcattccttaaataacaaaccaatattcaaatctccaactccaactaggaaagcattaaactcggaagaaataaactaggaaagcaatgaacttggaaagaataacagaaacagaattgcaacaaatacgtaagattcctaaaagtcctctacatcacataatagttccatggtttacggaattatgggatatccttccccctgatttgcatcagttggattttgaaagagaaaaagagaaactaaaatagaaactattgataatgacgaacgattgatatatcattttttttttgataggaaacgattgatatatcatggattgtatagttttcttattattcaattttcatgtgattttattagtattgtatattttttgaggttttattatttattatttttattttgtctaagttgaggcttatgtctcacctcatttggacaaaacgcctcagaatcccctttagccttttgttggaacaagcaatcagatcatcatttacatgcatctttttgaattgggctggaatatacatagatgatccttctatgactgtgatagtctttgtagattggttgagtttcgacttaggagatgtcaattatttatttatttttttgttctcttcctttttgcttgtttgttggctcaccttatatttatgatatgtgcttttgtgttccttttttgggacatttttaatatgcctctttgttttgcttattaaaaaaagaggaaacaacatgtgattctagttactgtcttgcacgttgtgctgtgtgaatagctgtcgctataatgtaaaaatctccttttactggttttgcttataaaaagtttgttgatctagttagaatttaatatttcttcctgcttgattgtttttattaagaatgaattgtcatctctctgtcaattgaatgacaatattcaattgggctaacaggcttgaggtctgtttttgtagaattaaaaagaattttgcatctctattgttccttgttcttgtttgccacttgatatggattatttcttgcagtgttgttttgaagttttccctta

SEQ ID NO: 12034 - DNA, 4702 bp, Vitis vinifera
  Intron number 38 from transcript GSVIVT01028990001 (locus GSVIVG01028990001) derived from phytozome v7.0 (chr-ID chr 5; pos 10266120 to 10270821)
aacttaagcacataaggcaagccgttggattcttggtatgcttcttttttttcttttctttttttaaagcaccatatgaatgccactgctctatattttattgttattttaaatttgtacagttctctttgaatgttgcatttgttttcatatgcttagttattagctacagttgttgcatacttatccatgatttctccaatatcattgttcctgcccaccctcagcctaatgactgaagttttatttgtgaagttgatcttcacaaacatagaattttattttggtttctcttttgaatatattctattattaatttataattaccaaatttgtagtcttttaactatcagcctgaaaactatgcattacactgttgaatgacatggagttggatctggttgggacgtgtcaattgtcaagtataatgtaatctcttctttagtgaaagcattatttatttttattttttttatatcagaaacgaagaaaaatatattaatagaagaaaagatacaagagaaagaagagatacaacaaaaagagaagaaaacaagagaaggatgagaggtccttcccacaaaaaactgaacaaaagagaaaacacccaactttagaaaactaaaaacaaagaaaaaccccaacactctcaaacttttgaagtgcaaaccgcagtccagttgagttgtaaaacacttagaggaactcctctaaaagctgcagtacaaaaggcccaaagagaggaatggaaaagaagcaagtcccataacagcttgtctacctatttttcgaatgctggtcttccaagacttttgtcaacaaatcagcaacttgctcggacgtagggacgtatgacatggaaacaatttatttctcaatcttttcttttataaaatgcatgtctacctcaacatgtttaatatgattatgatgcattggattatgagttatggcagctttgttgtcacaataaagcttcataagaccaccgcttgaaaattttaattcttctaagactggcttcagccacaatagctcacaaatccgttgggccacaactctaaattcagcctctatattgcttctaccaacaatagattgcttctggctcctccaagtcatcaaattccctcaaacaagatacaatatcctgacgttgtccttctataatttactgaaccagtccagtctgcatctataaatgcctcttatgcgcctacctccattcttcttgaataatagaccttttcctggggttcccttcaaatactttagtattttatgaacaacctccaaatgcaccttacaaggagaatgcataaactgactcacaacactaatgaggaaagaaatgtctgatcttgtatggaataagttaatgagtttcctagcaagacgttaatatctccctttgtaaattggattactatcatctggctctcctaatttcagatttggatcattggagtatccacctgtatacaacccatcatacccgtttctttcaacaagtccaaagtatactttctttgagaaatcgatatacctattttgttcctcattacctccatgccaagaaagtaccttaagaaacctaggtccttgatctcaaactcagtagcaacaactcctttaagccttttcatttcatcatcatcatcttttgtcaagattagttgtaacaacccactcccaactatgtcaatattgttcgctttgaacccaaaggtaccctcacggctttaaaacgtgtctacagggttaagaaaagttcatacttatatagcattaggaactttcccctctatccgatgtgggatgtcacaaatacctccctatgcagacacaacgtccccgttgtgtcctatgggattgtggggccaaacagacgaacacccttacggggccaaacaaacccccacaccgaggtcgaagatcggctcttataccatttgtaacgaccctctcccaaccgtgtagatattgtccgctttggacctaaaggggcccttacggctttaaaatgcgtctatagggttaaaagaagtccatacttatatagcgtcaggaactttcccccctatcgttgtgggatgttacaaaatttgtaatgacttgttctcaaccgtgtaaatattgtccgctttggacctaaaggggccttcacgactttaaaatgcgtttacagggttaagggaagtccatacttatatagcgctaggaactttcccccctatccaatttgggatgtcacaaacacccccccatgtaaacacaacgtcctcattgtgtcccacaggattgcggggccaaacagatgaacatccctacggggccaaacaaacccccacacccaggttggagatcggctctgataccatttataacgacccgctcccaactgtgtagatactgtccacttggacctaaaggggccctcgcaactttaaaacgcgtcttcagggttaagagaagtccatacttatatagcatcagaaactttcccccctatccgatgtgggatgtcacattagttgtcaaaataaacaatgtgaatggtagtcttgttgtctaaaaaacaatgtatgatctgtttgagcctaatcataaccttattgttgaattgttttagtaaacctatcagaccatgctttggatgattgtttgagcccttaaagaggttttttgatcttgtaaacttgcccatctcttctagattcatcaaaatctggtggtaagtccatgtatacttcttccttaagatccccgataagaaaggcattattaacatctattcctttctattgtcagtatgaaaaattgtatttttgtatgaaactgattttggatcatggaatgaacatttttaaaaatttgttaagcatttaatttttccttcaagaggtatacccaacatacatgtgtgtgatcattgataaaagtaatgaatcatttttttatttaagtgttttcatcctaaggatatccccaaagattgttgtgtatcatagcaaatggttttaacactttgtagggtcgaaaaggatagaaaatatgagaatgtttagctaactagcatgcttcacgttgcaaattaacaagctttttatttcaaaacaaagaaggaagcaaagtttttaaatacggaaagcttggatgacctaacctacattgccataacattatttcttgttctctagacatagatggagaattacaactagagatttgagcatgtttgttcacattggtgtccttcacaaagtattataatccttcatgttctctagcattgctaatcctctttcccaaatgcaagtcctaaaatttacatgaatcatatgagaatttgagaatataatccatgtgttttgtcagtttactaattgaaaggaaattgcatgataattttaagacatggacaacaaattttcaaaaaatattaagagcaatttctattgtcccaatccttgtaactacagaaaacaacccatcaacaatcttaactctaagtttcctggacttggggtgtatgacaagaaaaaacttgcacaacctgtcatatggtttgtagcacttgaattgatgatccaaggttcatcaaactcaatctaggaatttaaggctagggaaaaaatatcttttgtactaagagagaagtattggacgactgtgatagttgtgcaagagtaatcatctttgcaaattgctcttattgctctctactaagagaaagttgataggctttgggactgtctccatccatttttgtagtatcactttcaatcgctgcctacaattcccatgtcatatcaccatttgaacagatgggaccactgaaggtaatttttgtcgttaagtttgtgggttgtaatttgcagggggttactatctggaaaaacaatgggagcaattgtaggggtcggctgagaggtttttgtcaaaacctcggagcagtcatccttgctcacacctcagagcagtcatggcatttttcaccattttttttttctcaactgatttctagctctagtaccatgtaaccagatgcaggaaggaaaaactaatgcattgccattcaattcaaaagaagaaaaaactactgaatgaatggactcggttactaacggaagacctaaaccgaatcctttattctagggataaacaactttgaatttaaaatcctaaaaaataggattacaacctaacaaacagataactaaaagattcgaaataaaaaataaaaaaataaaaaaataaaaaaaataaaaaaaataaaaaacaaaaaaagaatagaatctttgacatttccattgctgtgtttttcttttttcttttttctttgtaataaaagattttgacaagtatgctggctacacatgacttgaatgactgaaaaatgatccattgttgatattaatctgtttctttctatatcctcactgccccaatttctgaattcttcgaaaatgaaagtgcttggttgtatttgatgtttatttgagactataacatattctcatacggtgattagctagtttttgaattacattttcttttgttggtagtataattttgtgatcagtgattactaaaattttttgttcctaggagataggattttattttatacatcctttcttaacttgattcatggtacactttgttgtgcaggtcattcaccaaaaatccagaatttcct

SEQ ID NO: 12035 - DNA, 2782 bp, Vitis vinifera
  Intron number 2 from transcript GSVIVT01021262001 (locus G SVIVG01021262001) derived from phytozome v7.0 (chr-ID chr1 0; pos 3130130 to 3132911 reverse strand)
cgcttatcgttcacgagaagttcacatttcaagaggtgactcattattgtgcattcctggttttacctgatcgtatccggcattgctttctttccttttcctacgttttctctgtgaccagacaggctataaagcttattctagtgcattcattacttttaagtcacttgagtctgagagccgtgcaatagagggctgttctgctccaggtttccccatttcatattgaatctcgcatacataatgacacgtttacagtctgctgtggctttgcttatatgcttaattattggattttccattcttttatattaatttacatgtgtccagtctgctttcatagtattgatgatagttacccatttattgtattcgagaagtttgtcctcatgtcaatgattattagagaagtttgcaccctatgttttttgctcttgaggtaagtttttaggaaaccaagccccacattgctacttgatggttggagtatggaggtagagtctattccaaggataggtttgagtcttaaaatcatcaaataattttttattgataatataggacttggagcttaaatttgaaggggtaagagttattttctagctctttacaataggtcaatcattatagtgatgataacttgctgaagatgtcctatagtttagtcaagctgtttatgctattccacaatttggttaaccttgtatcttccatgcccttgatcacgatggagttaaagaatgatgaagaggttagatattttagttgctgctttttgtagttaattcaatttggctcatttgaatctgtttcacctcccagttctgaagccagctaagaagaggatatccaggtaacaacctagttctttctgaaaactaacatggaagtcgaggatccataggcaaatagatattgacaaccttatttgaaattgatcattcaaggctgttgaagttgtcattgtcaattcacatatcttctcattttagaaggggaatggtacggaagcatgtctgtattcatatgaattgaataagcttttccaatgaggaggtgcaaatcctgtaagaagtgcaggtgggaaatactttggcatctattgttagctttggatatgccagatcctagattatgccagaatattgagtcagattggattttccagggttatttattttaacagatggttatattaaccttctaagtttttgaagtttgagcataagatttgaatggaattattgtgaataggatccaacagttgcgagattccttggaccatgctgggtttggtgtctttttagttctatcaagcatgataagtttggttggagggatgcttattttaaccttctaagtttttttaagtttgagtataagatttgaacggcattgttgtgaattgcagccaatagtttgggagattgctaggtccatgtgaggttgggagtctttttagtactgtcaagcatgataagtttggttgtaggggtgagcaaatggtatggagaatgattcaatgggatggaacttgaatttgcatcaaggaatggcatgggcttgcaggtttgagcagacaggcagtaaattaattcatttagattgttgtttttagatgttgtaatcccttcgaacacttagatgaacaggtcttatgctgggttgccaaggaattatagggattttgcattcttgattgcatggatgttcctgattttagtggataataattatgtgaatacgttggtgactgcaaaaatggaagtcatggtaggagtttttgttttctgctttagtaaaacttcagaatgctgcagatcagagggaattgtaggggttagtttatggagggaataaaggaagcaaatcttttaaggaagatcatggaagtaagaagatgggatatttcagtttttaggcctttaatttacttagattttttaaataaaagattgggagaaaaaaatcatctgttttttgtgcgtcttctcaagtagcattctaactgccatttctagaggctgcttttgagtcttatcattatggcattcacaggcttcgtcgtattgataatttcatattctgttcatctttatctttaaccaaagatgtgagaagtgtaatagtctttctgcctttgattgttctgatgattggtaagattcgttgtctatatgtatatgtcaatgtatagttgatgcttatttaggagagagtggatgaatactcttgaaatttacatctaaacaaataatggttaacattctttgattttgtgagattctttcaatctcgtgagtggggttgggttatgctttgtcaggtaccttgtttaaccttttgttgctgttcatgcttattatttcccatgatgtttggttaaccagatgagctatgaaacaactataatttacaaacttctgttgcaatttgatagggtggttttaattacttgacatctttatttacctttttctccctttttttttgtggggtcaagagccatttaacattttgctcaagttaatatagtaatacttgatgaaaatttgctattctgctatttttgtactattctattagttctagttgtctaagtaaagagtatctgtgttttgtcacactttcttggttctcaaatcccaatatcttgtttgctagtattatagttgtttttttgcttaattcttaatcttatagttgctatttggcctactgctattgttaatgtatatctattgcagatcttctgggcattttcaatatatttggaggctgt

SEQ ID NO: 12036 - DNA, 2120 bp, Vitis vinifera
  Intron number 7 from transcript GSVIVT01009811001 (locus G SVIVG01009811001) derived from phytozome v7.0 (chr-ID chr1 8; pos 11469298 to 11471417 reverse strand)
atcacagaggtatgcattttttttcttttgtcagattatcatcctattttaatttaaatcatcatattgctgcaacttgtctaatacttttttttttttgatagagcaacttgtcaattccttaatattgctttagaacttgtctttggataaatgtctattcactccagttaaaaggaaaatcgatgctgaatattttttttgccctaaatcctgtcctgagtgcaccatctctcttcctgttccactttcttattattgactaccacacctaaatcataacaaactagatcaaaatttgaaaggaaacagccgcttttcacctctgattggagggtaggattttctcaattggcgcatggaaaattttactgtcatagatttccataattccctcaccaaatagactctaagaaatctctataagtgggattacttaggtttgtctgtctttattggtgtgcctcatataaataccattagaattttttgctgatatatgtcagaattttccaaaacttcaccttgcttatgcatcaatgattagagttagctcttttttcaagacaaacagaaccaatgaaaaatatttattcaagtttggtaataaatgacctttgtgcattgtagtgtgcatgaacactaatgactccattcggttaaatgtatttgtgcatattttgaacttattattattgttgttgttgttgttgttcttcttatattaatattattattattgttatcatcatcatcatcactattgttatgattagttgttgttgttatcattgccatttttatttttatcttctcatcattttccctttccttatccattgttgacctaaatagtaatgacagtcaaaacaacaacggttgagatgaatctgatcataggattcctctgatatatagttttgctaaattggcataatggcttattgtagaggagatggatcaatactcttgttctagggaatccatccattgtttccttatcagcttagttgaatgattaactagatagtaaaacttcacaactagattatttaaggaagaaagtataggttagctttgtttggtagagttttttggtaatctaggagcacttcctggccgttaaggtgctttggagcatattggttaaaaaataaaaacacaatcagaagaatttgggcttagccaatgaagctgggttgagatgattttaccagaagagattccaaattttttatagttttattttggatatttaactcctttctacatagctgtattgcatatctggaaccatgctaattttcagttaagagtgtgatgtgtccttagtggtttgaatcttactaagaaaaatattctatatgtattaacctaagctagtggtaatttgtggttctgggatcatgttatttttcttatatgggattcagtggcaggacagtttgaggagggtgctcttgtggcctggctcactggcaagtgggtgagttggggaaggaggaggttctaggttttttcccatgtagtccaaaaagaaaacacccataaaaaataaaaaaataaaaaataaatatgtggtctctaatgctatatgtgatacttgtccccttacttttttttggcagagaaatatcttttaccaaaataaaattgtgaaagggggggccttgggtttgctccccaatggtcatcagttcgagtcccctcagggccactggaggtttacccggtcgttaacttcagggccccgtgggattagtcgaggtgcgcgtaagctggctcggacatccacggttatcaaaaaaaaaaagtaaataaataaaaaataaaattgtgaaagggggaaccattgaaagataagggtacttttgacagaagttagtaacatttgtaaaactggaagcaagtattactagttggattgctttttatgttcattaatgatgccatggtgatgcaaataaactgtcttccttctctgcatcaagaaggtagaccggagagagatcttttttgtttgattgtatacaaagccttgattacagtctcaatgcagtctcaattttgtagctattttcataggtatccagaagacttttagagctgaagactactgt

SEQ ID NO: 12037 - DNA, 14714 bp, Vitis vinifera
  Intron number 2 from transcript GSVIVT01022837001 (locus G SVIVG01022837001) derived from phytozome v7.0 (chr-ID chr1 2; pos 18910169 to 18924882 reverse strand)
aagctaattgggataagcatgttttccttaatggcttttaaactagatttttgtagtatgctttctaggaacatatcccaaataattgcagaacaaatatatggctaggacaaagtggttatgctcgtgtacttttaaatccattccagagacttatgaattaaattaagtcatgaaaagcatatgactttcatgtgagcacccttttttcaatcctcttactacttataaactgggcaatgaaatacctcaacttttttctcaagcctactctgttttttctcaagcaatgaaataccagtttaaaagaacacacgtaccttcctttgttttttttttctccaagaaacaaaatataaaggaacatttataaatctatatgaaaatcttacttgaaaatacacttaacctcaaggaggtgcttgtaccaatttttgacagcctcgtgatattcatgatgtttccattcccttgggagaagttgtgcaacatataagatacgctagcttattcaacattttaggatgaaaataatggaaacaattttaaactaagaggttagttgacattacatgggactatcaaagtcctaaaaataaactaacttaacaacatctaattaagttaggatgaaatgatagaaaagtttttaaaataagaagttagctgacaatacagtggaaatgatagaaaagatagtttgtaagtgattaacatggtgaaggcaaaggaactagtactagtggtctgatggcaaagagatgttaccagaatgtgctatctacccagggttactgatcaaaactgataaacaccctgctgcagagaaacttaactcttggagcccactttgaacttggccaggaaatgacagagaatcagaaccatcttcaagcctagacatattttgagactccaaaggttcacaaccatcattttgagggctcacctctctcctactaaccatagatgtagaagagctaaaatcaaacctaatggttcttttctccaacttgctattgtaagataactcattgatgatgaaactgctattatttgattcttcaactacaaaaacaagagcaaggttctctacttaggttttgtacttaaaccattacaactttctagtatgcttttctaagagaaaaattcaacttggaaaaaggcaagcacactattgaataggaattgttgaaataaccagaaatcaaagttctaaaaaaaacaactttaaccttctacttagctaacaaactttcatttctttcctataatgaaatatgcatcagactgtaagtacacaaacacaaaatgtgaatgagattaaaaataaaaataaccaactgtaagcctccatgagggaaaagaatatttaaaaaataataatgaacaacatcaaccaaattttgttatcttatcaatcaaaggaaaaaaaatattaaatttatcatgttactttagaacttggcaaatgtaaaccattttgtgaaagtattgcagttgaccaactggttctaatgtattcataaacaaggactaagtcatgattcctcaacaattgcaatttcaagtgggttaaacgcaagtcataaaaaaattaaaaacaaagatttttccaatgaagttttatagcatgttttcatgatttgtgggtaaacaaagtgtgtgccacttgttaatgtgccttgtagagttgcttgggattgtgatgcagggttattaccaaatttaatgttctcacccaagttgtgcatgttttccactacctaccaatattattatgtattcagcaagaccattaatctaagaattgttcccaatcatgtcaatccattcacaaattttaatattctctgccccacttttattagctttttgtagatattttttttctctcaacaaaattatatgatgaaggcatgttatcattatatatttcttcttaaactaacattatctttaatcaaatattaaacatcttaagattcatttatttttctaactacttaaatccttagaatttaagatcatttggcagggtatcaaacttttcttcttaaagattcttgattttaagtgatccaagttctaaaatataataaaaattatagcttggttggtttggtttagccaaaaatatacaaattttgaagtgaacccattcacaccaaatcaatccttatctaaatataaccacacttacagaaaaatgcctatccaggatatattaaagtcaagccaacgaagtttccattgaaccacaaaccaaccttgtaaaccactgcctttatagcatatggggcaccaaatgaaaatttcaaacatcagtttcatgtctgacttcagttctgaatattaacaatccagccactcaaagttagtttttcttgcttcaaaagttaaaataggcattaaattcctgctattgaaatcttaaaaaatgaattaggaaaccttagagaggaaattcaagaatttaaagtaatactgagaaaactataaaattctttcaaatcctaagatgttttatatgatatagagaaaaataagagaaaatttagagcattaacctaacatgtcatctttggcataaatattcaagccaaatcgtatgtataaggtaaaatagttagggctgaacaataaaaaataaattaattaattagttgtaaaacaatagttagggctagcaaaaacgaaattagggttggacagaaactataagaatacttcaatgcttcaagtggaaaggatgagaagagaatatttactgaccttagacaaagtttgaaagtcttcaccatgaaaatgtgttaaaagagaatgagcttggcaatggtggatttgtttcatacagattttgtaaggaatgattttgctcactggccactcattgtaagttcgatttctagtcgattgctagaatcttggactttaataatggagcaatttgttgtcataggtgtttcaaagaaattgctagtagactgcccctggtgtgggtgtcagcatgaaatacactctccggtaggtcttcaatatctggttgtagcacgaaagttcttctcagagtgaaagagagctcgatatgtgttggtgggtttgaaagggaacttgatttgttcggggacatgtttggcagtgtgatgaaatttcagaaagaagtatatataatatgttaacaaatgacactttaccaagcgtcttagatataaaaaagtgaattttttaaggacgcttttataaagcgccaagaatttatacaataagcgctattattacccaaccttctagcaagcaccattgtaggttggaaatgttgacactttttaaaagcgccaagaaagtgaacatcattgtatacaatttttgtagtagtgaatgagtgacttgtcttattccatatactcatgagcctctaattctattctagggactaatttattaatatttactacaggctttcaatatgatgttctcactagacatttggtaatgatctttcttcaatgactccccacggaagacaacacccaagatacatgccctcaactctttcattggtaattttcaacacccaaggtcaactccccttggacaatcacaatagctctactcatggacaattataagaatctttatacacttctcaactctattcaagaattatagattaacaaaaagtcaattttatgctctgtttgtttggtacaaatcaagaacaaagatatcaagaatgaacaaagatttcttcccaagtagctcataccaaacaaagtcacttatatattctccatgactcaattacattaccttttgaatgggcaaggctgatttctgattttctcttacataagcatacatgggcacatttatggttagagaaatattttaattgctttggtccattttctgagggtaaaacaaaggagacgctcttcgtaatctgcaaattacaagttgttcttacatcattttgtggattgtatgaggtcaaaatgtgtgatatcttatacctaaccaaaatgaaacaggtgtgttttcttttggcttatgcttttcaataaataaggatttgttacttaaatttgtaacaaaattatttcaaaggttgttggggatggaaggtggagtgaggaaggttcttctttttcagtgcctaaaaccttaactggtattaaacagggagatggaaaggacgctactacaatggcttctatgtttctagtactgaattggtcaagtctggtcatgtttgaatgaggttgctctgtattggtttggcagtcagcattttaccagagatggtgtttgttatgcttctgcttgcataaagtgaaagattagcaattagtcacatttgaaaggcaaggatacaagaatataacatctttgttatgattttgatgcatttgtttctttcctaattttgatgtcattttgttcttgttttggtctttcttaggtcttctgtatacatggtgttgctgttgggatgatcacttagatcactctcatgtcccctattcagaaatcaaaactaggatcattttcttagaattgacaatgttcctgtgcttctctcattggaggaattcccattgtttgtatcagcagagtcagaagtttagaaagatcttgacatcctgacgaatactgtaacttgattcgttctcattcaatttcctaattctgaataaaaggaatgaaggacgttatgttaagcttcttcactctctttatgcaatagacaagtctgctcaagctcttagttctagggtacctaatctgcaagaattgatcaaatattactttaattggaattttccagaacattgctagtgatgaattacaaagatcacaccagcttttgccttttttccatgtcccacaacagctatgtactttagcttataggtcatgaaggattaagcaattaaagaagataggagtcatcatcatcacaagtcacagcatataatacttaagaaatagaaaattaaaggtgaaacatgaaatccattaatttataccccaaatgataccgaaacatgcctctgactagttgttgattttagaatctagaagtgctggaagcaacaaccaaaagttgtatatgagacaacgaaaatgtctactcttattgaatgataaatgcaacatttatacacaagtttgcaacagaaaacaatagaaaagcagcaaaaatagctggaactaacaactatttcttataaaatagcaacaacagcataacagctccatgaaactctatcaggttcattgactaagttgttttatggttgcagcctcaatttcagcatctcttcacacctcaacagccttcttaacagattcctaagcttcctcaattcaaaaacaactttcacacgtcttccagcatgtttgtagctactaaggcatttttctcaacactcctccttgacttgggagctacaaactccaagtctttttctgagaaattcaaacctagctcttagtagagcttttgttagaatatcagcattttgtacttttgttttacaatgtatcaaagttacttctccatcatgttgtatttctcttaagaaataaaacttgattttgaagcgctttgtcttgccatggaatactggattacttgcaattgaaattgcagcttgactgtcaacaaagacttgcgtgctcccagtttgctccatgtttaagtatgttaggagttttcttatccaaagtgcttgatttgcaacagtagcagtagcaatgtactctgcttcagctgtggattgtgtcacgatatcctgttttttagagcactaagagaaaaaacctgaaccaaaactaaagcaataacctgatgtgcttctcatatcatcaacgtagccagcccaatcactatcagaaaatccatgaaaatgaaaattctgcacctacttgaacttaatgccaaagtcaatagtgccttttatatatctcacaatacgttttgctgcctacaagtgaatttcactagcacaatgcatgtatcatgagagtagacctggccttgttggaatcaaatacatcaagcatccaatcatgcttctgtataactcttcatttactttttcagcaccatcttctttgcaaaacttttctttttgattcataggtgtggttgtgggcttgcattcctccatcttgaacttttttagaatttcttttgcatacttctactaacagatgaatatctcgtgctgattctgatgcacttccattcccaataaataagacatgtctccaagatctgtcatctcaaagacctcctccatttcagctttgaatttatccattaaacattgattgcttcctgttacaagcaaatcatcaacgtataatgaaataataagtatgtcaacatcaatttttctaatgtagagtgtggattcactctgactttttttaaaccccagaccaagcagatgtacattaatcctgttgtaccaagctcaaggggcttgcttcaagccaaacaaggctttctttagttgataaaccttgtcttctttgtcttttactgcaaatccttcaggttgctccacaaagatttcctccttaaggtagccatttagaaaagctgattttacatctagctgatagattttccaacccttttgagtatccaaaactagcaacatccttattgtatccaaccttgctacaggtgcaaaggtttttgaaaaatccacaccgaacatttgagcataacctttgacaaccaacttggctttatgtttgtttacagaaccatcagaattgagtttggttctataaacccacttgacaccaatggcctttttatgtgttggtctgtcaactagctcccaagtgttgtttttctctatcatgttgagttcctcctgcattgtaaccctcccttttttatcctcaacggcttcattaaaacctacaggctcaaacacagccacattacacctttgataaatattagaaagtgatttggtgcctcttaagggaatgtcatcaatattttcatcaagaaacttaaaattctgattttttttagcatcccaactccatttatcatcctccatgaatttgacatctctgctaacaatgactttgtcagcatgaggcatatagactctataagtctttgattggctgttgtatcctacaaaaatcccgacttctgcctttttatccaacttgtcccgtttcacctgaggcacataacaaaaacaaaggcaaccaaatatttttaagtttaacaacagaggtttatatccaaaccaagcctcgaaaagagtctttttttcaaagctttggttaggagtctgttcagtagaaacactacagtgtttgcggcttcagcctagaacttttttggtagccctttctcatgcaaaaggcatcttgacatctccattatagtcctattcttcctctccaccactccattctgttgtggtgtgtaaggtgcagtcaattggtgctctatgcctgcttcttcacagaaattgttagaatctttcaaaagtatattcagtgccattatttgtccttataacctgtatgatggcaccactttggttttctactagagccttgtacttccaaaatacatcagcaacctcagatttaaaatttaggaaaaaaatccaacaatatctggtataatcatctataaaggcaatatagtacttactacccttcaaagatggtgttctctgaggtcctctaacatcagtgtgtacaagttgcagtttgtgtgatgatctccatgtagatttctgtgcgaaaggaagtctggattgttttccatactgacaagctacgcaagtaggaagattttgcttcaggtcaggtagacctactgcaagttgattcttcttcatgtagagcactccattatgatgaaaatgccccaatctcttatgtcataaagctgtgacattattttcttgagaaacagcaacctactcttcctcaatcatattcaaggcaaagtttttgcctctcatcttgatcttgaacacatcttttccatttccatccttgatcatatagaacttgtcctcaaatagcaccttgaaaccattctcaagtagctgcccaacactcaagagattttgatcaatattaggaacaaataaaacatcagggataagtttcaaacctgagaggctttcaatggcaacagtctctttgccccttgctaagatgtattccccatttccaattcttactttggaaatggttgttttgtcaagttccttaaaaagcccttgatcataagttaagtggtttgtgcaaccactgtctatgagccaactttcagacgtgtttttgctggaaaaacaggtggcaacaaacaactgttcttcatgatattgatcagcagctgcaaccttgatctctcattcttgttgtgttttgcattccttctccatatggcctaattgaccacaattgttgcacttgacatctggcctccaccaacacttttgtgaaggatgatttgtttttttgcaatgaaggcaaggtggatgggctcctttctgattctttttattattgcttgacttgttgttcttcttgtttttctttatgtcttttctgaaatcattgttttgtgatttggcttgaaatgttccctcaacagatccttcttgtctcatcattctcctttgttccaaggcctgcaaagcattaacaatttctgccaaagatatacttgacagatctttagagttttccaaggaagagattgtggcttcatatttttcaggcagagttactaagattttctgaacgattttttcatcagaaaattccttaccatacaatcttaccttgtttgctatgctaagtagttgttcaacataatctttgatagtttgagactctttcattatggtcatttcaaattctcggattaaattcattacctgcatattctgcaccccttcattcccctggtactcattttttagatactcccagatttctgcagcaaactccatttgcatgattctggtgagaatggaaggtgaaactgcggagaagaggcaggccttggctttcgctttcgttgtttttctttccctgtgaatcttcatttgattgatactttgattgtctccaagtggtggtacttcataatcttcttctactgcctcccaaatatccaaagcttcaaggtggactgtcattctaacagcccatgcttgataattatcaccattgaaaactggtactgacagaaagcttgtatctccatccatttgaaggtattttggcttcactcaatcctcacaggtcccttaagatagaaggctctgataccaatctgttggttttagaatctagaagtgctggaagcaacaaccaaaagttgtatatgagacaacgaaaatgtctactcttattgaatgataaatgcaacatttatacacaagtttgcaatagaaaacaatagaaaagcagcaaaaatagctggaactaacagctatttcttataaaatagcaacagcagcataacagctccatgaaactctatcaggttcattgactaagttgttttatggttgcagcctcaatttcagcatctcttctcacctcagcagccttcttaacagattcctaagcttcctcaattcaaaaacaactttcacacgtcttccagcatttttgtagctactaaggcattttgctcaacactagttattcacagacagataataaacatgtcttctatttcagatatctcagctagtcctttgaccatccctcatgagtcaccttcattaactggtgctaagagcttctccaaaggcgcctgaagatgctgctattttagttctaggaatatgatttgtattatacaaggagatgttgggtgtgttactaccaaagctaagaaaaatccttttggtttcaaaaatgatgtcttcctctcaattaaccatttgttagtggatacatacattttatgtgcatctgtccatgtctttgcaattgttttctttcaggtggttatgacacttcaaactccaatcaccctttaatcttcttgattagggcatcatctccaatggaaaacagatgtctgactcagtagtccttttttctctgataagctaaactggcatcaatctttattgtttagtgtcattgttgcatgcaaacctgtgttttgcaaatcatgatgaactattagattgatggatatcctttgggttgggatggttcaaagcttcataatacaaaagactggcatgggaaagtagcatcttatgcttctttgcccccttccttcaattagagggttttttttttttcttattccaacacagcagttgaaaacagacacagaatattggggtcttcttgtacttagcaatgattatatggattttttgaagtattttcttctttgtaaggtagagacatagaagaagtcaaagcacctctcaatatgtgtttgaagtaccatttcaatctagccaatttcagttcagttgtggttgacatctaactgttccttttagggcatatctacttgccctaaattccaatccttcacagaagttgatgttcaacatcttgtgcttcaatatacaaattaactttgaagttgaattgtcagttctggtctcaaatgtccttacatacaaattaacttttaagttgttgccatggtcataagacatggtgccaagcagctctccaggtataataagtgacttgtcttctttatatatactcatgagcctcagattctccatgggctaatttattgatattcactgcaggctttcaatttgattttctcactggacatttagaaatgatctttctttccaatgaaacaataccccatggctctacccatggaagacagtagcaaagacacaggccatcttgatatatgaacaatcacatagctcctaatatcttcatacacttctcaactctattcaagaattatacattcatagccacttatatgttctccaaccatggagactatccttccaatctacaaattacaagttgttttcttaaatcattttgtaggttctatgtggttgaaatgtatgacatcttattgctaaccagaaagtgactgggttgttttcttttggcttatacttttcagtagctaaggtgtttgtagctttaatttgtcataaaattgtgacaaagattgttggggatggaaggtggggagcaccaaagtgaggaagttgttgttgttcattgaaggaattccaatttccatcttggttctcattgtttatatcagtagaaagattcatacatcatgaagaatactgtaacttgatccattcacatttacacttcctaattttgtaaaggaatgaagaatggtgttatgttgagcttattcactctcttcatgcaatacaaaattcactcctctgtgcaagttctcatttctaaggtacctaatccagaaaaaagtggtcaaacattacttcacttggaatttccaaaactatgttaccaatgatttacagatattacacaagcttttgccttgtttccatccttccttacctgaaccaaatccattctaacaactatgaacttttgattgtaacatgaaagcaattatttatatcccaagtgttattaacagacatacagacagacatactttatttctctagagtctggacagaaaataaagggagttgaatcagaatagaaaagaaacattcaattaagttataaatattatttacaacatccctttctcctattcatgaaatatttcttcacattaacaaccttccatcctgtgttcatacttaaaacataaatgtacacccactactatgtacaggtgtgtgcattattttcttctttccaccttataattaacttcattcttcttcatgtcaaatcaatcagatatgtataccattgcccatgaatattaaccgacactgtggctgctgccaccaatattacagcagttgtcaccactctatcaatcagatcaacagctctcacccgccagagtgccatttctgctaattttcttccttgagggcccttccctacaagcactactcctcttgcagccaaataaacagcatgggatattctctcaaacatgacatccccaggttgcaggctcttcaccaacatcctgctcataactgctttcctcgcttgaaacttgtcgatgttggcgacttcctcacaatctcttgaaaatccactcatgatttcaacaatttcttcaattcctgcctcttcaaaagggtccaagagctttgagacttcttcgccacacctaactaccatgttttccatctccatagggttggctaatgccagacggtttaagattagcatccatcagttcttagacaattaaggagggagagaatgaactccaaaattgcgcaagcaaatataaggacgggtcattggaactcaactaggacaaaattttccttttcctggaaaaatcaaatgtttcatgacaggagcccatctgtctcagtaatgtggagagctctaacactaccggcttatgtattcatggcagaagtgtgtcaacaaatattagcctgtaaggaattttgtacaatatagctttgacatattgaggattttcgttcaggccaaatgatggaacagtgtgaccaaaaaatatttctcaagggccaagctaattacagttctacttttttccttctttaccactgtcttttttcccttcatggccctcaaatcctaagtactctaaatttatatataatctatgaatggccatcaaatgatgtggaaagaatgtgtgtgtggatgttaaactacaaattcaacaaattggctaaccctgttaacaccaaggaagaaaatatcaagatatattggcaatatctcgccgatatatagtgtatcgaagaaggtggatacaatatataagtaagatatatcatctgatggaaatatcggtaaatttcggtgtcacaaatatatcggtgatacaagcaaaatatcgatcctaaatgggaaaaaattgctgaaatttcaaagatatattggatataatatatcagtgaaaaattggtaaaaaattaaattattataaataagttaactttaattatcttataatttattttgtatactaattaaatataaaacaaatataaaatcacaaataaaattatcaatattttaaaataaaaatattttgtatcaaaatgtaccaatattttaaaataaaaatcataaatatttttaaataacataattagtaaattttcaataatttagttttaaattaataattttattttattttgatattcaagtgtaataatagtatattaagaataaattaacttaatacaattttaaattaatataacattgaatttaaattagtacatttttacaattaattaatatattttcaatagaggtaagtaaattaacttaatatagtaatatatttaaattatataattagtatatttgtaataatttaacttcataatgagtctacacttaaaaaattcacatttcttattagtcaacactatataattaaatttaatatcgcaaatcatatcatacatatattaatttttcaacaaaacaactttaaaatgtctattatacttctaatttcatttttaagagtttttttcttacattttcataagttttgatgaatttttgatctatcgatattttgtggcaaaatattcgtcgatatatctcaatatatccgtaaaattcaagtactaatatatccatgattaccgatattttcatccttcattaacacctaaccgcacgagcagcctccttgcttgcacataggttcaaaaaaggttgtgatgtgaataatgatttgaattttgctggagacctggatttgcggatgcatcatttgattgattgaagatattttcttaagctataaccccggcagtcagtaacagggattgataagattcgggatgacattggtctacagccaccctaagctccagtacctgacaaaagttattgataagagtcttcctaccaccaccacttgcctttcatatttgcctttattttcattcatctctggtggggaatctgaagtccatatgggttgacgtgaattcccaagtcaacaaccaagtcgacgaaagaatttcaataaatgaaaatggtgctgaatgaccaaataaaaacaaattatttttttgaaaaggccttgacccatatattgtatgcaaggttatggtccttttatgatgtcaaatagtattaaaaataccatttttaataacattaattatttgaaatgaatatattgaatattcacgtaaaattttaaaaaagaaaaaggaaaagaaaaaaacttcttcttttcttgacatataatatattttttagtaattaaatattataatttacgaactaataaaataaaaatattaataaatttacattttatttttatcatgatttaatataaaaatgataaaatatttcaactgttttattgataaaaggatataggatttgtaagttcacatatccatgtatgactttcgtttacgtcccctttccttttcttcctttctccttgtattcttttcgtggaccactgagctgtgatgttttgtcaacaataacaatgcagaagtctgggctctaccaca

SEQ ID NO: 12038 - DNA, 5332 bp, Vitis vinifera
  Intron number 2 from transcript GSVIVT01030869001 (locus G SVIVG01030869001) derived from phytozome v7.0 (chr-ID chr1 4; pos 18041486 to 18046817)
gacgagttctcagcattcagtctcatactgtgcaggtatgggatttgcgtctggttggttttcgggaaagttgaaaggaaaagtaaaatttccagtttgactgttccgtgttgtgcacgctgtttgtggattgtgaggaaaggaagaaaatgattaaggagaagagccttccgctagcttttccatttattttctctcgtttttcttttattccgagaaccaaccagggtacatggaataattgtacaagtcttacgttagtagaaaaggatttttatattttacattcttttatttcaagggtttctcatgaccaaattggattcctgtgttttatctatactaattttattttggtttcttgttaacttgttatttaaatgtaatctgaatcgtgtgcatgtgtttggctgttattggtatagttgatcgagaagaatgaatgaggaatgtttgcattgttttgagtaataatttgtattcctataaagaaatgttttagcttctttgtttatgttactcgatatttatttttaggtttagttgaatggaatatctgtttttggttattatatttgatctgtgattgaggaaaatgaatggggaatgatcttcttgtctgagtaaataatcaatgattaagtggtaattgataagcatagttttgcgatctttgttgagatatgggttgatgctttatggtggagaatgcatgtctgaaatatgtatgcatctcaaataatggaagagaaacaaacagaaacagaagaaatacattggcacggaacagatttcttaatcttttatataaatatgtgtgtgtgtagatatgtatatgtatatatatcatgttttttgaccatcttattaaatttacagcttatactaattacaattataaaataaacaaagcagggtagtccaaaacatagttgttaaaaacttatgataaatgcagtatcttttttttatggaaattgatatgtattgcaatttgtctcatatcttaagcatatcttataatgcatatatgatatatgatttggtatgcaatataacaatataaatctacattcttgttgtcaaaggccatgttggaagttaagcaaatttattcttacaaagaatattggaaaattttcattttaatcatatgaatgtttacattatattggttatttattcattttccttgtgggttgggaaaggaatgatgtcaattgtaaaaagttggaattttggaacaaatataagtaaatatgcctagttaaaatttggaactataaatcatattttaaaattttaaaagtttatttttgttaattttgtgatgaacatatacattaaactcatattttgttgaattgagcttttcaaagctcttgtatttaatgtttttatacggtatgataaaggttaaaatctataaatcctaatatctttcatgaagttaattatatattgatgtatacttcatgctttcgatatatttgtatatgtctacatatatatatataaatttatttttcaccatataaacaacttacatagatgataagatacgatttatgagttaacaattgtggtccaaaggactagggaaaagtatgatttttgccacattatgttttgtaatttagttatagaactaacgaggtatacagtgatggatgcgtgggctgcattgtgaatttaactgaaccagctataaaatttgaatagaagaagatatgaaccaaaactggacagctttgtctctctgttgtggaccaaaatcactttttccatttgtgtggaaatgctgtacttttctcttgggtaaagtaacctgtcgattggtctcagttgaatactgttgtggcataatctaaatagaatttatgcaaggttgcttgctttttttaagccaaatgggcatatattccatcttaattatggttctataattggatggctcgcagccagaggaggggatgccattgtttcactaataagggggttttaagtttatcacctgtcttatttgattgtgaattgaaatatgcacctgcatgctactattcatagagtaaagtcagacaggaaacacaaggtcttttgttactgtagtctgccacttgatagtactagtgttctgaaagctgaaaccatccttctgataacttgggaagagtaaaagctggctaagaagagaatcagtcaataaaggagggagaatgcacaaaatttgtgaacagatggggatattaattgaaactgaaacacccttgtcttctttgtatttctagacatggtccaaccccaagcatccagcctatttggagatgcagtacttcctgctttggctattcattgtatggaagtagactcactctggtcttaagcaaggaagaagttgaatgtttactaagaaagtcgtgaacatccaagtgtcgcattcttgaggtgtgggcctatgcactgagagttgctacttcctctcaatctttctctttgagctgtagtgtggagtacactttattaatgcaattatggaattacttgaaatggagtgttgtatctaaaaccacctatcagaaaaaaatgtgttgtattctaaaccaaatataaatttctacctttcctaaggtaggaagtatgggtaattgttcagatttttgaaaaggttgatgtgcatgactgacttacactaaatagatatagaaggctcaagaacattgtgtgtctaagtgagatgcgacaaggtttgaggtttttgtggggggatctcgttcctctttgagttgaattttttagttattcttcttccctttttctttttgtttttatccctttgcattgggcctttcttggatgttgttatcattgtgcactttccttttttaccctcttcttgcagaatacctttgtaccccactcttctcttactttcaattcatttttaatcaattgttctttttgataaagaaaaagaacaaagttacatcaggtaactggagttgacatcgcactagaggcacttttgaaaggtttttgtccatgtgaggcactttgggagacgaaatgcacatggacaagtgccgatgcacctaagcatgtttaaaacttgaaaataaatgcttatttaatttggaaatgggattggcttgtaattgtcatggatgacacacatagtgaacatgttatggcataagttctcttggtattaatataagacacaaggccattaaaagatgctggtcccacgactcccaccaagttggacctaggagggtaagttagatattgccctgggcatggaatttttatgcaaagtagctgcccttaagactggatgcctgcatgtgcatgtgggtttattagtgtgagacttctcatgttaaactaggtcctagatcttttgttagttattaaaaaaaatatactttaaaggggaatagaataggaatttaagtagtagtaactatcatataatgtttgttgatgtctcattttgcaaagtccatattggctaatcattgcatgtcatgtttttaacttatgacatgtgagctctatcctaacatgacaaaatacaaggttcatatcacatgttcaaaacagttttccattaacatggtacttgatgcacggatagatccaatgcatggataggtccatctctttctctgcatcactccttatgccacaatgctacaacaattggatatatctgcctatctccaagcaaatacttgactcatttggttgctgacagaatatgaatgtcatctcttgaagggatgctaaaggtggtcttttctgttccacctcttggtgaaggtgacaccatgcgtacctaagagagatgatcgtttctttcctattttaggaaagattgatagttccctcccaaatcgatggttagatgatctcctatatcctcaatgaagatgttacccttggcataacgccttgatgctaaacgcttaagcaagtcaggaatatgctttgattagtccaaaatggaattgacgcatcttggtagggtagttggttgacctactatcgaatttcttttgaaggggtttgagggttttggtttagtggctagagttgggggcttctgaggcaaagttgacatgtatcaaacttattttgactgaaatgaaaaggaagggggtgtgaggtggttgtgtctctgtgacacatgtcatctcgagaggcttcaacgttatcatagaataattgatgtatgattttttattttggaatactatatataaaaggctccacttcttgccaaacaaaaggagaaaggaattcccctcccctaaaaattttcttattaattccaccaccactttgtacaatcctttcttgcttctcactcttctcaactctttcctcaagcttctgaaatcttaccatccaatgtgactgacctcttatagttaaaaccattatataaaaaaaaacctaaaatgcacacataaaagtttaatgatatatttatttacaaaatgtcatttccatgtgttttctttgctttttaagaatttatcatgtttgtattatgtttttcccacttgagcattgctactttaatccttaatgtggtaattttataggatggattaattttaattgctaccttcaagtggtaaagggttagggaaggtttgtgggatgtttctagtctcaagtcccaatagtgacaaaaatttacctatcaattctcttttttttttttttttttctttttcattgttgtcttcatatcttgttaaacgcttatgttatattgatactattatgtgactctaaagtatttatttctttactcataccctttcataaaagcaaattattatactttgcaatgcttgtcttagtttgattcttatcattggtaagtatcaaactctcaattgctactctatgtctttgctcaccttatcattttggaaaaagaataaatttccttcatacatttgggcactatagggaaatgaaagttataaaactatcctttcttgctttacctaatatttgaaataagcttatccccatcccctcatccaatagcatgtgtattaagataattctttacgtgcatagaaaaaatttaattttctggaattgacttgatttttttccattgccatttatagtttccttatgctacatgtactttgtgaaggatggatttgtgtatttaaaatggaataattcatttcatgtgttccaaacaccatttcaacataagcttatgtagttacatttaatgtgtttgtggtagattatatttgtgtcttaacttcattaccattttctatttccccttagggat

SEQ ID NO: 12039 - DNA, 16942 bp, Vitis vinifera
  Intron number 5 from transcript GSVIVT01029180001 (locus G SVIVG01029180001) derived from phytozome v7.0 (chr-ID chr1 1; pos 18877906 to 18894847 reverse strand)
gacgtattgccgacctgcttgagccaggagaaacggtaaacttctcttgtttatgttttccaggatccactggagcattacccaaactatcataatttttaatgtcttttaatatggatctttatattacagagctaatataaattatgatgtggtgagtttctatatgaaggttttttgtgcccccctaaagtatcaaattggagggtgatattgctgaactgattgtctatgttgacactatggatttttttttttgggtaccaccctcaaattttgtttgacactatatccttttctattacaacatttccaaagatgtgtctattccatctctttctattttccttcagtgctttcatgtccttattcaacctgaaattcaaattcccataaaatttatagaccttccatctctttttttattctgtcctcaaagcccttggatttggcccacatattgtcaacatgaaagggcttactttgttctaggtctccaaaatctagcatgatatgatgttgttgaaagagagagagagaaaggagaaaaaccttaattctcattcatttaatatctacttacaattgagatatatatatatacaaggctaagagtcctaactaccatacatgtgacctatattaacaaggaaagataatatactataaatacattatattcaacactccccctcaagctggagcatatacgtcatatgcaccaagcttgttacaaatatatttaatcctaggacctctgagagatttagtgaagatgtctgctagttgatcatttgaattgacaaaacttgtagcaacacatcctgatgcgatcttctctctaatgaaatgacagtcaacttcaatatgcttggtcctttcatgaaagactggattggatgcaatatgtaatgcggcctggttatcacagatgagtttcatctgttcatcctttccaaatctcaactcctgaagaagatgtcttaaccatatgagttcacatgttgccaaagccatagctcgatactcggcttcagcgctagatctggccactacatcttgtttcttactcttccaagatattagattacctccaataaaaacacagtaccctaaagtggaacgtctatctgtgggtgagccagcccaatctgcatctgtgtaaccaacaacttgagtatgacctctgttctcgtacaatacaccttggcctggtgtacttttgatatatcgaagaatacggattacggcatctcaatggctatcacatggtgactgtaggaattgactaacaacactcacaggaaaagaaatgtctggacgagtaatggtgagatagttcaatttacctacgagccgtcgatatctcccggggtctcctaaaggctccccctgtcctggtacaagtttgacattcggatccataggtgtgtctaccggtttacagtctaacataccggtttcttccaggatgtctaaagcatacttcctttgggaaaggaccacaccagaactggattgagctatctcaattcccaagaaatacttgagtttccccaagtctttggtctgaaagtgggtaaaaagatgttgctttagtttctgaataccatcctgatcactgcctgtaatgacgatgtcgtccacataaacaaccagataaatacactgccccaaggagttatgatgataaaaaactgaatggtctgctgtactgcgaagcatgccaaactcttgaacaacagaactaaaacggctaaaccatgctcgaggagattgtttcaagccatatagagaacggcgtaacctgcacactaaaccagactccccctgagcaacaaaaccaggaggttgctccatataaacttcctcggcaagatcaccatgaaggaagacatttttaatatccaactgataaagaggccaagaacacatagcagccatggagagaagcaagcggacagaagcaatcttggcaacaggtgagaatgtgtcaccataatcagaaccataaacttgagtatagcctttagcaactaagcgggccttaaggcgatcaacctgactatcaggaccaaccttaactgcatagacccaacgacaaccaactgtagatttaccagagggtaaaacaacaagatcccaagtgccattagagtgcagagcagccatttcatccaccattgcctgtcgccagcctggatgggaaagagcttcatgggtgctctttgaaagagaaacagaggatatagcagaaacaaaagcagaatagggtgaagataatcgatgataactcaaaaaattgtaaataggatgaggattacgagtagagcgagtacctttccgaacagcaatgggtaagtcattaggagaaggcagagccggggcaggtgaagccgaatggataggaagtgagtcagcaggtgcctcaggaaaagggagaggagcaacgacacgagggcgacgatgataaacctgaagtggtcgagggggcatagcatcaggtggggagacaatgggaatgggcaagacttcagaaacaggaagagactcagaagtggtggaaaagaatggtgagtcctcaaagaaggtgacatcagcggagataaagtatcgatgagtctcaagggaataacaacgataacccttctgaagtctggaatatcccaagaagaggcacttcatggctttggcggaaagcttgtcctgtccaggagtgagaatatgaacaaagcaagtacaaccaaagacacgaggaggaaggaaataaagtggttggtcagggaaaagaagggagtgaggaatctgatcgtgtaagacagaggagggcatacgattaatcaaataacaagcggtaagaacagcgtccccccaaaaacgaaaatgaacgtgactatggaggaggagagtacgagctgtctcaacaagatgtcgattcttgcgttcagctaccccattttgttgaggagtatgagcacaagaagactgatgaagaatcccatgatgagacataaacgaagtaaattgggctgaaaaatattccctggcattgtcactgcgtaacacacgaatagaaatattgaactgggtttggatttcagtataaaatttctggaaaatagagaataactcagctcgatttttcattaaaaataaccaagtacatcgagaatagtcatcaatgaaagtgacaaaatactgaaatcctaaagtagacgcagtccgacaaggaccccaaacatcagtgtggacaagctcaaaaggagactttgcccgattattcaaacgctttgggaacgagacacgagtatgtttcccaagctgacatgactcacacggaagcgacgacaaagtggaaaaacgaggaaccatcttctggaacttggagagactagggtggcccagacgattgtgaatgaggagaggagcatcagtggaaatgcaaactgcaggagatgaatctgaggtgaggtgatagaggccttgagactcacgtcctatgccaatcgtcttccccgtactccggtcctgcaaggtcacaaatttatcagaaaaggtaatagaacaattaagagtacgagtgattttgctgatggaaataagattaaaaggacattcaggagtataaaggacagaagtgagaggtagagaaggcagaggaagggccaaaccaatacctttagccacagtttgagaaccattagctaaggtaacagtaggtaaatcagaggtagtagtaatagaggagaaaagatccttattaccagataggtgatcagatgctccagaatctagaatccagggtccaagagaagatgtgtgggtaaggcaggtagaggcattaccaggctgggcaacagaggcaatagaagcctgagatgtctgagatgcggaggagctcggaggctgaggcagcggagaatcagaggactgggccatatgggcagtgcgaggaggtcttccatgtaactgatagcaacgatcgcgagtgtggccaagtttattgcaataggtgcaatgaggacgttggcctctacctcgggtaccactgcgtcctcctcgagaggtagtttgagaaactaacacagaagaatctgaagcgctatcagatggcaaagtctgagtggacgagatacggaggaggcgagcaaacacatcatccaaggacggaactgatgaactaccaagaatctgatcacgaataggctcaagatccggacggaggccaataagagtaaggaccatgaagaacttgtcaagctgtgtttgttgagccctaacatcaggagtaagaggcatcacagtcaagaactgctccttaagagagacaatctgaccaatataagtagatagatccaagtcctgttggctgagatggacaatagcagaagccaccttataaagacgctggatatcattcgtgtataatcctttggcctgagtccaaaatttaaaacaagttttataggcctgaagatgaagaagaatccggggatcaaccgattgccataatacactacataactgtgcatctatcttcctccactgtacgcggtcaacctcagggatatctgcctcctgggtaaccaagtgatcctcatatccttgacccataaaccaaagttcaacagaggcagaccaggaaagataattttcactgccaaccaatttctctgaggtaatcataggagatccagagataacagaggtaaagatctgatttttggtggtcatattcacgtatttggatcgaagagagccctaatacggcttcagattgcggcgtggcaccaccgaaaaagggagacggcctcagatcgcgacgtggtaccaccagaaaggtagaagaacacttcccaaggcacgtgcagggattggggtggagagaaagtagccggaacttcgtcggaaaggctgtttggagggctgacggagacaaaaatccccaaaagaggtacgtgcagggctcggatgggagaaccaggtaggtagggatgctggtcggcggcaggcgaggctggaggaggaggcgcgtcgccggaaaaggcctcacgcgccctcacgcgccgacgcgtgagatgcagtcgccggccggaaaatggcgcgtggatggcgcgtggatcgtcttttgatgccggtgccttcacaaaagttggagatctcctccaggcgctccttctggtatggtcagtgtcggaaaaataggtcgccggaaaagttcgccggaaagttcgccggaaaatttcgccggcggtgagtggtttctaacgatgatccgactgaccggaaagtgttgggagatggggagggtgaccggaaagaaacacagtcaccggaaggtttcccggagttgatgacacgggaaacaggaaagaattaggttttcttccttggctctgataccatgttgaaagagagagagagaaaggagaaaaaccttaattctcattcatttaatatctacttacaattgagagatatatatatacaaggctaagagtcctaactaccatacatgtgacctatattaacaaggaaagataatatactataaatacattatattcaacagatgtgattcaatgtagatcttggaaaaatactcaggacaagatcagggaaatgatcctcccgttcttttaatatgaggagattccaattttggccacatgtcaatatttccaaccaccaatcctggtgaatcttccttccataggcaaaccattctagttgtaattagcaataaaatcagagttataagtttaaatactataattgccaagttcagatgtcgacagagtgggagtgggtaggcttgaatgcaaaaagtgagaaatattgttattaggacaatattaatatattgaagaaggtttattggaagatgctggaattccagttacatactgaaacatagatttaaattgcttattcaaatatcttgtaaattttttagcatttttttattggtaaatgcacaaaatatattaataaagcaccaaagaggcactccaaagcacacaggacgtatataacggtcgccacaaggcaccaaaaaaggataagagaaacaaaaatactccctccctcgacaagaacccaaccaatcaatgaagttgaataaggaaaatggtccttcacctatatacaaattggtccaatacatcaaattacaaagaaacctggttaatagtctttggtccaaaagatcctcattatcaaaagctcttctatttctttccttccacaatgtccaaaaaaggcataaaggggctccatcccacactttttcctgtttccttccaacaaagtagccatgccaccctagcaaagtctctcttacattagatgacagcacccaagaaacaccaaacaaagaaaacaaaagctcccacaacatccttgccttttcacaatgtggcaaaatgtgatcaattgacttctctttgataagacaaagaaaacagctattagccaatatccatcctctcctttgaagctggtcaagaatcaatacttttccccaagatgcctcccaagtgaaaaaacacgccttaggaggaacccatgcattccaaacaaccgcttttggaaaggaaactgatctcttaggctcaataaaagtgtaaagaggcatgacagagaaagttccatcttttgtcttcaaaataccactttatcctccttgtctcccataaccactttatctttcagccttgcgaaggaacgcttcaaaccctcaatctcccaatcatttagatgcttggaaaaaattggggaccaaacacccccctcacttgattgagtccataaatccattgcccacgcctcctttgagctagctaagacaaataatgagggaaaagaaactcccaatgcctcacccccacaccaaatatccttctaaaattttacactcctcccattgccacctaagaaggagactctactaccaaaaaaactcccccaatctccttatggccttcataacctaacccggtacgcacctctcacctccttagaagaccaacccccttcattttccccatatttcccacaaactacttgcctttaaaaagcctccctttctgtagcaaatcaccaattccatttacaaagaagtgccatgttgagtaagggaaggtgcttaactcctaaaccccctttactcttatctaaacaaacagtagcccaattcactaaattaccccaaagaaaatccttttgaatcttctccaacctcaaattgactaaccttggcatctggaataatgacatgaaatagataaggaaactagacaatgtgctccaaatgagggtgagttcaatccctcccctttacaaatgtattgtcctttccacattgccaatcttttgcgaagtctctcttccactccatcccaagctgttgaagagtcatgagggcacttaagggaagacccaaataagtagaaggaagctcacccaccttacaaaccactttaaaggccaactcatttaagttttccacctccccattgggataatctcgctcttgctaagattaattttgaaacccgaaattgcctcaaatcacatgagtaaccaacttaaatgggttagttgatcttgagaggtctcacaaaatactaaggtttcattagcaaatagcaggtgagaaacctctaatccatctccacctctaccattcaccttaaagcctaataaaaaaccaccctccttaatagaatgttgagcgcttctatggctaacacaaacaaatatagagaaagtgggtcccttagagcattgaagaaagccagaagaggtgtcatccaccaaaactgagaagcttactattgagatgcaccatctactccaacaaatccacttttgaccaaatcccattttctctaacactgataacaaaaaatcctaacttacatgatcataagccttttctatgtccaacttgctcctatcaaaaaaaaaaaatgtccaacttgcacaacaccctaacattattgctttttagcattgaatcatttgcctcattggctataagcattgcgtctaatatttgtcttccctccacaaaggcattctggaacttggaaaccactttgctcaccaccttcttaagcatgtttgtcaacactttaaccaatagcttattaaggctattcaccaaacttataggcttaaaatctataagatcccatgccccctccccccctttcttaggaatcaaaaccaagaaagttgcattgatgctttttacaaatcttccctggttatggaaatctctaaaaaaatcccatcgcctcttccttcacaaaacccaactaaactttcaaaaagccattaagaaaccatctagagctttgtccccattcagatctgaaagggtgacaccttgctctccacaaatggctcctctagctttgcagcttcctacccatttaacctgtcaaaattcatacccttaatgttggggtgtcagtgccactcccctggctctattaagagattcctgaaagcccgaacaattcccccccttaatctcaatttcctttgtaaaaaagaccccattaatttttatcttagacaaagagttccttcttctgtttgcatttgccatctaatgaaagaactttgtatttctatcactctcttttaaccaaacttcccttaatttctacctctagctcattttttccaatagagtccattttaaaaaatccaatcttgtcagctctctagtaaccacctcctctgtagataaggcccccaacctttctttagaatcctagaaacccacttgagcaagagtcgaattctttcttattgcaacaatgctgaacacctccatgttccaactcttcaaattagattttaacaatttcaatttctctgctagtacgaagttgtatggaccctaccctagaaacccatccactagttcttcaacagttctttgaacccttcctccttaagccacatattttcaaacttgaaaggagtgacaccttttcttagactacccccatccaacaaaatcagcgcatgatctgagactggtttaggtaagatatattgcattacttcactgaattgactttcttatccctcagaaaccagaaaatgatctaaactcgactgtgactgattattcaaacccccactcttagtaaaaaatcccccaagtaacggaagatccctcaactaaagattcttaatgacttttgaaaatcttctcatggcctctgaaaacctactagcaccattgtgctcccttggaaatctgacggcgttaaagtcacctcctacacaccacagatcattccacagttccctgatgacccctaactccacccataagctctctatactactgcctgaagatggaccatacactcccatgaatatccaaacaaacctatactcagttcttaaaatgacacaaaactgaatactcccctacttccatgtccaacaactcaaacacctttttgtcccaaaaaaccaggatcccacctgcaacccctttagaatccaccacaccccattctaagaatctttcccgaacctaaacttcgcaccaacttagaggacataatcttagtttcctgaagacaaaccaagtctaccctctaagatttaatcaaagactttataaccattttcttattactgtcagtagcccttctgatattccatgacaagattctcaacttcatttatcgcttgaagaaatagcccaaccctctctgcctcttccacccattaaatatgatctgttgtagttcattgaccactccaacttttttagcactctcttggaatgtgataagacaaaattattctttcttctattgaatacctgactatcttgtcccttcattactttgattctatgaagagagtcaagatctcttcctcgaacccctctatcagcatgcctaggaaattacaaaaggttaccaaccttccaaaggaccaaccctctgtcgaaagctcttccccctctccaacaccgacaagccttcccctctcggtatcttacccactttccacacatacaatctcctttcccttttttgacgggatcaccactgtccttctgtcattcaaaatcatccttagtggttttgaatcaacctgaagaatttctgaattccttttttattaattttttaggtacacaccatacacatatatatacacaaatgactgaataagaaaatatcaatctagcttgattctctcctaaaattaggaaactgaatcatcctaaatgatctctccttttttattcctaaaacactttcctaaattaaaaaacctaactttgaatgctaaatttcaacactccccctcaagctggagaatatatatcatataatcccagcttgcaagttaagtcatcgaagttaggcctaggtaaagttttggtgaggatgtctgcggtttggtgcttggtaggaacatagttcaatttaaccgtctcactagtcaccttctctgtgatgaagtgtctgttaatctcaacatgcttggtcctgtcatgatgcacggggttctttgctatgcttatagctgcctgattatcacacatcatcagaattggagatgaactcgtttgtcccagttcactaagaaccctttttatccaaatcccttcacagattccctgtgcaagagctctgtactcagcttctgcactacttctggctacaactgattgcttcttactcctccaagtaacaagatttccccagacaaaagaacaatatccagaagtggaccgcctgtcaatgatgtttcctgcccaatccgcatctgagtatacttcagtgtcacggttctctgtctttctgaagaatagacctttccctggtgtcatttttaaatatctaagaatcctatagactacttccatgtgttcctcagtggggctgtgcatgaattgacttacagcactcactgcaaagccaatatctggccgagtgtgtgagagataaatcaagcgtccgacaagccgttgatatctccccctgtctaccggtgtactttctttctcgataccaagtttcttctgactatccataggagtatcaattggtttgcatccaagcataccggtcttcttaagaagatcgagtatgtattttctttgagagactacaattctcttccttgatctagccacttccataccaaggaaatatttcaaatttccaaggtctttaacttcaaactcttctgacaaatatttcttcaacttctgtaattcctccatatcattcccagatagaataatatcatcgacatagactatcaatatgaccattttcccggcatgagacttcttgacaaatagagtatgatcagcctgaccttgtttgtagcccagcttcaggactgcttttgtgaatctatcaaaccaagctcggggagattgtttaaggccgtacaaggatttttggagtttgcaaacctgattctttgccatactttcttcgaaaccaggtggtatttccatgtagacttcctcttctaggtcgccatttagaaacgcattttttatgtctagttgttgcaagcaccaatcttgattgacagccaatgagagaagaatcctgatagtgttcagttttgcaacaggagcaaaagtctcctgatagtctatcccataggattgtgtaaaccctctagctaccaaacgagccttgaatatctcgactgatccatctgctttgtattttatggtgaaaatccacttgcaccccacgggcctcttcccaaccggcaaatatgtaatagtccacgtcccattcttctcaagtgcatcaatctcatcttgtactgccttcttccattctgaaattttgaatgcctcttgtattgtgttgggaacctgagtatcatcaagagaagtagcaaatgctctgtaagatggtgatagcccttcatacgtaacataattcccaattggatgatctgtacatctcctaacacccttcctcaatgcaatcggcagagtagaatcatcaatgctgggaattaacacctctccagccctatcctcacccatgttctcttcaggaagacttgaattggagtcaatatattggccacatgttgactgtgatccatgctctaattcctgtcttttcctcctcctgatgtaaacttgtaagttctcattagcaagttgtggggctataggttgaataggcatgggagactggatggtcacaggagaaggaacatttgtgtgttgggctggctggactgatgacggcatgggtgtggacaactcagtgggcgtgaattgggaaggatttggtgactctgagtgaaaagaaggtacaccctcaagaagagactcccaaacttgatgttcattcatgctctccccctgaacatgagatttgggatagaagaagacatgttcaaagaaagagacgtccatggtggtgtaaaatcttttgttggtttgagaataacatttgtaccctttttgggttggaaaataccctaggaaaatgcacttattggctcgaggagcaaatttgctacgattttgaggatacacatgaacgaatgccgtgcaaccaaatactttgagtggtaaatcagaagaggctgcacgggtgtgaggaaattgttttaagaaaagttgacgtggggattgaaaagtaagcactctggatggcatacggttaatcaaataggtagctgtgagaatagcttccccccagaaatagtttggaacattagaggaaaacataaggcaccgggcaacctccaagagatgtctattcttgcgttcagccaccccattttgttgtggggtgtcaacacaagaacttatgtggataatcccgtgattttgaagataagtactgagactattagtaaagtattcctttgcattatctgacttgaggacttgaattttggaattgaattgattttgaaccataagattgaaggtttgaaaaatgtgcccgacctctgacttttctttcataaggaaaacccatgttacccgtgtatgatcatcaacgaatgtcacaaactatcgagtgccagaaatattttttatccgagagggaccctacacatcactatgtactagagagaaaacagtcgaaggtttgtatgggatttgaggatatattgttcgagtatgctttgcaaactgacaaatttcacagtgataagatgctggatttttattgataaataatttgggaaacaattttgcaaggtaaacaaagctaggatgaccaaggcgatagtgtaacattataatctcactatctttattgaccttagaatttgacacagaattgaaagactctaacatactctgagactgtacgcaacttgcttgagagacttggtttgagaattggccacatgagaggaggtagagcccggaacacagttcagcactgccaatcatcttccccgatttcaagtcctgaaaaacacacgagtttggatagaatttagtaacacattggagatcacgggccaatttgctaatggacaaaagattacaatccaagtttggaacatggaagacagagtcaagatataagtctttagtaagttttatagaacctgtcccggcaatttttgactttgaaccatcagcaatatggacggatgaatgaccattacttggcttgtaattttgaagaatgacagcatctcctgtcatgtgatcagaagcacctgtgtccactatccacggcttcattcctcctcgactagcagtgagggctatcccggtagtactgccactgccaacttggcttaatagtttctgtagcatctccatctgctctttgttgaatggactcggctcgggaacagatgtgctctcagagttggcagccacgtgtgctctgccatctctgtcagaccgtgactttggtttccaatcagccggttttccatgaagcttccagcaagcctccttataatggcctggtttcttacaataatcacaccaaggcctatctcgtttctgacaatctccaccactactgtcaaatgaccgagcagcaagggcagaggcatccaatgttggggcaggttgctctttggatcccatcatcactttctttctactttcttcacgcctaacctctgaaaaagcctccctgagacttggaaggggtttaatgcccatgattcggcctctaacatcatccaattccctgtttagtcctaggaaaaacttgaacagtctcttttgttccacaattttcctgtatgttgctgcatcatccgaacatttccatgagtgagtctcgaataagtcaagttgctgccaataccttgtgagtgtgttgtaatactgagtaactgactgctctccttggcggaagtcatgtaaggctgattcaacctgaaaaagttctgaagtattttcagaacttgagtaagtttctttggctgcatcccagatgtcctttgcagtcctaaacagcaaaaaattttcacctatgtcattgttcatggaattgataagccatgacatgatcatgttgttttcaatcttccacttcctgaaacccggttctgtagtttctggcatgactgcttctccagtgaggtactcatcctttccgttacctcaaatgaacagcaacacagattgtgaccactgtaaatagttatggccatttaatttgtgtcctgtgatgagaataggagaggaatcactgccaccaaggtttggaatttcagatctgccccttgattctggtgacgtgacgctggatacttgtgatgatgccattccgtattttgtcatggaccggaaaggtagaagaacacttcccaaggcatgtgcagggattggagttgagaaaaaatagccggaggacgccggaaaaactgatcagagggcccgcggaggcaaaagaaccccaaaagaggcacgtgcagggctcggatggcagaaacaggtaagaagggtggctggtcggtgtcaggcgagcctggaagaggaagcgcgtcgccgggaaagttcgcgcgggaaagttcgccggaaaattcgccggaaaagttgccggcggtgaatgttttctgacgacgattcgaccgaccggaaagcgttttctcccttggctctgagaacagggactgatgatcggaatgagagatggccagagagagagatggtcggattgagagatggccagagagatttggccagaatgaatgatggcctgaataagaggtggccagaagggattagggtttcagaaaactgactctgataccatgaagaatttctgaattccttttttattaattttttaggtacacaccatacacatatatatacacaaatgactgaataagaaaatatcaatctagcttgattctctcctaaaattaggaaactgaatcatcctaaatgatctctccttttttattcctaaaacactttcctaaattaaaaaacctaactttgaatgccaaatttcaacacaaccaaaagaggcatctttctaatcgggtcttccacctaaccactaaacaacggaaactcctcttgtaaagcctcctcccacgtgatctctagaagaatagaagaagaagaagaaactgaatcccgcaaagcaagaatagggagtgagaaagaacttggaaaccttgctgcttcctccaaaagggcctcgtcagtgagcagaagactaaatgtcgacgacgagcatgcctgagaagggagcaatttggcaacgacaagcggattgaacttcaaagaacccctctccccctttaataagcccttcctgttaaaagcctcatgggccacactgccctggcctaaaacaccctacccaaaatctataggaggaaaaggcttgcttggcccacttccaggggaaagggttgcttccctttccattgggcctccacaactcccgacctgtacactgcaactacttaaagggatatgggctccaactgaggccaaatactctccctcagtacacgcctcacccaaacagccctttccattgccaattgggctcctgcagatgtcaactccccttgacccctctgtcctaaccttttcagaaacaccaatcgcccctcctcctaacagcctactccggcactcagagggtgacaggcacatcccaccttttgcaccaacccaacctcccttctcacctgtctggctcacgccgtcagccctaacctccaagccaccactcaccctcttcggcaccacttgagagaaacaacgaggtacttcccaccataactggatagcaaagacaccttgacccctctttggcaccactggattgcatccaccacctgcaatgaccctggtgttgaattcccatttgatctcaccaaaaccttggcccactgtaaatgctgaagataagcagtttcttcatccactcaccaatctttgtgaatagctcacggcaccagaggcgaagacgaagccccccacccttctcacccacacctccttagtaaggactcctctttgaacgcagcctacctggggagtccacctttccaaatgcaacactttctccttaaatcttcttacccccttgaaagcaccctttcagcatcatagctctcttcaaaatcataacataggatactttggtcactgttgaggtttcctcaaaagaagtttaagaaatgactaaccactagatatctttccttacatggccaattcaattctcattcagaatgtttgttcatttattcccaatatctcaactcttggaattgttgaataattcttatttgtggcttgatttcattttgtatttcactatgattgattttgagggccatcaaattcatgttttctacctattttattatattaaggttaattttgtttctccttacaggttttacaagctttgagaagattgaaaggaacttc

SEQ ID NO: 12040 - DNA, 11720 bp, Vitis vinifera
  Intron number 1 from transcript GSVIVT01001122001 (locus G SVIVG01001122001) derived from phytozome v7.0 (chr-ID chr1 ; pos 22802782 to 22814501 reverse strand)
gataaattatcaaaattaccacataatcaatcaaagtaatgcaatacacataaaatcctaatgatatgtactgcataatcaatgcatgaaagagtgtaccactgtgattagccatatgattgacctaaaaatcatgatgaaatggtaaaataaagcatgcataccctaaatcgatccatgaatgggacatcactaaaagctgtaaatttcatgcacacactaaatctcatccaatcatgcaaaatcatgctcaaaagaggggaaaagccccctagaattaattaattgatactatcattcgataagggtagtatcaattataacagagttttaaattctcatacttggctaactatcttgtcgacctaagggtctaaaagtggagctcaagatttgatttttaaagaagttggcctcattaactattttatttacatgagattaaaatttatccaacaattttttataacagctactttggtcatggtcaaacgcgttgcacacaatataaaagggttgaaaaaaaaaaaactataaggagtagaaagggttaaaaaaatcaaatcttgaacccttaatcaatttcattcatttgattattttaggaatctatcttaaaaaaatgaaaaatttaagttctggatgtaatattggtctaaagatttaatttggttgcaaattgactttgatcataaaccctaggttttataatgttctctctttaaggatttgacactaaattatgaaactcttcgaaatatttttcctttatttgatttagtattttagaaaatctttattcatattttattcctagttatttaaatcaagatttcattatctttaacaaataattaatcattttagtctaaacacaaataaacacattaaagcaaatctcaaaggacgacaactcaaaatattataaagtcatggttaccgtatctttttttttttctagagttatcacgtatttaaggatttagtatgttatttacaacaaagatttgcggtcaccaccctttatagaaaaagagaagaccacacttctcttttgccaaagtccatgaaaggaagaaatcagacaaaagattgttgggtggacaagttctacgatatctttgatatcttttatggattagaattgatctagaagcattcatatcacatgtataattcctaaacctctagatctaggctttttaagggttttttagactatttttttctactacattagatctagagatgcctattgataaaataatatgcaccttaatgatcgatcaaaggcctaagaaaggagtaatctagagtttccaataattttaagttatcaattgataggaggacaacttgggtgagttagaaggctaacttaggccaaatctttgtatcaatatatctaactcacactaaacctaacttgaggtttggtcaagaattaccaacttatatcaagctcacagctagacaacttgaattcccatggttaccatggtttctcatagattattcaataaaataattattttatgtttaaaccatatagagaataatataaaataaaaggttaaaaattaaatgtctcaaagcactaaatatatttgttaattattgctttaatataatgacgacccataaactctaatttcattagatagaatatgtgaattacaagtctagtagatgtttcaacacaatgcttgatggattaaggctaacctaagaaaaataagaaaaataaaaaataaaaaagttaccaaaattgaccacaatgcatgcacagtgcaattgggaattaacaagggttttgcatgatgaaattgagatgtaggttcaaaagtctacaatatttatcattgtgactttgtcattgtataactttagtagtttgtcataaaaaggttgtgattagttgaaaaaatgaatgaaatttaaaccagaaattgcatgctagtcatgaagacatgtatggttgatcaacatgcacgctagtcatgaagacattacacactaaacctaacttgaggtttggtcaagaattaccaacctatattaagctcatagctagacaacttgaattcccatggttaccatgggttctgatagattattcaataaaataattattttatgtttaaaccatatagagcataatatagaataaaaggttaaaaattaaatgtctcaaagcactaaatatatttgttaaatattattgcttaaatataatgacgacccataagctctaatttcattagatagaatatgtgaattacaagtctagtagatgtttcaacccaatgcttgatgattaaggctaatctaagaaaaatgagaaaaaataaataaataaataaattaccaaaattgaccacgatgcatgcatggtgcaattgggaattaacaagagttttgcatggtaaaattgagatgtaggttcaaaagtctacagtatttatcattgtgactttgtcatggtataagtttagtagttcgtcataaagaaggttgtgattagttgaaaaaaggaatgaaattttttaaaccagaagttgcacgctagtcatgaagacatgtacggtcgttcgacatcacctccatacgtactcatcaagaaactgtttcatcaatttattgctagacttggatcttccatgcaactttcaatgcacccaagtcatgtacaatataagaaatgtcaagcttgaatactcaacatatatgatgcagaaaatgggacaaaaaaagaaaattttgaatcataatataaattttatttattactacatcatgtcatacttttaagggtcttatcccaacaatttcacaaaacatgttgtatttcatttttatatattttctcttctagtggttccttagttctttgaactgttgtgccattgttgagattaaactctaaaaaacatgacatgatataacatattgagattcatttataaatttatttatttatatttcttggtttccctttatcttatatgcattattttgttatttaagtacacatgtccacattacttgtattgtacatgacttaagtacatgaagagttgcataaaatatcaaaatcatgggttccttgtagaatgatgagtaattcacaatcgattcacagatttgggcaatccatttgagactatagtgcactagctacctcctaattagagaaatgacttatcttaataattgagatgattttctcatagttagtacactagtgcatataatgaacatcggacatggtctacgatgaatcatggcataagacttttagttgtcataattcaccaagttactatactatatagactttcaaccttgaaatggtattgagtatatattaaattcaataggaggttttgacctatagataagatcctaaggtagtcacaaacttggtagttagtgtttgaattaaacaattttacatcaaaagtgtctatatgagtaacaaataaaatatcttaagcctctttagcatgtttgtagattgttatcctacaaaatttatgtagactcacaccattaaagatgctatagaaggccttgcttttgcctcactaccttcattgtagattctatcccattcaagtttgggcttaagttttctactggatcatccaatcccatccaactttaatggatttccccagtcaaattcaaatgaattccaaattgctcaccttgcattttaaagaaaaattccatataatcatttcgataggtatgttattttcgtcaaagtatagtggattgtctatggatgatcccagtcattgtggtttcatgaatcaaaattaaataggaataaaaataaataaattttgaaagttccttaatagaggggtggtgaatagatagtcttaatttttaagcctaaaaatttgattttttttttctcaattgtgaatttgtttaatcaatgtgtgatatttaaatatcaaaataaaatccaatcatataatagatatgtggtgtatgtgtaaaatcatctacataatttatcaaaaagtctatagatatatataaaaaccctagtctaatcgaccacgaagcaaattcactaaatttaccaaagaacaagtgcataaatttacttgtgcacatcagatgatatcttttcttaaaggttacacttttcttcacatccacaatgcaatacttcatgcctcttagtggagtctttaacaacacgggggatgttgtcaaccactttgaataagagttaaacctttgagaatattgaaaatgcacaaagaataataatggtaataatgatttaggatgtgtcaactatgttaataaaataaggcacatttatatgaagaaaaccctaataatctaagtttgataagataaaaaaatggaattaaattactaaaaaaaaatgtccaaagagcttgagtgctcctctagggcgcttaactcctcttcaaaagctatttttgaacctatgagatttacacaatcccatgtaaatcaatatatgccttttaatgtcattattcactccaacatactcaattatatttatatgaatgattataagttagaactaatgataatcttatgttttcaaatgctaatgtaaattccaagaagtatgtagagtgtatctcctgatgtttgaaataaaattatcaagtcagactaactaatttaactcaataatagttccattttgtatatatacatgtggttttgatttaacggtacttctttttatcctatcacaaaaaaaaaaaaaaaaacttttaggagttgatactttaatatgctttcagtgttttttcaatttacctattgatattcttccaattttgtttattactagaagcacctctatacaaaagtatgattgctgatttttaaattatctttccacttacaaaaatttgaccaaattatgagtgaggggttagctaataaactaacataatcatttactcatttataaatttactattaatagtgtatttggctaaagtcctaatagaatcagtcaaattcaaatatatgacttcctagaaaaataaaactttgataccattttaagttatcaattgataagactatgacttcaatgagttataaggctaactcgagtcaaatctgtctatcaatatatgtaactcacactaaatctaacttggggtttggtcgaatccaactatatcatgctcatggacaaattgagttttcatggtttccatggtgcaaattatccgataaaataattattttaagtttaaaccatattatgggataaaaggttaagatttaaatgtctcaaagctctaaaatatgcccgttaattagtggtttaatataaatgacaactcataaactctaatttcattctaaaatgttttaacaattaaataaaaatgaaaactattagtttaagataattaaaaagtaaccaataatttttttttaaaaaaaaaataaatgttagggtttattgttttatcctttttctattttttatattttaattaaaataatagataatgtaatttaaaaataataaataattaataatgttttggtccaggtttcaacaacttgcccgctatttttagagtaatatttttttaatccgagcccaatcctaatttctaactcatttagatattcccggatattatccacgctaatttgaactcatagatttaaatatcagtaaatacagatatatcagtacttggattttacggatatatcgaaaatattggagaaatatcaatggatatttttacacaaatatcgatgagacaaaaattatccaaaattgatgggaatgcttagaaaaatccaaagaatgataaaataagtaagaatatacatgttgtagttattttataagtgtaattgacataaatatggttaaagaaaaaaatatcgataaacagattacgatacttagattttaagaatagaaaatatgcatttgggaattgtacacttagaaagttagaattgagttaaaaaatattttattttattaaataaaaacaatttacacataaacataatacatatgacattgcattagtccttaataccaaaatgaagattaatgtggtttcatcatattattaaatgaagggaactcatattaaatgaagggaactcatcttgttgaagacaatattcatatcaggacatgaagtttcgatagtattgattgtacgtacgaatatatcatacataaataagataaatataaaaattagtttaaaataaaataataatatagatttaaaataaaaaataaattaaaaatgaataattaaaaaataataaataaataaataaaaagataaatattttttaaaaactttcaaaaaaatttcgatattttcctgatatatcggtgatatatccgatatatcatcgatatattttcgatattttgacagacttcctccactgctccacacgtggtttcatgcttgattttttcgttgatttatcggttgcaaactaatatattggcgatttttgttgattttttactgatatttctctcattcaataatcggtattaaattttgtttcaaggccgcccgatatccgatatactgactaaattttttcaatccatgtttgaacttcagtttgcgtaagaattgggcaggttggacagcccaaatttgcaaccctaccaattgatgtaaaatcttaacttagttggtcaaacaatgtatgtcaaactagcaaaccgatttgatttagattcaagcttggtcaaacaatgtatgtcagactagtctagcaaaccgatttgatttagattcatgcccctaacaacctactttatagcaagttggctggtgcggtcagattcttccatttctaattgggaaagtttggctagtatcctctcgtatgaaaatattattaaaatcaaaacctaactattcttatttcaaattaacaactttattcccaaaaatatttgggtcttcatgcactcttggctgatgtgttatttaatgtcaaaaatgtcctccctttgccacgcaagactccagctaacctgccgacatgagaaaaaaaaaaaaaaaaaaaaaggcaaaacaaaactccaacgttcttttttcttcattttctccattgagcactggaccaaacaaaaaaaattccccatctcctattctccctatcagaaacccaacttcgtgaaacccaacgttatttggatgcattgttttttaaaattattattatttattttgattttgtaaaaacattgtaaattaaatttatataatattaattaaattttaaacataattcaatatataatattaattaaatttaataaaattcttattaaaaataaaattaattttgtatttaaacaataaatagtttttagtaaaataggaatggtaatattatattacaatcacaaatttatatagggataattgtgtttcggacctaattgggcccaaaaattaagttttggtctatataagttcactatttaagctcaagatctagagaaaatgtgaaaattgagaagaaggatatgaattttttatttttctaaaaatgacctttattgactatgaaaacaaaaaagagtagaaaaacattaatttaaattttatttcttttgcaaacctcaataaaatttaatataatttagtgatttgaaaaaaaatacaccagtttccaaaaaaaaataaaaataaattattattattatttaaaaatcaaacatcttagaaaatatatataaaattatgtatataaaaaataactgaaaatatgtcaaatttatttatttttaaatgatatatttttttaatatattttaaaaaaaattagttttctaaaaataataaattttcagaataattattaaaaaattaagataaaaaagttttcaaacattatgatagaaaataattttgaatggtatattgatctcttcatattttatattctcttcattaattatgcaactttcatgagtcaaatcttaatttttgagtctatccgggtccaaaagacaattgtctcatttatatatatttttttttacaaaagttataccattttaccctttattatggaaatatggatataattgattttttattaaaaaagaataacaatgttttaaaaataataattatttataatattatttaaaatgaatttattataatattttcctctttattatagaaatatggatattgacatctttgtaaaataataattgatttttttattaaaaattaataataatattttaaaaataaaaatgactaatagtattatttaaaataaataaattcaacaaaaaatattgtttgatttcaagtctatttttctaattaaagaaattataatgatataactatgttcataaaaaaataatagaataaatcaatttttatccaaaaatttatggtattaattggttaactatttgattttaaaattattttttaattatttacacttgttaataaatcaaccgcattaaattttatttaatttgaagcttatatttttagtaaacaaaattaaaaaaaaaaaaaagcttataaatttgtgattgtaatataatattaccattcctattttactaaaagctatttattgtttaaatacaaaactaattttattttcaataagaattttattaaatttaattaatattatatattgaattatgtttaaaatttaattaatattatataaatttaatttacaatgtttttacaaaatcaaaataaataataataatttcaaaaaacaatgcatccaaataacgttgggtttctgatagggagagtaggagatggggaattttttttgtttggttcagtgctcaatgaagaaaatgaagaaaaaagaactttgcctttttcttttctcatgtgggcagggttagttggagttttacttggcaaagggaggacattttttacattaaaaaacacatcggccaagagtgcatgaagacccaaatatttttgggaataaagttgttaatttgaaataagaatagttaggttttgattttaataatattttcatatgagaggataatagccaaactttcccaagaaagttttggttggaccaactggccctttctttgcacttaggccaacaacttgggcttggtcttaggcctgggcttagccttagcctttcggacgaaaagtttgctttgtgcaggaacctcacaccagaggggctggacccaatgttttaagcccaacaaatggtttaagttgctatgcctccccttcctcacctcacagatccaagtctacccatcatgatcttggctggctctttgtttaccttccaacaaaccacttgaatttctgcaactccaataatatacagcccttgtcccaaaattatgagagagttgtagattaccatacttacctacccatcttgccgtagggatctaaacgtagagctcatagccaagactagaaaataattaatccatagaatgtgaattacagaacatgttggttacgaagccagtagttgtttcaacccgatgcttgtcagatcaagtcttacccaagaaaaaggaggaaaaaataaacatattaccaagatcggcccgacttatggtgcaattgggaatcaacaagggttttgtgttgtaaaattgagacgtagattcaaaagtcttgcagtatttattattatgactttgtcatggtgggattttggtattgtgttagaaacttagaacttggaaagaaggtcgagagctgaaaaaaggagtgaaatttaagggaaaaaaaaaaaaaaaaaaactggcaccagagacgccggtgaagacgcgtacattgaaagagtcacggggcaccgcctacgtggatcaagtcaacatcgatcttctcctccttgcctactcaccaagaaactagcaattagtagcatgtaacatgcccatatctttattttatatcttcccatatataaattggagtttaaaattgtatgaacctccacattaattatttaaataaatactctaaaacattcaaatcaagaaactgaagttgtcttaattatattgatcaagacgtacaaggccagcgtcgtaggccagtccccactccaaggaccaggcaaagtcacctcaatttttctcaaaatgggttcctcatgaggcactccatagaaatttataacatttttcttgtcgtccaaaacacattccaatggctgaatttgacgtttctaaacgtatttgcatgaagattgaacacggcctgattgtgatgttaaccatcccgttaaattaccattaggactcggcatgcccacaggcaaagtgttttattcctcacgtttcccttagtttcgttttcacaccgtaagtgtttttttttgtctcggcttcgttattaaggttgcgccaaagctttattatcacaaaattgttctgaaagaaagtgacaccgtagatgatgatgtttatttcagaatgatttaatcttaatttagcattcaaattcaggagtcaaactctttctattcttgtaattcttttggaaaagtcaacattcaaccggggcaggtggattctgagcttcctcagactgagagactattcattcattgtatgcgatgcttatagtactccattcctaaaagaaaaaagaaatgaatactaggcgttgatgttaaatgaggaagcacacaaattaagactttgctattatggtggttacactgggaagtttcggcaggagaaactttaccttttaatgtttctaatatccttatccccatctagaaggcattagactattccgtcgggtatgaattcatgaaaagatttcacaactgaattaatagtgtttgatatagtagttaaaaacttaaaactgcgaaacatgattttcgttatagaaaaacaaatgtctttcaagtttcaatcaaattagcatccggggtcatcgattaaacaagtttttctggtattgatttgctgatgtgaacttgatggcatggcaatcttttggatgattaaagcattttgagaaatgtggatgggggagaaaacttctacctactaaagagtaagattatgaccgagtctccttcatgtgaaaagagattgctagtggcaaagatgatcgacagcaataaagagagagaaaggaacggtgtcagaagggggatggaaagaagagcatttgaccggcatccccggttcaaacaagttttctaatgggcaatgacttcaccttatataaataggagaggccctcaatgtgtggagacacgcttttgagctgcctggccttttcattttttatttttttaaatcatcgttcggtcttggaatctctgaccttctacaacatcttccacttttactctcgttataataatccatattctgtcaaatccaaatctaatcaatccaaggcttgtcagtataaatcggagccacttacgcgtttattaatcatctctcattccacccaccaaagatctcgcgatgatgagaatcgatgataactccgacaccgagagcgtccaaagtgacaaagcctcctacagtggccctctggccggacctcccaacaagaagagatccgcaagaaagagtgccagattcaatattcctccagagacctccccccagttgaagaccagcagcgttactcgccgtg

SEQ ID NO: 12041 - DNA, 6123 bp, Vitis vinifera
  Intron number 14 from transcript GSVIVT01025178001 (locus GSVIVG01025178001) derived from phytozome v7.0 (chr-ID chr 6; pos 3662681 to 3668803 reverse strand)
tagttgatcctccacgtggtggacttcatcccattgtaagtacttcttaggctcctatatgccttattccacatgctaacacatttgtttggtctttcttgaaatggtcatgttcattctattaagcataacatttttaactcttgtttgttgcaagtagatattcgataatcgatgttaatgtcactctgtctgaaaccaactactgaggaaaatgaatttaacaaattggtagaaaagaagttgctttttatttcctttctcttgtttggtgctggacagaatttaaataagaaggaattgtatgttgaaaccttttgcttttgagttttgatatggttaagtgatgaaggtacaataaaaagaaagattttaaatattatgattgaattcattctaattccactcctggatggaatttggacctgtaaaatccactccacataggtttttttttttttttttttctgaatctcattggttcctcagtaagccattttcagtagaaaagcttagattttgttaaccaaaacagaaatgagtataaggatgagctatccttcaaatcaaacactgatgaaaagagacattggaaagaggggtcatccccaaacagcagggcatgtgaagaaactcgccagaaaacccccaactgaaacttaatcccaacatagaaaaacaacacttaaggcggtaggaaaagcctttgataaaagagctcttcacttgggcaatttatctacaatttggtttaccaatttaggcatccatgcaatacaacacccaccagttgagaagtcaataagttgattttctgtgaggcgtgtgaggagcagatgatgtttttgcagtggttgctgatgtggtttgaggcaatctttggtttgagagttaatatggataaaagtgagctgatcctagtgggaagggtggagaatgtggaagacttggctgcggaactcggatgtaaggtgggaagcttgtcgtctacttatttggggatgctgttgggtgctcgttttaattctgtggcagcttgggatggtattgaggaaaaggtttgtaagagattggctatgtggaagcatcaatatatctccaagggagggagaatcaccttgatacgaaacacgctttctagtttgccaatttatcttatgtctatcctccatctgcctagagtggttagaatgagattggaacagattcaaaggggttttctatggggaggtggggccttgaagaaaaaacttcatttggttagatggtcgacaatttgtttagacaagagaaaagggggcctgggggtgaagagccttattttgctcaataaggctctccttggcacatggagttggcgctatgcaaataaaaaagaggttttttggaatcaagtaataaggggaaaatatggggaggaacgtggaggttagtgttctcaagaagtaagggaggggtatggtgtaggcttgtggaaagcaattaggaagctggggcaccttgttagctctagattttcttttatggtgggaaatgggtagagagagtttttggaaggataagtggtgtggagttgcatctctatgcgattcttttcccgccttattttccattgctacctccaaagaggccttggtgaaagatgtgtggtctgcttcaaaaagtgaggaaaggggggagaggggtggagttggagcccttgcttctctaggccttttaatgattgggaaatagagaaggtggaaaacctgttggaactcaagtgtgcaaccaaaagtaagtttttttgcttgggaagcgacttgggtaaaagttcttaccttggaccaagttcaaaagagggggtgggccttagcaaatagatgttatttgtgccaagcgcatgaggagtttattgaccatcttcttctccattgcgaaaaaacaagggaagtgtggaaactgttctttactttgtttggagtgcattgggtgtttcctttctctgttagggaaaccctcttggggtgaaaaagggcttttgtgggtaagaagcatagggcagtttggaatgcgggccctttatgcttgttttagtcagtttggaagacaaggaacaagattgcttttgatgatggtgtgctatccttgcaaagctgaaagttttttttgtatatttgctttggtcggagtctaaattgtttataaaagatagtctaaattgtacatcttgtttggtcagtttttgtttcagctgtaagggggtgagtctcccttttcttgtacatcttaagtttctattttagtgtctttttcgtaatacattacactcacttatcaaaaaataaaaataaaggaaggggtggtgagggtattcaaatcacccatttgttgtatgctgatgatacgctgattttttttatgtggcttattaggaccagttggcttacttgagctagttgttaatgtggtttgaagccatctttagtttgagaattaatttggacaaaagtgagattctttcgatgggaagggtggagaatgtgaaggagttggctcttgagcttgggtgcaaaataggggtgcttccttcctcttacttaaggcttcccttgggtgctttgcacaaatctatggtggcttgggatgggatggaggagaggttttggaagagattagccatgtggaagaggcaatttatttctagaggagggatactcactctcatttgaagcactttgtccaacatccccatttactacatgtctcttttgcgtatgcctaaagtggttagattgagactagagcaaatccaaagagactttctttggggtaggggagctttggagcagaaaactcatcttgttaagtgggcagttgtttgctcagataaaagtaaggggtggtttgggtgttagatgtctttctacacttaatagggcctttttgtgtaaatttagttggtgcttcatggaagaaacggaggctctttggaagcaagttatcggttggaaatttggagtagaacaaggggggtggtatactcgggtagtgaaagaggggtttggagtggggttgtggaaggagattaggaaggaaggttctttgttgaacaacattgtgttttctgtgggtaatggtagaagagtgagattttagaaggataagtggtgtgatgatgaggtattgtatgaatctttcccttcattgtatgctttggcagtattcaaagaggagttggtggcggaggtttgagactcttcagttgagggcgggggggagttggagtctttgtttttcttggcctttcaatgattgagaggtggacatggtggaacaactcctcttgacaattcaagggaagagggtaagtgcaaatttggaggatagggtgttatggaaaaagactaaatgtgagatttttttctgttaagtccctatatagggcagtggagcttggaaatgtagtcctatttccgaggagtatcatatgaagcccttatgttcctcccaaagtggatttttttgcatgggaagtctcgtggagtaaagtcttaacgttacatcaactaaagaggagggggtggaccctccctaatagatgtttcctttgtcttgttgacaaagtgtctactaatcacattttaatccattgcatgaagactagggttttgtgggacttattatttaatctttttggtgtgacatgagttctttcattcttggttagagagactctccttggttggcatgggtcctttataggcaagcagagtaaaaaggcttggttgttggctcctttatgccttttttgggcgatgtggaaggaaagaaacatgataaccttcgacaatgaagagctttcgatttataggatgaagaattcttttgtgtgtagtttttggtcttggactaagctgtatatagatgaaggacctttacctttaatcgacttttttgattggttgggttttaggtgagggcgggtgaggttttttgtatcccctcttcttttttgtttttgccgtttggcgcttgttgtatacttcctgtatgctttgggttgacctttaggcgctctttattcttcatttataaaatttacttgtgcatttacctataaaaaaaaaaaaatctttttaactgtcaatatttagatagattcgccaatcttttgatggtgaaagtggcagacttttcctataacttcataatattgatttaatgtgtagctggttctgtttgtgttccttcaattgtaaatttgccacttttaacaggggctcaccaatattttgttggtgaaaattgtgtagttagaatcatttgatttaattttgtttagtattgcaaaatctacatattgtttgcccaaggtccaagtaaggctctagtttttgaaaacgaaagaaaattgttggtgatgaggatcaaggtcactcatttccagtttattctagatgtatatgtagaggatgagaaatattcccatttgcactctaattaggattcctatttgctttaaaattaggatttctattcttattagaattagtttttaatttagttctaattcttattattctagtttagtatttcaactaggattaaaattgtatttccttaagattagcatctttaatcctcataaatagtgctgattataacaatgggggtcattattaattttgagaaatattcagaaaatttgtatcttctctctctccttattactctcttataatttatcctctactttctcctcctcttatctaattccttatgagcccaatttcttctatatgaaaagggtgctttgatagtcctacatcaatttggtgtaagagcaaattgatccataaaaaaaataataaataaataaataatttttccatcataagaagtttctgatcaactgatttcacatcctataagcttcaattgtgacactatgttgactttggaaactaattggggaattgataaggtatgtgttcgttaagagagggagttgttttttgcgtgttctgtattttggttgtgccttttgatgcattttgcgtacatgctgtgcattttggtctgtcatttctttggcgcttatttatcaaatcttttcacttacctattaaaaaataaaaaataaaagaacaataaaactataacaaaccaaggacttgccagttaaacataactgaaactaaatctatcaaaatatataagaataagaataggaacaacaataataaaataagaaactaataactcaaagtctcgaagatctactatgaatgcttccctcaacctaagtgcttcacaatatatgtgaggcttaaagcctcgattttaacaacaaatgaagaaaatattaactcaaacatcaactatcgacacttgtcttccaaccaaaaatacctattaaatttctgtgaccttaattttagacttctaaagagggcatatcatctctaaccagatattgcatatggatggatgaggttgggtgagattccaacactaaggttaagtgagtggagtaaagttctttgggaataggctctacacccttcaatcatccattctagtttgcatggttcaatcattcagcccaaaaaatttctagaataaactagcatagtttcctatacatgatttttgctatttactgaaataattttagagggatatataagaggaataccctgggttcaactatgtgactcaagatatagtcgcttacaaatattgcaaccataatctgtatgcctcatctgattacataggtgcaatcttgtctccaataaaacccagcaactcaaatctggatcatccaagctaataatttctgtcggactatgaaattgattagtgatagagtagatctcatgctcatcacccagtttctttgccatattgatcacttaaatggtttctgcgaatctgttgtcagttagactcttaccttccatttgcagtcctaaattgaatataagatgcttatactggatttagaactttggatttaagtttttttatttttttaaatgagtctttgactgcatttccatacccataaggggacaaattgtttatatgattcttgtttgtgtgaatgcaggtgattaaagctctgagaactcacgc

SEQ ID NO: 12042 - DNA, 10752 bp, Vitis vinifera
  Intron number 19 from transcript GSVIVT01011680001 (locus GSVIVG01011680001) derived from phytozome v7.0 (chr-ID chr 1; pos 5255673 to 5266424)
aaggcacttgggaaccatctctcttggaaggaaaggtgatgcctcatgatacaacatgctttacatgacataaataacacaatttgtatcctaactttaagtttataaaaattaaatttcagctgttggtggaaccccagtgaacgttaggaccaaacaagtccatttttgggttcccccttggctactttaggtgaactttattcttgaaggctctcaatgaatttcttcacttgcataatcatttataataaaagaaaaagagaaaattcatataatctttttagaaggtatgagagataatacaaatatatagagcagaatcctatatcaacaaggaaagtccagctcaaaaatatataaagtaggattcctatttcaataagtccaactcatagaaaaaggacaaaataatatactataagttgtcttcttcaaagaaccatggcaagcggttatatttcgaggtaaaggtgaaagggaggaggtgtcccatttgttgtttgttgatgatactcttgttttttataagtcattccaagatcaaatagttcatttatgttggctactcatgtggtttgagacttgttcaaggttgaaagtgaactcggagaaaagtgacctaattcctattggtagtgtggactgggttgaggagttggttttagagcttgggtgcaaataaggcacacttccttctacctatttagggttgcctctattggaatctaataattattcctaatttcatggagtttatttgatttatttatgattttatgcatattttctgcatatttagattagttgactatgtaaattagggaagttgcaatttagatgatttgtaggaagaattttaggaataggtcaactgtcttattttattttcatttattgtacaagtttgaaagttgtatatatatttgtactaatttttcaaagaaataataagaagattttattttccaacatggtatcagagttggaaaaaggtttctagtttttttcttcttcttagccttcattgtcaagccttactatcatatttgcaaccttttattgccatcaacccttatttattgccaccattgcaataagtcaagacacacaagagagacatgctagaaattgcatggaaagccacaatcgagggttaaggacaaccacaagggtaacacacaatttagaaacaacagacaccaagttcaacatcaaccccaaacagtccccctttcacaaaagaacaactagatctcttgtataagatcatgggaaaatccgaggtttcctcttccttcacttcttgttcttttgcacaatcaggtactttaaaacaacccttagtacttctaatattcttcattgtaacacttggattattgattcaggggcaattgatcacttgactaaagagtctaatgttttttgatcctatgtttcatgctctagtaacgaaaaagtacatgttgctaatggatctttgactcctattagtagtaaaggcaatgtttcagtcactcccatcactttttcatttgttctacatgtcccaaatatgtcttgtaacttattgtccatcagtaatgttgagagagagagagagaaaaaggagaaaaaccttaattctcattcatgtaaaaaatatgcacttacaattgagatatatatatatatatacaaggctaggagtcctaactaccatacatgtgacctatattaacaaggaaagataatatactataaatacattatattcaacaagtaaattaacaaaatttcaaaattgttctgtaactttctttcccactcattatgtgtttcaggaactaactacgagaaaggtaattggtagtactagagagagagagggtctctattatttggttattgaggagcaaggaaagattcaagttcatcaaataaaaaggaaatacagaaaaaagaaggagaattttggttaatgcatgaaagattagggcatgcaagttttttctctttgaaaattttgtaccctaaattgtgtgtcaacctggatccttctaaattccaatgcgaagtttgtgagttatcaaaaaaccattgtatttcttatcctttgagtagtaaaagaagtgaaattcttttttctcccatccacactgatgtttgaggtccttcacaagtttcttgtcattcaggagcaaaatggttcataagttttattgataactgtactcaaaccacatggatctatctcctaaaagaaaaatctaatactatcctcacccttaaacaattccatcaaatgatccaaacctaatttaatgcaaaattgcaagttgtgaggttggataatggagaggagtatttaaaccaaacccatggaaattatctcttaaagaatgagattattcatcaaacctcttgtgtaggtattcctcaacaaaattggatagctgcaaggaagaataaacatttgttagaggtagctagagccctaatgtttgctagaaatgttcctaagtttttttagggagatgcggtgcttacaattgcctaccttatcaataggatgcccacaaaaagcctaaactccaagactccaatagacatcctaaaacaacacctacctcacataaactgccttagctctcttccacccaaagtctttggttgtactatatttgtccatattccaaacaaaaatagatcgaaacttgatcccaaatccactaagtgtattttttttgggctattctcccatacaaaaagggtacaagtgctatcatccacctacacaaaggaaatttgtctccatagatgtaagttcttttgaaaaccgatcctattaccagaaatttgatcttcatggagagaaaatattgcaagaagatcagtcttggatgcttcctttacccatttggagtcatgctactgaacatggtgatgtagaggaggtaaacaacatacgatcagcaacatgaaaagaaactgacatcataaagccagcattagcagaaaatgctattgaacatggtgatgtagaggaggtagacatcatacaaccagtagtagaaaaagaaaccagcatcataaaaccaacagtagcagaaaatgttgatttagacttgatggtttactcgaagaggccaaggctaccagtataagagcaagacccaatctcttttacacacgaccaatcatcaactcagaattaggtacatctaatccttctaatccctctcttgttaatcatggttttgacactgatcttgatattcctataactattcacaaaggtgttagaagttgtactaaacatcctttgtcaaactttctatcctctcatagactttgccaccaatatgaagtctttactactcatttgtcctcagatttagttcctaaaaatatataagaggctctaagtgatcctaggtggaaggaggctataaatatggagatgaaagccttgtataaaaatgaaacatgggataagaaaaaaattaatggaatgcaaatgggtgttcactataaaatacagagttgatggtttgattgagaggtataaagctaggttaatggcaaagggacacacacacacaaacctatggaattgactaccaagaaacttttgcacctatggcaaagatgaattccattagagttcttttatccttagcagcaaatcttgatggcatctacaacaatttaatgtaaaaaatgcttttttgcatgggaacttagaagaagtatttatggatttgtctcttggttttgaaggaaaattcagcagtggaaaggtttgtacattgaagaaatcattgtatgggcatggcttgagagatttgctaagtctctgctcaaatttggctatcatcaaatccaaggagatcatacccttttcatcaagcaatcaccccgaaaataagattactacacttattgtttatgtagaagacataattatcactagagatgacgtagaagagatacaaaatcttaagggaaagttagcaaaagaattcgaaatcaaagatcttggaaatctaagatattttcttggtaatgaggtggcaagatcaaaaagaggaatctatgttactcaaaggaagtatatccttgatttgctaattgaaactaggatgctaggatgcaaacctacgggtacacctattgatcaaaatcttgatgtacttttgtgggctgcaacttagttacttggagaagcaaaaagcaacatgtagctgctggacctagtgttgtttcgagttattgcccttggcatttgtgaactcatgtggctaaagggtttattaagggaactgcaagttaattttgagaatcccatgaatttgtagcgtgataacaaggctgcaatcgacattgctcacaacccaatacaacatgacaggaccaaacatattgagattgatagacatttcattaaagagaagattgatagtggactaatttgcactctgtttgttgcatccaaactacaactaattgatgtctacacaaatggagttcagaatcctacattcaactctacggtaacaagctaggaatggaagatatctttgaactagcttgaggggaagtgttgcaatccaataattattcccgatttcatggagtttatttgatttattcctgatttgtgcatattttttgcatatttaggttagttgactatgtaaattaaggaagttgtaatttagatgatttgtaggaagaattttaggaatagttgtcttattctatttccatttattgtacaagtttaaaagttgtatatgtatttgtacaaatttttcgaagaaatgataagaagattttattttccaacagcctctaggtgcttcgtttagatcaatgtcagtctaggagggggtagaagagacgtttcataaaagactctcattgtggaaaagacaattcatctctaaaagggggcaacttaccctcattaaaagcattttatctagcattcccatttattttatgtctttattccgtattttgaggatggtaagattggggttggagaaaatttagagggatttcctatgtggaggtggagggttggtgaaaaagatgcatcttgtgaagtggctcactgtgtgtttggagaaaggcaagggtgggttagggatttgacgtctatctttgttaaataaggcgcttttgtgcaaatggagttggaagtatgccattgaaagaggtgtcttttggacattagtgattagaggcaaatatggagaggatgagggtaggtagtgatctagtgaagttaaagatgggcatggagtagggcttcagaaatccatttcaaagaaatgaagcactttcttgggttatttttcttttgtgttgggtaatgggaggaggatgaagttttggatgaataaatggtgtgatgagggaaagtatatgcaagaaaagaaaggaaaaacataaataaactttaagtaggattatattagttggaattaaattagaattgataaagcagaatcctctcctaattgattctttccttgatcttagattatttgttgttatgtatatttatcttttcctagtttgtgggatctctcaactgtatatacactctatataatgagaaacaattacctcaataattattgaggatttcagccatattttacacgggttctcaaacctttataagaattagtattagttagaactaaagtaggattagaatttggagtcaagttaggattagctaattaggttataagacaattaaaattagaggcataataggttattagaatcctagtagactttggatttctttgagaagcctataaataaggctaattgatgtaaatgaaagtaattttttattaatgtatattatgtttgtttggaagtgttgcaatcctcattggtgagactcaatttatttttttctaggtgggacttctaaaaggacttagtgagactctaagatttttatctcttttcttcttatcttttttctcggtatttttttattttattttttctaccataaactttatccttattcctttccttaaaccctaaaaagttaaaaccttagccctcttatttgattgtaggcaaccatcctaggtgttctacatcatggtgtggtgatgaatcgttgtgtgtttcctttccctttttatatcccttagctatttcaagagaggcatgggtgacagatctttgggttaagatagtgtgggaggtcattggaacccttgtttctctcaacctttgaatgattggaaggtagatgatgtggaagatttatttttcaggttgcaaagaatggtagttgatacagagggagaaaataagatgttatggatgaacttggacaataataagttctttgttaagcttttatattcactttgaaaccggggcttcttgtttcttttccaatgcaggaagtttggaaatcgtgggtccattctaaagttgacttttttgaatggaaggcttcttagggcaaagttttgattttagataagagggtggtctttggtcaataagtgttttatttgcaacgaagatgaagaatccataaatcacatcttttttcattgttcactagttaggatcctttggcaattgttgttcaatctctttggtatccattgggtgcaagctgctgcagttaagggggctttattaaggtggcacagttcgtttgtgggtaaaaaacgaaaaaaggtttgaagagcaattccattatgtatcttttggacagtttggaagaacagaaatctcaagttgtttgataacgaggagcattctgctcagtttttgaagatgttctttctaataaatttattcacttgggtaaagaagtacatagagatggattctttgtctttacttgatttcattgagtggttaggttatggttaagggtgggggttgttgcttaggttcttttcgtgtttttgagctattaggtgctatttgtatacgtcttgtgtatgttggtgtgtccttgtggtatttttatttttaatgcaattggttttatctataaaaaaaaatactacatagaaaataataatttcttttgtccttttcttaacactccccctcaagctagagcataaatactatcaattctcagcttggaacaaagacgacgaaatgggctcctatgtacccctttagtaaaggggtctccaatttgatcgtctaacttgataaatgaaggaataaattaagacagtgtaaaattccataatcagtgagtgagaccaaaataaatgagaatagggtttgtgaactcatttctacccttgcaaaggcaacatggttaactaacggaacacctcttttcatgagttgatcacgagtgaggatcttttatgaaaccacctcatatgcaaataaataggccttaaaaggagtctttgagccacaccatttatgtgagaaacaaaaaggaagatcaagaagtgtaaaagaactttatagaaaaacactcattttttgcacacttctgtaataaactgttcttccccttggcaccctgcccctttctttgtccttcaaataacaaacaactgaattaactaaaagaaaaggctcaccaactcagctcctaacgtggaacaacctcaaaaatcagaggcatgcctaataccttccacctagagatctgcaacccctacatttttttatagaggcaagtctaagtggataaggaaattgagctttaagagatccctccctacaccatctatagattcaaatcttagttttaaacccattcccaaccctcccataacttcttttgtgcaccaatccccatctttctccccatatttatttgagataacccacttccaccagctattgaactctacaacaagcctcaactactactttctagaaagaccttgttaaaacttgagagtagaaagtcttcattgccatatatccatgagcctacctctaattttatctcaacaacaatatgccacttcactagatgcaaattcctttaagtatataccatcctaaagaaagccatgttgaatcttttctaactaaatcttcactgctgtagggatcacaaataagggcatgaagtaaaccaaaaattcacattgggtgcttttgatgagcataatgtcatggacttagtcttttcctaaactcatgcggcacttggacaagccaagacacttgatctgctaaatcagcctttctcccttatgcttagctcactaggctaagatacacacaacttagaagctttagaaggcgtagtaggcaacacataaagaatggaagctttagtgctctcaaatgatgttgtacaatgcttggaagctcacttgcttggtgtcttggctaaataagggtctcacctatttataggcgccttaagaagtctctggaaccttggagggttccttacaaatcaagagatccctaaaatattctagataactctatgtacaaggctatatacaagaatgtataagaatatacaagagacctctggaactctctaggaagccttgaactcttctcatgccttccaccataatgtaaatatatgtggacatctctaagcatctctagaagcttccacactcttcccaccaatggctaagtgtagatggctccaggagtttccaaaagcttcctgccctctatataagcccatgggaagggtcgtttggagcatcttgtgacaataagcttcccagttagtcaggtattcctgtttccaagaggcaagccttctcttaaaatgttacttcacagcttcccatgctaaacataacttgaaagaagccgttcaaaccccatcccacaatgtagcatcagcactaacatttccacgctatcaccttgcccattggaataaagctcattcttttgtgagttagttgcaagccaaaagctaatgcaaaacataaaagggtccacctcaaatacaagaactaatcctggtttgccttgcaaaatgttagtgtatcatctacaaagagtggatgagacatgttgccttttttccccttttcgcttaatgaatctacctcaccctagaggtgaagcaatttaaaccctccataacccctatagacaaatagagggaaaggggacctctattagtgtatcacctacaaagaatggatgtaattatttttcaactttattttttatgtgtccatttgacattctttttctatgttaggtgattaaaaacactacagaacctgctaaggtagcccaattggtcagagccaacactacaaagtgtggtcccagtaaatggcatatggtcctgggttagaatcccaccattgatgatactctgaatttatccaatgctggttgttgcgggatggtcagcaccccaaggtttgggtctccatggagagtcctaagcacttggttatagaaagttcctcagttatcaaaaaaaaaaaaaaaacactgcagaggtatttcttatggagtgcagaagcttaaataccatttcatagactggcactagtatgtggtccataaaatcaaatggggctcatatttggaatttcatcaatatgagatacgggttttagtgaacatcaatgtaatggtatgcagtggaggagggttttgtcaagcaaggtgttggtgtggaaggatggatatactattgagaagtggttttttaaaggaggggttcccaagaggttagcttttggtacaggattaagaggtaatgaggacttcaagaagggtattggctttgggtcagtggatgatagtagtatcttcctctgtttctgttttctgtttttaaatagattgccaagcctgtttattgtcatcgtaatgcatgcccctgtgacattagtagctagttgaactaagaggtttgtaattctccaacttcttagcctcctttcttgatgattataaaaacctagtctgttattgattaagaatatggtgactatgtagaaagccactaatgatgacataaccacaatggttgctttctgtagcccattccattttatataacttgaaaatgctgctgttcatattaataaattggaagtcttttatgcttatggtaccactatttttttagataagagctaagtagcagctttaagcacttgttttcatcaagcattgacatggtccttgaagttatcccctttgtctaaagatagtgagcacctattcctgttgttgtggttcatgcgcatcaaccatgcattctgtttcagctattcatttcattcatagaatctgctttttcatttttaccacgtctagttcattgtcttatatgtgtactttatgatcctgctgcattcttcagtttatatttgttaagctagcaatttacttgttaggtagtagaaaaacagtgcatatcaaggtagtgggtcaacaatgtatgtcaagcttatttgggttttagccaaatatcctgtctcatgagcaactttccttttgaatttgcactggactcaataaattggaaaaaataaacataattgaaattcaaattcatgacctcctataaaacctagctctaaaatgttgttaagctaccagttgacttgatagtttaactattaggtagaggttcaacaatatatattaagcttatttgtgctttaacgtaacaatgtttatttttatgttataatttcatttgaattgatggattacacagtatagacactcttcattttaagctttgcaggtatcctgtgttctttg

SEQ ID NO: 12043 - DNA, 16244 bp, Vitis vinifera
  Intron number 17 from transcript GSVIVT01022620001 (locus GSVIVG01022620001) derived from phytozome v7.0 (chr-ID chr 2; pos 13503801 to 13520044)
ttgctaggcgacaaggctgtgcagcacaagtactatattctattcttttccgacttatatgtacttattttattgatagtgaatcaaagtcaattacttatttctataatacttttctctctaaacctctaaaaccctttgttaagaatgcagcatctgtggtattagaaaaatatgaaaatcctcttcctccttgcccatgctaccttttccatctgctaggtgataccttttatcccatttacaacacagctggaaaattcagtgaatttattttttacatggcatgagatcctaaagctcagtttgttggtactgctctggtttgtcagattgctgcttagtatttgattattaattcatataccatcatttagaaaagcaagcataataccattttaaaacttctcttccctgtcctaatgattagcatgcacactgtccacaatataatcattaacaccttagtcttcttcagcatcatcatgactgtcatcatcacccttatagtatctagaggtacttattgtacatgcatttgctcattgtgttactgtctgtggttccatagttccttatctagtttcttgttcattgttggttttgagttttgaaattgagtagacatagaagattataaacaaagaatagttgctttatttgattccttgggttttctttgcatctgaaattttgaatagatgaagaaaaatatggaattagtttctcatgtataccactttgtgcaaagattaatcattatgaattatgtccaatgtttaaaaaattgggaaatatcatggataattcctggaaattttgtgcttaggtcatcattgacatgacaaatggagagaaaacactgaccaactgtcttttgttcatttttcgatatttttttcccttatttttggctactttcggtatttttcgagtttttttgccaatactttcaacattatctgaatcgtttccaattatctgccaataatatcctgcattgcgctcccaataattttgtgcatccctcaatcaatgtgatgcttcttctcccaggcttagtcaatgggggctccttttctctccttaagtcttgccaactccttaaatttaaaaggtttaaagttggttttgaacccaagatgacaaggatgaaatgagccttgcctaaccactggatcatgtatattgtttgtaataaaggtgcacaaatatatgtacttacagatatccatggcaaaaataaaatgttaaaataaaattttgataaattaattaattttaattactttctaattgattgttaaaacatagaaattatcatgataatttcttaacaagcctttctatatatcttttaagtattaattaaatataagagaaaaatgaggccttagattcaagactaaaaagtgcaaagggtggaattatctgcaaggtggatattgaaaaagcgtacgatcatgtgaattggggctttctattagtaatcttggataaaatggggtttgggactaaatgggtgaattggatgaggtggtgtatttcttcaatccgtttctcaattttgctcaatggttctccagtaggctttttccaaagctctagaggcctaagacagggagatcctctttctcctttccttttcattatagcaatggaggcgttgtcttctatattgaagagggctctacaaggaggctatcttaagggcttcatggctggtgagagaggaggtgagggtgtggtggtttctcatcttttatttgttgatgacacactagtcttttgtgatgcaagcaaggagcatgtggaggtcttaagttgggtttttatgtggttcgaagcgatttctgggctaaaaatcaatcttcacaaaagcgaactgattctagtgggggtggttcctaattttgaggacttggcttgggttttgggctgtaaagtgggttctcttccctctttttatttagggttgcctttgggagctgctttcaaatcatcccgggtttgggatgtagtggaggagagatttcaaaagcggctcgctctgtggacgagacagtatttgtccaaaggaggaaggttgactttggtaaagaacactctctctagccttccaatttactttatgtccttatttatcattccccgcaaggtgagcctaaggctggaaaagattcaaagagacttcctttggggggggaggagtttctcaaagtaagccgcatttggtaaattggtccattgtttgcatggagaaaaaggatgggggcttaggtatcagaaatctttctaggttgaataaggcccttcttggaaaatggtgttggagatttgcttcgaaacaagattctttatggaaacaagtgattgtaagaaaatttggggaggaagatggaggttggtgctctggtgattcaagggagagtcatggagtggggctttggaagatgattaggaaagggtggttggagttcaacaagagggtggcttttaaggtgggggatggtagaagagtgcatttttggaaggatagatggcacggagaagattccttggatgtggcttttccaaggttgtacaatcttgccttctccaaggatgcttgggtagctcagttatgggatcagtccgggaatttgggttgttggaaccctgttttcacaaggttcaacaatgattgggagatggaagaggtggaaacttttttcagaaggttacatggccatgcgcttagaagggggattgaggatgtcatgtattggagggtctcaaagaaagatatctttatagttaaatctttcttctcttccctagctccttgcattggtagagagttcccttcaagattagtttggaatccttgggttccaaagagagtcagtttttttgcttgggaggctatctggggaagaattctaactatggatcaattaaaaaggaggggttgggccttaccaagtaggtgctatttgtgtaaagcggatgaagaatcagccaatcatgtgcttattcattgccccaaggcaactatgatttgacaccttatttttgctctttttggtattaattgggttctgcccaattctatcaaggaaaccattcttggttggaacgacacctttgttggaaagaaaagaaaaaaggtgtggaatgcagcccctctatgcttattttggacgttatggaaggaaagaaatagaagaatctttgaagattctgaattagtggatcaagctattttacggtctttttttgtacatgttctctgattgggttagggtgcatgtaaattgtgtttcatggtccatttttgattcattgattggttgggttgtaagtgagggtttttttttttttttttctctccctttggcctagttgccttgtatactccgtgtataccgttaggtgtacttcaggctttctttatacaattgcttatacttatcaaaaaaaaaaaaaaaaacatttaaattaaatagattattattttagtattaaatatgtttacaagttcgatatattattatcaaatattaaaatttttattgtacatatattactttcttcaataaaacaactttaatatgcatattattacttatttgatcaatttatttatttatttttttaatatttctatgatttttgatcgatttccatcccaccaattttttttttgtgaaaatgtccttagataattcttgatagattccgaaatatccataaaatccaattgttgatattccataaaaaacgatatttttatccttcttgtgaagggcatatatttgcttctattgatggtaggtttgatatgctgttctttattttgaaaattgattgcttttgtaatggtagtagttctgctaatatttttttttccttcttaacatgagagtctgcatataattatccttgatttacaaaattttcttatatattcagaggcttgttgaacatgaattctacaaacaggattgttctaagtactttctattgttgacatccaatttcgtactagcaatggacctatggccataaacactgtgactattgtgatatgcatgattagtgatatgcggaacttgtttcattattagcaccacccttatggtagtgtcgtccattactgatgctgcaaggaggtaattactgctgacttactgctggaaatattcctcactgttgtcaatggccaacaccattcctactgcttggttctgtcgtgttgaactggattctttgcaatacttatggtagccttgttatcacacaaaactatcacagtggagtttgatataattccaagttccttgagtattctttagagccacattccttcacatatcccatgagccattgccctgaattctacctcacataggaacaatacccagtagttgaccttcgatctgtcaaggatcctgcccaatcagcatctgtgaatacctcaacttccctacttgaggttttcttgaagtagagtcctctacccgggctctttttaaggtactgtaaaattctgtatacgactttcatgtgtctttcagtgggattgttcatgtagcggcttaccatgctcatagcgaaaccaatatcgggccttgtgtgagttaagtagatcaactttcctactaacctctggtacctgtctttgtcagttggatgattgtcattatctttatcaatcttaccaataggatccataggcgtgtccactggcttacaacctagcattccagtctcttgaagtagatcaaggacatacttcctttgcgtgaccacaattccctccttagttctgccaacttccatgccaagaaagtatctgagttgtccaagatctttgatttcaaattctcttgctagcagcttcttgagattccctatctcttcttcatcgtctccggtaattataatatcatcaacatagacaatgaacaaagtcatttcaccttccttagagtgcttcataaacagtgtgtgatctgcttgacattggatgaacccatgttttttcacaactctagtcagtcgatcaaaccaggccctaggtgactgttttagaccgtatagggactttctcagtttacacacttttcctgaattttctagagtttccatactaggtggaatcttcatgtagacttcctcttctagttctctgttgagaaatgcatttttgacatcaagttggtgcagattccagtccaaatttactgcaactgacaataacactctgatggagttgagctttgctactggtgcaaatgtctcttcataatcaatgccataggattgagtaaatcctttagctactagtcgagccttgaacctgtttatacttccatctggattgtgcttcacggtaaatatccacttgcatccaacaggcctcttaccctctggtaattctgagatttcccatgtcccatttttctctaatgcttgtatttcttcctgaacaacagttttccattcaggttgttgaagtgcttcttggatgttggatgggatacgatcatcttcaagagaagtgatgaatgcttggaaattctgtaaaagctttccataggacacatgattactgattggatgctgagtgcaggatcttacacctttccttaaagcaatgggttgatcaagatcatcaaggtcattactggaatttagatcataaattgtgttacctggttgtgagtttgggttgcttggatcctggtccaattcttggttctgctcaggtggagtgttgtccttgggctccttttgaggaggtttctcgggcttttcctttaaattttttctagaataaactattacctctttactgccttgtgtagttgactcaggtgtgacagaagggacatccaaggaattgttttcggggacagaaagagtagtatttgtttgaggaggcaatgatgaactcaaaggagaagtagtgctgatttcggtttcccataattggaattcatctgtggaccagttctccccctgaattgcagttttggggtagaagggttgattttcgaagaaagtgacatccatggaagtgtagaatttcttgattgttggagagtagcacttgtatcctttttggtttggtaagtactcgagaaagatgcatttagtggttgtcggatcaagtttactacgttgggacttatggatgtgaacgaaagcagtacaaccaaagactttgattgggatagacgagattattcgagcggatggatatgcagcgaggaggatttgacacggggttttaaattgaagaatcctagaaggcattcggttgatcaagtaggttgctgtgagtacagcttcaccccataattgtttaggcacgtttgaagctatcatgagggatcgtgcaacctccatcaaatgtctatttttcctttctgcaactccattttgctgtggagtatcaatgcacgagctttgatgtacgatgccattctccagaagatatgacccaagaatgttgtgatagtattctcgagcattatctgtccgaaggacttgaatttttgcctgaaactgcgtctgaaccatgttgttgaagttttcaaatatttccctcacttctgatttcttcttcataaggaatacccaagtcactcgagtgtggtcatcaacaaaggtgacaaaccatctagaacctgtaatgttgttgattctagaggccccccaaacatcactgtgaatcaaggaaaaaggatgagatggtttgtatggttgaatggaataggagttgtgagtatgtttggacaattgacatatttcgcattgaaaatttttggaatttttattgaataatgatggatatagtttttcaagataggaaaaatttgggtgacctaatcggtagtgccataacataacaacactatccgtcttggtactagggttggaaactacacaagcagtcttcattggtagcctttgaatttcctcagctctcagaaggtaaagtccagcacgcacctcagcattgccaatcctcttcccagagttcaaggcctgaaattcacacatgtgaggaaggaatttagtaacacaattaagatcctgtgttagtctacttatagacaataggttgcaatccaatttcagaacatagagcacggagtgaagagtaatatccttggaaataataactgaacttgtgccgaataccctagaaagggttccatcggcaattcgaacagaggaattgttatggcaaggagtatattcatgaaaaaccatgagattcccagtcatgtgatcttaagctcctgagtccactatccatgtagtgtgattttcttgtctaacatttagggcatgggaaaaaatacctttctgggctacagatgcggtaccaatagttgttccagttgattgaagagtctgttggaacattttctgtagtgcctccaattgctctttgctaaacggtcgaggatttgagctagtgcaagatgtgtcttcttcggctgtagcggtgtaaccccggccttctctgttttgctgtggtcgagaaggtttccaatcagcaggtttaccgtgtagatgctagcaagtctctttcgtgtgtccaggttttctacaatggtcgcaccatggacgattcttcttcgtttggtggttgttgttgttggattgggttcctcgtgcaactagggctgagttctcaagatttttggaggaattttgggttcccaacatcactttttgtctgctttcctctctgcgaatttcagaaaaaacttccctaacactaggtaatggcttaatacttagaactcttccacgtacctcatctaaattcttattaaggccaagtaaaaatttgtagatgcgttccttttcaatgaccttcttgtataggagtccatcttcgggacacttccaaaccaattcttcataaatatcgagttgttgccaataccgtttaaggatattaaaatattcggtaacagttgaatctccttgtcgaagatcctggagaatactcttgatttcgaaaatcgccgaggtattatcgatgttggagtaggtctctctagctgcatcccatatctccttggctgtgccatagtacatgaagttttctcctatgtcattggtcatagagttaattaaccaagacatcaccatactattttccaacttccaggttcggtatcctggatcatcttccttcggctgaacaatggctcccgtaaggtattcttccttacctttcccgcagatgaagatccgaacagactgagcccattgaataaaattcagctcattgagtttatgacctgttatgggaagaatgatgccgtctgtggtgctggcactgccggagtgaactgcttcaggtctggacgtcacctccgagtttgatccttccgttctgctctccatggaaaaagatgattttttatttatttatttttttttatacgtggttcagatctgaatgctctgatactatgaagaaaatattcttcttttttctgtgtcaaaactgaatacaaagtgacctatatatatacaagtgggattcctaatctaagccatataatatgcacaatcactatctctaaggaaacaataactaattaggagagattctctcatccataaaaatagaaagtatcctaacacaatccctctaatcttggcacttaattacaaatcataatcccatatttccacacttattgagacccttcaaagggttactgccattcttcccaaccacatcttgcctcccatttagctccaatctactcctataactaagatcgctctataagcatccatttcttagacttttggtgtttaatgactctttcccttctttccctctcaatttcctattcaacttttaatttgtcatggtcttttcatatattacattgctaaaaagggaaataaatgtgcaaatttggagtttgttcagtttaatagtttaggacacaaaaatgccaaatttagcatagtgatacatacaatgatcactagggtattacatttattgtgagcttagggaaaataagcctatcttatgttactattaacatgccaagcttggaattctttagctttggtgaatttgaattttgatggttttccttggaatttggataaataggaagcagaagtatctgcagagatgacctcagggaacatagaattcatatgaaagaagctagtgctctagattttacatgttttatttcaggcactttcattaatgtcatattcccaatttatcaattcacaaaaataaataaataaataaaataatgccacacaatgtgtatttagtaatgaaccttttttttttttttgttactttttcttttgagcatctgtcatgcttattttgagggtgtgattgcttaggaaactgtgtgattgctaaaatgtgttggtgtgattactaatgattttcttctcttttcttttctcctccaagtgagattgcctgggaagccgtggtatgattgccatttattgtcttttattttcttttccctttcatttttcttttctttccttttctttttcagttgtcttctttgatatcttacatctttgtacaacaaagaaaaaactttagtagtactagaacttttatggtcctgcatcaaatctggtttccaaaaatagcactatgataaatagaagtggttgatattttaggggaaagctgacaaaacaacaatattgttattttcttttatatgactatggaagcctacattcaagaaatacaagctattatttcttatgctattgagtattcaaccaccaactttttcaatccagcaactattggctcttaggacaaaggagcgcatattagtgaggatgtgaagcatggggtatgcccagatttgcctcctaggactaatcctagggaacatgtgaccttgaaaggcctcaaactactctcttgaatatggtgaatgatgtcattgagttaagttgacgtgaaaggcatgatcaacatggcatgactggtgatattaaaaacaagtatataacgtaccagattttgctggaaaaattaatctgcaggcctttttagatagttggctaccttgaagaggtactttgattagtataatatgttggaggaaagatgggtatggtttactattgtggacaagtgtggaaaacagtcttagaatttcagaacaatcgccaattgttcattgggacaagatgaaacaaatgttaaagtgaagatgccttcctcgtgattgccaagatgatctttatgatcaattaaccactcttaagtaaggaagcaggatgatgattatgtaaaaaagtttgaggacctaaaagtttggtgtacgggagttgaagattcatgacaaacttcaatttaaaactggattgaggattgcaattcacagatagatggtaatggattgtctttatgatgttgagaaagcatagtagaaaagatatgagaatatgtcaaccacttttaacatcttataaaaagtagccatgcttttaagaccttcattggaggtggttgcagtatggttttgttgacctatgagacttgtgaaatatctccaggggtgcaaagacaggcatgatcaaagttaaaggaaggtacatggaaccaagtggccaagagaagcagcttcaaggttcaagtgatggatccttgacaagggcaacctggggactggacatcctatgcagttgccctaaggaccactctgattgttttgaatgagttcaaaccagacatgatcctttgatctatcttctcatgcatgtattgctatccttcggaattgtcgattccatgctctgttgtgataaaatcttgggtccagggtttagccaaggaggagatgagatagggaaatactaaagaggagagaacatggaacttctattttttatttttttggctggggatgcttgtgatatttgatggtatgatcaagtcttgtccgggaacaatttttttttgacaaattctttatattttaaggttctggtcttgtattgaacctttctgatactacacatactttatcggtgtgtatttcagactttgcatggacataaagcaggaggaaaattttaaggtcactaaagcttatggattcgtagtcaggggggagctagaaatttaattcagaggcacccttttgagaatatacgaatagaaaaaagaaagaattaataataatacaaaagattgattatgcttatactcaataacttatcattaatgtgagattcatctaagtattataattacttatattaatcaaatagcatatgtcctaggttagtggtagagcattttatatggatacacaattaaaccccagtttccatcaatttttttcagcttgtcctagcttagtgcatttttgcttccaggtagtgtaggaaaggatgaaaaacttttggcatttattgggctagtactagatgaattgaaggtttctgtgcaaattactggtaatatgtttaaatgctttagaattgtgtgaagaagtattataggtgtttgtaatcactacaatccagtttatatgactattggacctttgatggattaagttctgctgacccaagcatgttaaactttaatattagttttccttctaaattccacaccatctatatatatatatatatattgatgagaaacgaagaaatttatattaaaagaagaaaagatacaagagaaagaagagatacaagagaaagagaagaaaaaatagaaggatgagaggtccttcccacaaaaacaaaaattgagcaaaagagaaaacacccaactttagaaaacgaaaaacaaagaacactctcaaacttttgaagcgcaaactgcagtctagttgagttgtaaaacattaagaggaactccgctaaaagctgcagtacaagaggcccaaagagaggaaaagaaaagaagcaaatcccataacatctcttccgttctccccttatcctcaaaaatcctattgtttctctcttgccacaccatccataacagagtaaggcaagcgatttgccaaagtgtcttgcctcttaatgaattccccaaacctttaaaagcaataaccatcatgtccacaatactccttggagggacccaagccaaacctgctagattgaacagcttgtgccagagtccaatggtaatagggcaatggagaaaaaggtggtcgatcaattctccatttcctttgcaaagaatgcaccattgaggacagagggatttgtagggtcttctcaattgcaacttgtcattggtgtttaccttcccatgtactactaaccaagcaagggccttaacctttgaaggagcttttgaactccacaaaaacttggtcggaaggaacaagataggatttgagacttttgataaggccaagaaaaaagatttcactgaaaacaagctcgatgatgacaaagaccaagctcttgaatttgccaaaaaaggagagaaaaacactgaactaagggaggacattaatctctaaaggagatcaatttctatatcaataagattgcgatgaaaattaaaattccaagacagtagaaaggaattgccaaagacatttgagacagtgaggtttttcacagaaatcactttataaagactagcaaattgagagcacaaagtttggttgccctaccaaagatcttcccaaaaacgaattctctccccagtccctaccactaggcagacaaaaggggagaaatcctggaaaacttgagcaatagccttctaaggacatctgtgtggccatctaaccaccatgttggagtcccatccattaggatgtgtcccataaatactcgcaataaccttatgccaaataccatttctttctctaggaaacctccagagccatttccctaagagagcaatatttctcaaagaagtcttcccgaaacccaaacctcccaactcctttggcctacaaacaacatcccatctaataagatgatctatatgagtcacttgtgcatggacctagtaagctctgctaccatttattactcattttggtgttgttattattttcctttctgatcagaagccttttgggctgtcttagggctgatgacctcctgtttattcttgtattttggtgttcttgtatgtcagtagctacaccttctcaatatcactattggatttattgtttttatcaactccttccttccaaacagaatgattccttccttcatgccctattctttgtgcctgcaagttaagcaaattactatgctgttgttgcttttcctaaaggcccttgatcagttactaagcatgatatagaaactacctgtgaaacttggtccaaattatgactgaaaagaaaatatgtgtaggaagagtaagaagaaactgattttttcccccttttttccttttttgttaaagataggcaagagtaagacgaaactgatattggaacacaaataaacattctttcaatcaattaaataagaaaatctataagaacatttattttgtaggatctcagtgaatgagttttggttttaaatcctaccgatcacaatgctaagttacaagttttttttttctttttctttttaacatagtaagcacaaagaaggatgagaaattcttcattacacaatcctctatacaaagtttgatcaagaaggtggattagtgtataccagttcaataactcaaatctagctaaaattcattaggtataaaatctcctgcaaaagatagcatatgtctagctccatggtttgctaatgtatttgccacatgattgcctaagtgaggaacctgaggtacatcttaactctgaaaaaacatgaataatttggcataaccacccatcaaacttccaaaatcttcttccttgccatggtatgacaatagtagaatcaccttttgaaagggctagaatttttgccttaatggctgaatctcgacctgcatgtttagagatactcttaacactgtgcgaaagtgatccctaagcaatctttttgttcctaactaccttgggttgcccaaagaacatttatcaaaaggaaacggagcaaaacccattgaaggtggtagtcattcaaaagtatctcctcagtcaacctcgtggttctgcaaactaggttccaatctagctgaataaagcttaaaaaaccttcattggtggaagcccacaaggaagaagagaagtaaaataagtcctaaattgtttctcgagacctctacctacccttagaaattcttgcactcctttcctgccaagtagtccaaatcaaagtgaggttggcaacgcacaaagattcctgcctcgaggaagtcctccaaaacctctaaagaatataatcaacattgcctccacctgtccaggtggaacccaatgaattcctacaagtcgaaatattctacatcttaatgtcaatgctacagggcaatgtaacagaaaaatgatctatagactccctgctcatacacaccattccaagctaagtgttttgtatggtccttctccattggagcaagtcattagtattggcctttttgccacaagtcatgcagaagtgaagacttttggtgaaactttggatttccaaatgaaatttgtgggaataaaagaggccacattgataaaaatggagataacattaaagcggaaactaactgagaactatcctaaagatgtcaaagaccaaactttccaattaggaaaagtgggtgacaaatagacatgggctaaagaaaacattagacgagctcaatttcttgtgaatgtcttgttttccactacttttagcccaggataatttgaccagttggatttgtaggtgatctactaaatagaacctacaaatttaatctagtgcttcttatgagaattatgttacaggggaggatcctgtaaaatattttggttgcacttttttctgcaaagtagaatccttggaaaagaagttcttgttagcacaagttcagttgtccaagcctgtgcttgtttgttgtaagcctgagctatcattttctatgtttcaattgattacaatataaaaatttccttcaaaggtttactagtccaatagactgctcatgtttaatggtgtagcctcacttatcttgggaatattcatttttaagataagttattgctatgtgtatttgagttcataataatgaatgttcagtcaatgcatggtaaatgatgaccagttgtatccatggataaatatcagtgcatctctagtaatgatgacaatcaataacctagttgtggggctgtccctttgatgaggatgaatctttaagataaatatcaagaaaatgaattagtattagttgcaattaaagtaggattaatattagttagaattaaattaggattagcatttgctagagttaaattaggagtagctaattacattattggacaattagaattaggtcttatatatgacattattagaatcttagtagacttggatttcttagagaagcctataaataaggctaatcgatgtaaatcaaagtaatgcattgatgattaataataccatgtttttttgcatactttgcaattttcaatggcgggactctgttaattttcttctaggtgagactcctagaaggtcttagtaagacttctaaggtttctattccttcttcttcttatcttctttctctatattttttgttttatttttctttaccataatttttatcccttgttcctctccttaaaccctaaaaaattaaaaaccctagcccaactatttgattgtaggtaagcatcctagtgttgtcctacatcactcttccccccaccccccaccttttttttcatttgtgtgtggtgggtgtattgttgaggaatgttttctttctacagtctaaggagaagcttttcaaatctggattatctgtcctggaatatcctcttaggaagctaggctcattttggcctaatcataaaaaattttacttgaccaaactgaataagttggttctccattgaatcatacacaacttgtttataggatcagggttctatcatctgtttattatcttagaatttataccacttaatccaatataaatatactgaaaaatatttattctatgtattttttattactttatgtgctagaatataactgtgttcttgtttataaatgtctgtgtaggttgcatcagagaaaggacttttctctatcatcat
